United States Patent Application Publication US 2007/0214517 A1 - sequence listing, part 60

SEQ ID NO: 79353 - DNA, 1500 bp, Arabidopsis thaliana
  misc_feature (1)..(1500): Ceres Seq. ID no. 12650956
atggaagctctaatgcttatcttcacgttctgtttcatagttctctctctcatattcctcatcggaagaatcaagcgaaagctcaaccttcctccgagtcctgcatgggcgttaccagtgatcggtcacctccgtcttctcaagccaccactccaccgtgttttcctctccgtctctcaatctttaggcgacgctccgatcatctccctccgtctcggcaaccgactcctattcgttgtctcttcacactcaatcgccgaggaatgcttcacgaagaacgacgtcatactcgcgaaccgacaaaccaccatttctacaaaacacatctcatacggcaactccaccgtggtctctgcttcgtacagcgaacactggagaaatctccgccgcatcggcgccttagagattttctcggctcatagactcaatagcttttcctctattcgccgcgatgagatcaggaggcttataggccgtctcttacggaactcttcttacgggtttactaaggttgagatgaaatcaatgttttctgacttaacattcaacaacatcattagaatgctagccggaaagtgttactatggagacggtaaagaagatgacccggaggccaaacgcgtgcggacgcttatcgcagaggctatgagttcttctggtcctggaaacgctgctgattatataccgatcctgacttggatcacatattccgagacacggataaagaagctcgctggtaggcttgatgagttcttgcaaggattggtcgatgagaaacgagaaggaaaggagaagaaggagaacacgatggttgatcacttgctttgtctgcaagaaacccaaccagagtactacatggaccgcatcatcaaaggaaccatgctttctcttatagcaggggggactgatacaacagcggtaacattggaatgggcattgtcaagcttgttgaacaatcctgaggtgctgaacaaggccagagacgagatcgacagaatgatcggtgtagacaggcttttggaggaatcagacatcccaaatcttccttatctacagaacattgtatctgaaacgttacgtctgtaccctgcagcccctatgctgcttcctcacgtagcctcgaaagattgtaaagttgggggatacgatatgccgcgtgggacgatgctattgactaatgcatgggctatacacagggatcccctgctatgggatgatccaacgagcttcaagccagagaggttcgagaaagaaggagaggctaagaagctaatgccgttcgggctaggaagaagggcatgtcctggatccggtttggctcagcggctagtgaccttgagtctcgggtctttgattcaatgttttgaatgggagaggattggagaagaagaggtcgatatgactgaaggtccaggactcacaatgccgaaagctagaccgttggaagctatgtgcagagcacgtgactttgttggtaaaatcttacccgactcctcttga

SEQ ID NO: 79354 - protein, 499 aa, Arabidopsis thaliana
  peptide (1)..(499): Ceres Seq. ID no. 12650957
  misc_feature (1)..(499): Homolog of NCBI NO: 15235535 NR Description: cytochrome p450 family; protein id: At4g37360.1
  misc_feature (1)..(499): Homolog of NCBI NO: 15235534 NR Description: cytochrome P450 monooxygenase, putative; protein
  misc_feature (1)..(498): Homolog of NCBI NO: 15235536 NR Description: cytochrome p450 family; protein id: At4g37370.1, by cDNA: 253698., supported by cDNA: gi_17473897 [Arabidopsis
  misc_feature (1)..(494): Homolog of NCBI NO: 21554381 NR Description: cytochrome P450-like protein [Arabidopsis
  misc_feature (126)..(498): Homolog of NCBI NO: 25282574 NR Description: probable cytochrome P450 F28G11.4 [imported] - thaliana >gi|12322266|gb|AAG51161.1|AC074025_11 cytochrome P450,
  misc_feature (2)..(100): Homolog of NCBI NO: 25282574 NR Description: probable cytochrome P450 F28G11.4 [imported] - thaliana >gi|12322266|gb|AAG51161.1|AC074025_11 cytochrome P450,
  misc_feature (5)..(495): Homolog of NCBI NO: 15235517 NR Description: cytochrome p450 family; protein id: At4g37320.1
  misc_feature (1)..(499): Homolog of NCBI NO: 15228472 NR Description: cytochrome p450 family; protein id: At3g28740.1, by cDNA: gi_15292830, supported by cDNA: gi_21280798 [Arabidopsis >gi|11994781|dbj|BAB03171.1| cytochrome P450 [Arabidopsis
  misc_feature (5)..(495): Homolog of NCBI NO: 15235533 NR Description: cytochrome p450 family; protein id: At4g37330.1
  misc_feature (116)..(498): Homolog of NCBI NO: 22330459 NR Description: cytochrome p450 family; protein id: At1g66540.1
MEALMLIFTFCFIVLSLIFLIGRIKRKLNLPPSPAWALPVIGHLRLLKPPLHRVFLSVSQSLGDAPIISLRLGNRLLFVVSSHSIAEECFTKNDVILANRQTTISTKHISYGNSTVVSASYSEHWRNLRRIGALEIFSAHRLNSFSSIRRDEIRRLIGRLLRNSSYGFTKVEMKSMFSDLTFNNIIRMLAGKCYYGDGKEDDPEAKRVRTLIAEAMSSSGPGNAADYIPILTWITYSETRIKKLAGRLDEFLQGLVDEKREGKEKKENTMVDHLLCLQETQPEYYMDRIIKGTMLSLIAGGTDTTAVTLEWALSSLLNNPEVLNKARDEIDRMIGVDRLLEESDIPNLPYLQNIVSETLRLYPAAPMLLPHVASKDCKVGGYDMPRGTMLLTNAWAIHRDPLLWDDPTSFKPERFEKEGEAKKLMPFGLGRRACPGSGLAQRLVTLSLGSLIQCFEWERIGEEEVDMTEGPGLTMPKARPLEAMCRARDFVGKILPDSS

SEQ ID NO: 79355 - protein, 495 aa, Arabidopsis thaliana
  peptide (1)..(495): Ceres Seq. ID no. 12650958
  misc_feature (1)..(495): Homolog of NCBI NO: 15235535 NR Description: cytochrome p450 family; protein id: At4g37360.1
  misc_feature (1)..(495): Homolog of NCBI NO: 15235534 NR Description: cytochrome P450 monooxygenase, putative; protein
  misc_feature (1)..(494): Homolog of NCBI NO: 15235536 NR Description: cytochrome p450 family; protein id: At4g37370.1, by cDNA: 253698., supported by cDNA: gi_17473897 [Arabidopsis
  misc_feature (1)..(490): Homolog of NCBI NO: 21554381 NR Description: cytochrome P450-like protein [Arabidopsis
  misc_feature (122)..(494): Homolog of NCBI NO: 25282574 NR Description: probable cytochrome P450 F28G11.4 [imported] - thaliana >gi|12322266|gb|AAG51161.1|AC074025_11 cytochrome P450,
  misc_feature (1)..(96): Homolog of NCBI NO: 25282574 NR Description: probable cytochrome P450 F28G11.4 [imported] - thaliana >gi|12322266|gb|AAG51161.1|AC074025_11 cytochrome P450,
  misc_feature (1)..(491): Homolog of NCBI NO: 15235517 NR Description: cytochrome p450 family; protein id: At4g37320.1
  misc_feature (1)..(495): Homolog of NCBI NO: 15228472 NR Description: cytochrome p450 family; protein id: At3g28740.1, by cDNA: gi_15292830, supported by cDNA: gi_21280798 [Arabidopsis >gi|11994781|dbj|BAB03171.1| cytochrome P450 [Arabidopsis
  misc_feature (1)..(491): Homolog of NCBI NO: 15235533 NR Description: cytochrome p450 family; protein id: At4g37330.1
  misc_feature (112)..(494): Homolog of NCBI NO: 22330459 NR Description: cytochrome p450 family; protein id: At1g66540.1
MLIFTFCFIVLSLIFLIGRIKRKLNLPPSPAWALPVIGHLRLLKPPLHRVFLSVSQSLGDAPIISLRLGNRLLFVVSSHSIAEECFTKNDVILANRQTTISTKHISYGNSTVVSASYSEHWRNLRRIGALEIFSAHRLNSFSSIRRDEIRRLIGRLLRNSSYGFTKVEMKSMFSDLTFNNIIRMLAGKCYYGDGKEDDPEAKRVRTLIAEAMSSSGPGNAADYIPILTWITYSETRIKKLAGRLDEFLQGLVDEKREGKEKKENTMVDHLLCLQETQPEYYMDRIIKGTMLSLIAGGTDTTAVTLEWALSSLLNNPEVLNKARDEIDRMIGVDRLLEESDIPNLPYLQNIVSETLRLYPAAPMLLPHVASKDCKVGGYDMPRGTMLLTNAWAIHRDPLLWDDPTSFKPERFEKEGEAKKLMPFGLGRRACPGSGLAQRLVTLSLGSLIQCFEWERIGEEEVDMTEGPGLTMPKARPLEAMCRARDFVGKILPDSS

SEQ ID NO: 79356 - protein, 327 aa, Arabidopsis thaliana
  peptide (1)..(327): Ceres Seq. ID no. 12650959
  misc_feature (1)..(327): Homolog of NCBI NO: 15235535 NR Description: cytochrome p450 family; protein id: At4g37360.1
  misc_feature (1)..(327): Homolog of NCBI NO: 15235534 NR Description: cytochrome P450 monooxygenase, putative; protein
  misc_feature (1)..(326): Homolog of NCBI NO: 15235536 NR Description: cytochrome p450 family; protein id: At4g37370.1, by cDNA: 253698., supported by cDNA: gi_17473897 [Arabidopsis
  misc_feature (1)..(322): Homolog of NCBI NO: 21554381 NR Description: cytochrome P450-like protein [Arabidopsis
  misc_feature (1)..(326): Homolog of NCBI NO: 25282574 NR Description: probable cytochrome P450 F28G11.4 [imported] - thaliana >gi|12322266|gb|AAG51161.1|AC074025_11 cytochrome P450,
  misc_feature (1)..(323): Homolog of NCBI NO: 15235517 NR Description: cytochrome p450 family; protein id: At4g37320.1
  misc_feature (1)..(327): Homolog of NCBI NO: 15228472 NR Description: cytochrome p450 family; protein id: At3g28740.1, by cDNA: gi_15292830, supported by cDNA: gi_21280798 [Arabidopsis >gi|11994781|dbj|BAB03171.1| cytochrome P450 [Arabidopsis
  misc_feature (1)..(323): Homolog of NCBI NO: 15235533 NR Description: cytochrome p450 family; protein id: At4g37330.1
  misc_feature (1)..(326): Homolog of NCBI NO: 22330459 NR Description: cytochrome p450 family; protein id: At1g66540.1
  misc_feature (1)..(323): Homolog of NCBI NO: 30692923 NR Description: cytochrome P450 91A1 [Arabidopsis thaliana] Cytochrome P450 81D1 >gi|9759034|dbj|BAB09361.1| cytochrome P450 thaliana] >gi|20147351|gb|AAM10388.1| AT5g36220/T30G6_3
MKSMFSDLTFNNIIRMLAGKCYYGDGKEDDPEAKRVRTLIAEAMSSSGPGNAADYIPILTWITYSETRIKKLAGRLDEFLQGLVDEKREGKEKKENTMVDHLLCLQETQPEYYMDRIIKGTMLSLIAGGTDTTAVTLEWALSSLLNNPEVLNKARDEIDRMIGVDRLLEESDIPNLPYLQNIVSETLRLYPAAPMLLPHVASKDCKVGGYDMPRGTMLLTNAWAIHRDPLLWDDPTSFKPERFEKEGEAKKLMPFGLGRRACPGSGLAQRLVTLSLGSLIQCFEWERIGEEEVDMTEGPGLTMPKARPLEAMCRARDFVGKILPDSS

SEQ ID NO: 79357 - DNA, 1245 bp, Arabidopsis thaliana
  misc_feature (1)..(1245): Ceres Seq. ID no. 12650964
  misc_feature: MA Experiment ID: 20000171 Result: Down-regulated in Transcription
  misc_feature: MA Experiment 20000171 PARAMETER Experiment Name: At_42deg_Heat_P Parameter: Age (day) Value: 14
  misc_feature: MA Experiment 20000171 PARAMETER Experiment Name: At_42deg_Heat_P Parameter: Organism Value: A. thaliana
  misc_feature: MA Experiment 20000171 PARAMETER Experiment Name: At_42deg_Heat_P Parameter: Plant Line Value: WS
  misc_feature: MA Experiment 20000171 PARAMETER Experiment Name: At_42deg_Heat_P Parameter: Temperature (deg C) Value: 42 vs. 22
  misc_feature: MA Experiment 20000171 PARAMETER Experiment Name: At_42deg_Heat_P Parameter: Timepoint (hr) Value: 1
  misc_feature: MA Experiment 20000171 PARAMETER Experiment Name: At_42deg_Heat_P Parameter: Tissue Value: Aerial
  misc_feature: MA Experiment ID: 20000173 Result: Down-regulated in Transcription
  misc_feature: MA Experiment 20000173 PARAMETER Experiment Name: At_42deg_Heat_P Parameter: Age (day) Value: 14
  misc_feature: MA Experiment 20000173 PARAMETER Experiment Name: At_42deg_Heat_P Parameter: Organism Value: A. thaliana
  misc_feature: MA Experiment 20000173 PARAMETER Experiment Name: At_42deg_Heat_P Parameter: Plant Line Value: WS
  misc_feature: MA Experiment 20000173 PARAMETER Experiment Name: At_42deg_Heat_P Parameter: Temperature (deg C) Value: 42 vs. 22
  misc_feature: MA Experiment 20000173 PARAMETER Experiment Name: At_42deg_Heat_P Parameter: Timepoint (hr) Value: 6
  misc_feature: MA Experiment 20000173 PARAMETER Experiment Name: At_42deg_Heat_P Parameter: Tissue Value: Aerial
  misc_feature: MA Experiment ID: 20000180 Result: Up-regulated in Transcription
  misc_feature: MA Experiment 20000180 PARAMETER Experiment Name: At_Germinating_Seeds_P Parameter: Age (hr) Value: 24 vs. 0
  misc_feature: MA Experiment 20000180 PARAMETER Experiment Name: At_Germinating_Seeds_P Parameter: Tissue Value: Germinating Seeds
  misc_feature: MA Experiment ID: 20000185 Result: Down-regulated in Transcription
  misc_feature: MA Experiment 20000185 PARAMETER Experiment Name: At_Roots__P Parameter: Age (day) Value: 7 vs. 21
  misc_feature: MA Experiment 20000185 PARAMETER Experiment Name: At_Roots__P Parameter: Organism Value: A. thaliana
  misc_feature: MA Experiment 20000185 PARAMETER Experiment Name: At_Roots__P Parameter: Tissue Value: Roots vs. Whole Plant
  misc_feature: MA Experiment ID: 20000234 Result: Down-regulated in Transcription
  misc_feature: MA Experiment 20000234 PARAMETER Experiment Name: At_Siliques_P Parameter: Age (day) Value: 21
  misc_feature: MA Experiment 20000234 PARAMETER Experiment Name: At_Siliques_P Parameter: Organism Value: A. thaliana
  misc_feature: MA Experiment 20000234 PARAMETER Experiment Name: At_Siliques_P Parameter: Plant Line Value: WS
  misc_feature: MA Experiment 20000234 PARAMETER Experiment Name: At_Siliques_P Parameter: Tissue Value: Less Than 5mm Siliques vs. Whole Plant
  misc_feature: MA Experiment ID: 20000235 Result: Down-regulated in Transcription
  misc_feature: MA Experiment 20000235 PARAMETER Experiment Name: At_Siliques_P Parameter: Age (day) Value: 21
  misc_feature: MA Experiment 20000235 PARAMETER Experiment Name: At_Siliques_P Parameter: Organism Value: A. thaliana
  misc_feature: MA Experiment 20000235 PARAMETER Experiment Name: At_Siliques_P Parameter: Plant Line Value: WS
  misc_feature: MA Experiment 20000235 PARAMETER Experiment Name: At_Siliques_P Parameter: Tissue Value: 5-10mm Siliques vs. Whole Plant
  misc_feature: MA Experiment ID: 20000265 Result: Down-regulated in Transcription
  misc_feature: MA Experiment 20000265 PARAMETER Experiment Name: At_Open_Flower_P Parameter: Age (day) Value: 21
  misc_feature: MA Experiment 20000265 PARAMETER Experiment Name: At_Open_Flower_P Parameter: Plant Line Value: WS
  misc_feature: MA Experiment 20000265 PARAMETER Experiment Name: At_Open_Flower_P Parameter: Tissue Value: Closed Flower vs. Whole Plant
  misc_feature: MA Experiment ID: 20000286 Result: Down-regulated in Transcription
  misc_feature: MA Experiment 20000286 PARAMETER Experiment Name: At_Open_Flower_P Parameter: Age (day) Value: 21
  misc_feature: MA Experiment 20000286 PARAMETER Experiment Name: At_Open_Flower_P Parameter: Plant Line Value: WS
  misc_feature: MA Experiment 20000286 PARAMETER Experiment Name: At_Open_Flower_P Parameter: Tissue Value: Half Open vs. Whole Plant
  misc_feature: MA Experiment ID: 20000438 Result: Down-regulated in Transcription
  misc_feature: MA Experiment 20000438 PARAMETER Experiment Name: At_Shoots__P Parameter: Age (day) Value: 14
  misc_feature: MA Experiment 20000438 PARAMETER Experiment Name: At_Shoots__P Parameter: Tissue Value: Shoots vs. Whole Plant
  misc_feature: MA Experiment ID: 20000439 Result: Down-regulated in Transcription
  misc_feature: MA Experiment 20000439 PARAMETER Experiment Name: At_Roots__P Parameter: Age (day) Value: 14 vs. 21
  misc_feature: MA Experiment 20000439 PARAMETER Experiment Name: At_Roots__P Parameter: Organism Value: A. thaliana
  misc_feature: MA Experiment 20000439 PARAMETER Experiment Name: At_Roots__P Parameter: Tissue Value: Roots vs. Whole Plant
  misc_feature: MA Experiment ID: 20000452 Result: Up-regulated in Transcription
  misc_feature: MA Experiment 20000452 PARAMETER Experiment Name: At_CS6879_Shoots-Roots_P Parameter: Age (day) Value: 14
  misc_feature: MA Experiment 20000452 PARAMETER Experiment Name: At_CS6879_Shoots-Roots_P Parameter: Organism Value: A. thaliana
  misc_feature: MA Experiment 20000452 PARAMETER Experiment Name: At_CS6879_Shoots-Roots_P Parameter: Plant Line Value: CS6879 vs. WS
  misc_feature: MA Experiment 20000452 PARAMETER Experiment Name: At_CS6879_Shoots-Roots_P Parameter: Tissue Value: Shoots
  misc_feature: MA Experiment ID: 20001248 Result: Down-regulated in Transcription
  misc_feature: MA Experiment 20001248 PARAMETER Experiment Name: At_Far-red-induction_P Parameter: Age (day) Value: 7
  misc_feature: MA Experiment 20001248 PARAMETER Experiment Name: At_Far-red-induction_P Parameter: Light Value: Far-red vs. White
  misc_feature: MA Experiment 20001248 PARAMETER Experiment Name: At_Far-red-induction_P Parameter: Organism Value: A. thaliana
  misc_feature: MA Experiment 20001248 PARAMETER Experiment Name: At_Far-red-induction_P Parameter: Plant Line Value: Columbia
  misc_feature: MA Experiment 20001248 PARAMETER Experiment Name: At_Far-red-induction_P Parameter: Timepoint (hr) Value: 4
  misc_feature: MA Experiment 20001248 PARAMETER Experiment Name: At_Far-red-induction_P Parameter: Tissue Value: Whole Plant
  misc_feature: MA Experiment ID: 20001904 Result: Up-regulated in Transcription
  misc_feature: MA Experiment 20001904 PARAMETER Experiment Name: At_Drought_Reproduction_P Parameter: Age (day) Value: 37
  misc_feature: MA Experiment 20001904 PARAMETER Experiment Name: At_Drought_Reproduction_P Parameter: Organism Value: A. thaliana
  misc_feature: MA Experiment 20001904 PARAMETER Experiment Name: At_Drought_Reproduction_P Parameter: Plant Line Value: WS
  misc_feature: MA Experiment 20001904 PARAMETER Experiment Name: At_Drought_Reproduction_P Parameter: Timepoint (day) Value: 7
  misc_feature: MA Experiment 20001904 PARAMETER Experiment Name: At_Drought_Reproduction_P Parameter: Tissue Value: Rosettes
  misc_feature: MA Experiment 20001904 PARAMETER Experiment Name: At_Drought_Reproduction_P Parameter: Treatment Value: Drought vs. No Drought
  misc_feature: MA Experiment ID: 20001905 Result: Up-regulated in Transcription
  misc_feature: MA Experiment 20001905 PARAMETER Experiment Name: At_Drought_Reproduction_P Parameter: Age (day) Value: 40
  misc_feature: MA Experiment 20001905 PARAMETER Experiment Name: At_Drought_Reproduction_P Parameter: Organism Value: A. thaliana
  misc_feature: MA Experiment 20001905 PARAMETER Experiment Name: At_Drought_Reproduction_P Parameter: Plant Line Value: WS
  misc_feature: MA Experiment 20001905 PARAMETER Experiment Name: At_Drought_Reproduction_P Parameter: Timepoint (day) Value: 10
  misc_feature: MA Experiment 20001905 PARAMETER Experiment Name: At_Drought_Reproduction_P Parameter: Tissue Value: Rosettes
  misc_feature: MA Experiment 20001905 PARAMETER Experiment Name: At_Drought_Reproduction_P Parameter: Treatment Value: Drought vs. No Drought
atgggcaagtatgtggcttatgactacacctccatggttacggctccttacggtgaccactggcgaaacctccgtcgtatcaccgctttagaagtcttctccacaaatcgactcaacgcttcagcggaaatccgacatgacgaagttaagatgcttctccaaaagcttcacgatttatctgtcgaacgcccggctaaagtggagttacgacagttactaacgggtcttaccctaaatgtgataatgagaatgatgaccggaaagagattcttcgaggaagatgatggcggaaaggcggggataagtttggagttccgggaactagtggcggagattctagagctctctgcggcggacaatccagctgattttttgccggctctacggtggtttgactacaaaggtttggtcaagagagcaaagaggattggagaaaggatggatagtttattacaagggtttttggatgagcatagagctaacaaagacagattggagtttaagaacaccatgattgctcatttacttgattctcaagaaaaagagcctcataactacagtgatcaaaccatcaaaggtcttatactgatgatggtagtaggaggcacagatacatcggccttaaccgtggaatgggcaatgtcaaatttattgaatcatccacaaatactagagaccacgagacaaaacattgatactcaaatggaaacatcaagtagtcgtcgtttgttgaaagaagaagatttggtaaacatgaactacttgaaaaatgttgtgtcggagacactaagactttaccctgtggcaccacttatggttcctcatgtgccatcttctgactgtgtaatcggtggattcaacgttccacgtgatacgatcgtgttggttaacttgtgggctatacatcgagatccaagcgtgtgggatgatccaacgtcatttaagccggagagatttgaagggagtgatcagtttggacattacaatggtaaaatgatgccgtttgggttaggaagacgggcttgtcctgggttgagtttggctaaccgggttgttgggttattattgggttcgatgattcagtgctttgagtgggaaagcggctcaggaggtcaggttgatatgactgaaggtccaggacttagtttgcctaaggctgaaccattggttgtcacgtgcagaacacgtgagatggcttccgagttgttgttcttcggatcagagccaagcaataagaatgtctag

SEQ ID NO: 79358 - protein, 414 aa, Arabidopsis thaliana
  peptide (1)..(414): Ceres Seq. ID no. 12650965
  misc_feature (1)..(394): Pfam Name: Cytochrome P450 Pfam Description: Cytochrome P450
  misc_feature (1)..(414): Homolog of NCBI NO: 15809893 NR Description: AT4g37310/C7A10_50 [Arabidopsis thaliana]
  misc_feature (1)..(414): Homolog of NCBI NO: 30690935 NR Description: cytochrome P450, putative [Arabidopsis thaliana]
  misc_feature (3)..(402): Homolog of NCBI NO: 4894170 NR Description: cytochrome P450 [Cicer arietinum]
  misc_feature (2)..(402): Homolog of NCBI NO: 33521519 NR Description: isoflavone 3'-hydroxylase [Medicago truncatula]
  misc_feature (3)..(403): Homolog of NCBI NO: 15235535 NR Description: cytochrome p450 family; protein id: At4g37360.1
  misc_feature (1)..(396): Homolog of NCBI NO: 15235536 NR Description: cytochrome p450 family; protein id: At4g37370.1, by cDNA: 253698., supported by cDNA: gi_17473897 [Arabidopsis
  misc_feature (2)..(402): Homolog of NCBI NO: 4200044 NR Description: cytochrome P450 [Glycyrrhiza echinata]
  misc_feature (2)..(402): Homolog of NCBI NO: 5915842 NR Description: Cytochrome P450 81E1 (Isoflavone 2'-hydroxylase)
  misc_feature (2)..(402): Homolog of NCBI NO: 7415996 NR Description: cytochrome P450 [Lotus japonicus]
  misc_feature (1)..(396): Homolog of NCBI NO: 21554381 NR Description: cytochrome P450-like protein [Arabidopsis
MGKYVAYDYTSMVTAPYGDHWRNLRRITALEVFSTNRLNASAEIRHDEVKMLLQKLHDLSVERPAKVELRQLLTGLTLNVIMRMMTGKRFFEEDDGGKAGISLEFRELVAEILELSAADNPADFLPALRWFDYKGLVKRAKRIGERMDSLLQGFLDEHRANKDRLEFKNTMIAHLLDSQEKEPHNYSDQTIKGLILMMVVGGTDTSALTVEWAMSNLLNHPQILETTRQNIDTQMETSSSRRLLKEEDLVNMNYLKNVVSETLRLYPVAPLMVPHVPSSDCVIGGFNVPRDTIVLVNLWAIHRDPSVWDDPTSFKPERFEGSDQFGHYNGKMMPFGLGRRACPGLSLANRVVGLLLGSMIQCFEWESGSGGQVDMTEGPGLSLPKAEPLVVTCRTREMASELLFFGSEPSNKNV

SEQ ID NO: 79359 - protein, 403 aa, Arabidopsis thaliana
  peptide (1)..(403): Ceres Seq. ID no. 12650966
  misc_feature (1)..(383): Pfam Name: Cytochrome P450 Pfam Description: Cytochrome P450
  misc_feature (1)..(403): Homolog of NCBI NO: 15809893 NR Description: AT4g37310/C7A10_50 [Arabidopsis thaliana]
  misc_feature (1)..(403): Homolog of NCBI NO: 30690935 NR Description: cytochrome P450, putative [Arabidopsis thaliana]
  misc_feature (1)..(391): Homolog of NCBI NO: 4894170 NR Description: cytochrome P450 [Cicer arietinum]
  misc_feature (1)..(391): Homolog of NCBI NO: 33521519 NR Description: isoflavone 3'-hydroxylase [Medicago truncatula]
  misc_feature (1)..(392): Homolog of NCBI NO: 15235535 NR Description: cytochrome p450 family; protein id: At4g37360.1
  misc_feature (1)..(385): Homolog of NCBI NO: 15235536 NR Description: cytochrome p450 family; protein id: At4g37370.1, by cDNA: 253698., supported by cDNA: gi_17473897 [Arabidopsis
  misc_feature (1)..(391): Homolog of NCBI NO: 4200044 NR Description: cytochrome P450 [Glycyrrhiza echinata]
  misc_feature (1)..(391): Homolog of NCBI NO: 5915842 NR Description: Cytochrome P450 81E1 (Isoflavone 2'-hydroxylase)
  misc_feature (1)..(391): Homolog of NCBI NO: 7415996 NR Description: cytochrome P450 [Lotus japonicus]
  misc_feature (1)..(385): Homolog of NCBI NO: 21554381 NR Description: cytochrome P450-like protein [Arabidopsis
MVTAPYGDHWRNLRRITALEVFSTNRLNASAEIRHDEVKMLLQKLHDLSVERPAKVELRQLLTGLTLNVIMRMMTGKRFFEEDDGGKAGISLEFRELVAEILELSAADNPADFLPALRWFDYKGLVKRAKRIGERMDSLLQGFLDEHRANKDRLEFKNTMIAHLLDSQEKEPHNYSDQTIKGLILMMVVGGTDTSALTVEWAMSNLLNHPQILETTRQNIDTQMETSSSRRLLKEEDLVNMNYLKNVVSETLRLYPVAPLMVPHVPSSDCVIGGFNVPRDTIVLVNLWAIHRDPSVWDDPTSFKPERFEGSDQFGHYNGKMMPFGLGRRACPGLSLANRVVGLLLGSMIQCFEWESGSGGQVDMTEGPGLSLPKAEPLVVTCRTREMASELLFFGSEPSNKNV

SEQ ID NO: 79360 - protein, 364 aa, Arabidopsis thaliana
  peptide (1)..(364): Ceres Seq. ID no. 12650967
  misc_feature (1)..(344): Pfam Name: Cytochrome P450 Pfam Description: Cytochrome P450
  misc_feature (1)..(364): Homolog of NCBI NO: 15809893 NR Description: AT4g37310/C7A10_50 [Arabidopsis thaliana]
  misc_feature (1)..(364): Homolog of NCBI NO: 30690935 NR Description: cytochrome P450, putative [Arabidopsis thaliana]
  misc_feature (1)..(352): Homolog of NCBI NO: 4894170 NR Description: cytochrome P450 [Cicer arietinum]
  misc_feature (1)..(352): Homolog of NCBI NO: 33521519 NR Description: isoflavone 3'-hydroxylase [Medicago truncatula]
  misc_feature (1)..(353): Homolog of NCBI NO: 15235535 NR Description: cytochrome p450 family; protein id: At4g37360.1
  misc_feature (1)..(346): Homolog of NCBI NO: 15235536 NR Description: cytochrome p450 family; protein id: At4g37370.1, by cDNA: 253698., supported by cDNA: gi_17473897 [Arabidopsis
  misc_feature (1)..(352): Homolog of NCBI NO: 4200044 NR Description: cytochrome P450 [Glycyrrhiza echinata]
  misc_feature (1)..(352): Homolog of NCBI NO: 5915842 NR Description: Cytochrome P450 81E1 (Isoflavone 2'-hydroxylase)
  misc_feature (1)..(352): Homolog of NCBI NO: 7415996 NR Description: cytochrome P450 [Lotus japonicus]
  misc_feature (1)..(346): Homolog of NCBI NO: 21554381 NR Description: cytochrome P450-like protein [Arabidopsis
MLLQKLHDLSVERPAKVELRQLLTGLTLNVIMRMMTGKRFFEEDDGGKAGISLEFRELVAEILELSAADNPADFLPALRWFDYKGLVKRAKRIGERMDSLLQGFLDEHRANKDRLEFKNTMIAHLLDSQEKEPHNYSDQTIKGLILMMVVGGTDTSALTVEWAMSNLLNHPQILETTRQNIDTQMETSSSRRLLKEEDLVNMNYLKNVVSETLRLYPVAPLMVPHVPSSDCVIGGFNVPRDTIVLVNLWAIHRDPSVWDDPTSFKPERFEGSDQFGHYNGKMMPFGLGRRACPGLSLANRVVGLLLGSMIQCFEWESGSGGQVDMTEGPGLSLPKAEPLVVTCRTREMASELLFFGSEPSNKNV

SEQ ID NO: 79361 - DNA, 1604 bp, Arabidopsis thaliana
  misc_feature (1)..(1604): Ceres Seq. ID no. 12650970
  misc_feature: MA Experiment ID: 20000234 Result: Up-regulated in Transcription
  misc_feature: MA Experiment 20000234 PARAMETER Experiment Name: At_Siliques_P Parameter: Age (day) Value: 21
  misc_feature: MA Experiment 20000234 PARAMETER Experiment Name: At_Siliques_P Parameter: Organism Value: A. thaliana
  misc_feature: MA Experiment 20000234 PARAMETER Experiment Name: At_Siliques_P Parameter: Plant Line Value: WS
  misc_feature: MA Experiment 20000234 PARAMETER Experiment Name: At_Siliques_P Parameter: Tissue Value: Less Than 5mm Siliques vs. Whole Plant
  misc_feature: MA Experiment ID: 20000264 Result: Up-regulated in Transcription
  misc_feature: MA Experiment 20000264 PARAMETER Experiment Name: At_Open_Flower_P Parameter: Age (day) Value: 21
  misc_feature: MA Experiment 20000264 PARAMETER Experiment Name: At_Open_Flower_P Parameter: Plant Line Value: WS
  misc_feature: MA Experiment 20000264 PARAMETER Experiment Name: At_Open_Flower_P Parameter: Tissue Value: Open Flower vs. Whole Plant
  misc_feature: MA Experiment ID: 20000265 Result: Up-regulated in Transcription
  misc_feature: MA Experiment 20000265 PARAMETER Experiment Name: At_Open_Flower_P Parameter: Age (day) Value: 21
  misc_feature: MA Experiment 20000265 PARAMETER Experiment Name: At_Open_Flower_P Parameter: Plant Line Value: WS
  misc_feature: MA Experiment 20000265 PARAMETER Experiment Name: At_Open_Flower_P Parameter: Tissue Value: Closed Flower vs. Whole Plant
  misc_feature: MA Experiment ID: 20000286 Result: Up-regulated in Transcription
  misc_feature: MA Experiment 20000286 PARAMETER Experiment Name: At_Open_Flower_P Parameter: Age (day) Value: 21
  misc_feature: MA Experiment 20000286 PARAMETER Experiment Name: At_Open_Flower_P Parameter: Plant Line Value: WS
  misc_feature: MA Experiment 20000286 PARAMETER Experiment Name: At_Open_Flower_P Parameter: Tissue Value: Half Open vs. Whole Plant
  misc_feature: MA Experiment ID: 20000437 Result: Down-regulated in Transcription
  misc_feature: MA Experiment 20000437 PARAMETER Experiment Name: At_Drought_P Parameter: Age (day) Value: 8
  misc_feature: MA Experiment 20000437 PARAMETER Experiment Name: At_Drought_P Parameter: Organism Value: A. thaliana
  misc_feature: MA Experiment 20000437 PARAMETER Experiment Name: At_Drought_P Parameter: Plant Line Value: WS
  misc_feature: MA Experiment 20000437 PARAMETER Experiment Name: At_Drought_P Parameter: Timepoint (hr) Value: 24
  misc_feature: MA Experiment 20000437 PARAMETER Experiment Name: At_Drought_P Parameter: Tissue Value: Whole Plant
  misc_feature: MA Experiment 20000437 PARAMETER Experiment Name: At_Drought_P Parameter: Treatment Value: Drought vs. No Drought
  misc_feature: MA Experiment ID: 20001560 Result: Up-regulated in Transcription
  misc_feature: MA Experiment 20001560 PARAMETER Experiment Name: At_Drought_Soil_Dry_P Parameter: Age (day) Value: 28
  misc_feature: MA Experiment 20001560 PARAMETER Experiment Name: At_Drought_Soil_Dry_P Parameter: Organism Value: A. thaliana
  misc_feature: MA Experiment 20001560 PARAMETER Experiment Name: At_Drought_Soil_Dry_P Parameter: Plant Line Value: WS
  misc_feature: MA Experiment 20001560 PARAMETER Experiment Name: At_Drought_Soil_Dry_P Parameter: Post Timepoint (hr) Value: None
  misc_feature: MA Experiment 20001560 PARAMETER Experiment Name: At_Drought_Soil_Dry_P Parameter: Post-Treatment Value: None
  misc_feature: MA Experiment 20001560 PARAMETER Experiment Name: At_Drought_Soil_Dry_P Parameter: Timepoint (day) Value: 14
  misc_feature: MA Experiment 20001560 PARAMETER Experiment Name: At_Drought_Soil_Dry_P Parameter: Treatment Value: Drought vs. No Drought
  misc_feature: MA Experiment ID: 20001911 Result: Down-regulated in Transcription
  misc_feature: MA Experiment 20001911 PARAMETER Experiment Name: At_Drought_Reproduction_P Parameter: Age (day) Value: 40
  misc_feature: MA Experiment 20001911 PARAMETER Experiment Name: At_Drought_Reproduction_P Parameter: Organism Value: A. thaliana
  misc_feature: MA Experiment 20001911 PARAMETER Experiment Name: At_Drought_Reproduction_P Parameter: Plant Line Value: WS
  misc_feature: MA Experiment 20001911 PARAMETER Experiment Name: At_Drought_Reproduction_P Parameter: Timepoint (day) Value: 10
  misc_feature: MA Experiment 20001911 PARAMETER Experiment Name: At_Drought_Reproduction_P Parameter: Tissue Value: Flowers
  misc_feature: MA Experiment 20001911 PARAMETER Experiment Name: At_Drought_Reproduction_P Parameter: Treatment Value: Drought vs. No Drought
catagaagacgagacgcccccactacttagactttttctactacaaacctgagattttagtctgagagaaagagaagagaacactaagatgatgacttctcgttcgattgttcctcaacaatccacggatgatgttgttgtggtagatggcaaaaacgtagcgaaaggaagaaaccgtcaagttcttggtgatataggtaatgttgttcgaggaaattacccaaagaacaacgaaccggaaaagatcaatcatcgtcctcgtacacgatctcaaaatcccacgcttcttgtggaggataatctcaaaaaacctgtagtcaagagaaacgcagtaccaaagccgaagaaagtggctgggaaaccaaaggtagtagacgtgattgagataagttcagacagtgatgaagaacttggtttagttgctgctcgagagaagaaggctactaagaagaaagcgaccacttacacatctgttcttactgctagaagcaaggctgcttgtggtttagagaagaaacagaaagaaaagattgttgatatcgattctgctgatgttgagaatgacctcgcagctgtggaatatgtggaagatatttacagtttttacaagtctgttgagagtgaatggaggccacgagattacatggcatctcagcctgatattaatgaaaagatgagactgatcctggtggagtggttgattgatgtgcatgtccgattcgagctaaacccggaaacattttacctcactgttaacattctggatcggttcttgtcggttaagccagtgcctcgaaaagaactgcagcttgttggtctcagtgctcttctcatgtcggccaagtatgaagaaatttggccaccacaggtggaggatctagttgatattgcagaccatgcatacagtcacaaacagattctggtgatggagaagacaatactgtctacacttgagtggtacttgacagttccgactcattatgtcttcctagctcgtttcatcaaagcttccattgcagacgaaaagatggagaatatggtgcactatttggctgagttaggcgtaatgcattacgatacgatgataatgttcagtccatcaatggtagctgcttctgcaatctacgcagcaagatcttctctccgccaagttcccatatggaccagcactctcaagcatcacactggctattctgagactcagctcatggactgtgcaaagctgttggcgtatcagcaatggaagcaacaagaagaagggagtgagagcagtactaagggagctttacgaaagaaatactccaaggacgaacgcttcgctgtggctttgatccctccggccaaagctttgttgaccggaactgaatctgcttaggagttaggaccctttaagaagacgaagaagctgaagaaccaagcctagtttcattttccttctgaaaatcaagtctagtttcattagataatggtattttgaacaagtctaatgagtcgctttgaaacctagtcctttagcatgattcattcccaaacactgcatatcttgtaagaagtcagtttcttccgagaagtttaatttccttagatataatattctgtggttt

SEQ ID NO: 79362 - protein, 428 aa, Arabidopsis thaliana
  peptide (1)..(428): Ceres Seq. ID no. 12650971
  misc_feature (168)..(293): Pfam Name: Cyclin, N-terminal domain Pfam Description: Cyclin, N-terminal domain
  misc_feature (1)..(428): Homolog of NCBI NO: 15235573 NR Description: Cyclin B1;1; protein id: At4g37490.1, supported
  misc_feature (1)..(428): Homolog of NCBI NO: 166684 NR Description: cyclin >gi|908816|emb|CAA44169.1| cyclin
  misc_feature (2)..(428): Homolog of NCBI NO: 7438486 NR Description: cyclin, B-type - common tobacco
  misc_feature (27)..(423): Homolog of NCBI NO: 7438502 NR Description: cyclin B1d-ll - yellow lupine
  misc_feature (1)..(423): Homolog of NCBI NO: 22330995 NR Description: Cyclin B1;3; protein id: At3g11520.1 [Arabidopsis
  misc_feature (76)..(427): Homolog of NCBI NO: 1835260 NR Description: mitotic cyclin [Sesbania rostrata]
  misc_feature (1)..(423): Homolog of NCBI NO: 12322897 NR Description: putative cyclin; 69674-68010 [Arabidopsis
  misc_feature (15)..(423): Homolog of NCBI NO: 2146728 NR Description: mitosis-specific cyclin 1b - Arabidopsis thaliana
  misc_feature (15)..(423): Homolog of NCBI NO: 15239938 NR Description: Cyclin B1;2; protein id: At5g06150.1, supported
  misc_feature (22)..(422): Homolog of NCBI NO: 7438506 NR Description: mitosis-specific cyclin B-type - Madagascar
MMTSRSIVPQQSTDDVVVVDGKNVAKGRNRQVLGDIGNVVRGNYPKNNEPEKINHRPRTRSQNPTLLVEDNLKKPVVKRNAVPKPKKVAGKPKVVDVIEISSDSDEELGLVAAREKKATKKKATTYTSVLTARSKAACGLEKKQKEKIVDIDSADVENDLAAVEYVEDIYSFYKSVESEWRPRDYMASQPDINEKMRLILVEWLIDVHVRFELNPETFYLTVNILDRFLSVKPVPRKELQLVGLSALLMSAKYEEIWPPQVEDLVDIADHAYSHKQILVMEKTILSTLEWYLTVPTHYVFLARFIKASIADEKMENMVHYLAELGVMHYDTMIMFSPSMVAASAIYAARSSLRQVPIWTSTLKHHTGYSETQLMDCAKLLAYQQWKQQEEGSESSTKGALRKKYSKDERFAVALIPPAKALLTGTESA

SEQ ID NO: 79363 - protein, 427 aa, Arabidopsis thaliana
  peptide (1)..(427): Ceres Seq. ID no. 12650972
  misc_feature (167)..(292): Pfam Name: Cyclin, N-terminal domain Pfam Description: Cyclin, N-terminal domain
  misc_feature (1)..(427): Homolog of NCBI NO: 15235573 NR Description: Cyclin B1;1; protein id: At4g37490.1, supported
  misc_feature (1)..(427): Homolog of NCBI NO: 166684 NR Description: cyclin >gi|908816|emb|CAA44169.1| cyclin
  misc_feature (1)..(427): Homolog of NCBI NO: 7438486 NR Description: cyclin, B-type - common tobacco
  misc_feature (26)..(422): Homolog of NCBI NO: 7438502 NR Description: cyclin B1d-ll - yellow lupine
  misc_feature (1)..(422): Homolog of NCBI NO: 22330995 NR Description: Cyclin B1;3; protein id: At3g11520.1 [Arabidopsis
  misc_feature (75)..(426): Homolog of NCBI NO: 1835260 NR Description: mitotic cyclin [Sesbania rostrata]
  misc_feature (1)..(422): Homolog of NCBI NO: 12322897 NR Description: putative cyclin; 69674-68010 [Arabidopsis
  misc_feature (14)..(422): Homolog of NCBI NO: 2146728 NR Description: mitosis-specific cyclin 1b - Arabidopsis thaliana
  misc_feature (14)..(422): Homolog of NCBI NO: 15239938 NR Description: Cyclin B1;2; protein id: At5g06150.1, supported
  misc_feature (21)..(421): Homolog of NCBI NO: 7438506 NR Description: mitosis-specific cyclin B-type - Madagascar
MTSRSIVPQQSTDDVVVVDGKNVAKGRNRQVLGDIGNVVRGNYPKNNEPEKINHRPRTRSQNPTLLVEDNLKKPVVKRNAVPKPKKVAGKPKVVDVIEISSDSDEELGLVAAREKKATKKKATTYTSVLTARSKAACGLEKKQKEKIVDIDSADVENDLAAVEYVEDIYSFYKSVESEWRPRDYMASQPDINEKMRLILVEWLIDVHVRFELNPETFYLTVNILDRFLSVKPVPRKELQLVGLSALLMSAKYEEIWPPQVEDLVDIADHAYSHKQILVMEKTILSTLEWYLTVPTHYVFLARFIKASIADEKMENMVHYLAELGVMHYDTMIMFSPSMVAASAIYAARSSLRQVPIWTSTLKHHTGYSETQLMDCAKLLAYQQWKQQEEGSESSTKGALRKKYSKDERFAVALIPPAKALLTGTESA

SEQ ID NO: 79364 - protein, 243 aa, Arabidopsis thaliana
  peptide (1)..(243): Ceres Seq. ID no. 12650973
  misc_feature (1)..(108): Pfam Name: Cyclin, N-terminal domain Pfam Description: Cyclin, N-terminal domain
  misc_feature (1)..(243): Homolog of NCBI NO: 15235573 NR Description: Cyclin B1;1; protein id: At4g37490.1, supported
  misc_feature (1)..(243): Homolog of NCBI NO: 166684 NR Description: cyclin >gi|908816|emb|CAA44169.1| cyclin
  misc_feature (1)..(243): Homolog of NCBI NO: 7438486 NR Description: cyclin, B-type - common tobacco
  misc_feature (1)..(238): Homolog of NCBI NO: 7438502 NR Description: cyclin B1d-ll - yellow lupine
  misc_feature (1)..(238): Homolog of NCBI NO: 22330995 NR Description: Cyclin B1;3; protein id: At3g11520.1 [Arabidopsis
  misc_feature (1)..(242): Homolog of NCBI NO: 1835260 NR Description: mitotic cyclin [Sesbania rostrata]
  misc_feature (1)..(238): Homolog of NCBI NO: 12322897 NR Description: putative cyclin; 69674-68010 [Arabidopsis
  misc_feature (1)..(238): Homolog of NCBI NO: 2146728 NR Description: mitosis-specific cyclin 1b - Arabidopsis thaliana
  misc_feature (1)..(238): Homolog of NCBI NO: 15239938 NR Description: Cyclin B1;2; protein id: At5g06150.1, supported
  misc_feature (1)..(237): Homolog of NCBI NO: 7438506 NR Description: mitosis-specific cyclin B-type - Madagascar
MASQPDINEKMRLILVEWLIDVHVRFELNPETFYLTVNILDRFLSVKPVPRKELQLVGLSALLMSAKYEEIWPPQVEDLVDIADHAYSHKQILVMEKTILSTLEWYLTVPTHYVFLARFIKASIADEKMENMVHYLAELGVMHYDTMIMFSPSMVAASAIYAARSSLRQVPIWTSTLKHHTGYSETQLMDCAKLLAYQQWKQQEEGSESSTKGALRKKYSKDERFAVALIPPAKALLTGTESA

SEQ ID NO: 79365 - DNA, 1299 bp, Arabidopsis thaliana
  misc_feature (1)..(1299): Ceres Seq. ID no. 12650990
  misc_feature: MA Experiment ID: 20000286 Result: Up-regulated in Transcription
  misc_feature: MA Experiment 20000286 PARAMETER Experiment Name: At_Open_Flower_P Parameter: Age (day) Value: 21
  misc_feature: MA Experiment 20000286 PARAMETER Experiment Name: At_Open_Flower_P Parameter: Plant Line Value: WS
  misc_feature: MA Experiment 20000286 PARAMETER Experiment Name: At_Open_Flower_P Parameter: Tissue Value: Half Open vs. Whole Plant
atgggaaaacccggcggcgcaaagaccagaaccgccgtatgtttatcagacggtgttttctttctcgccggagctttcatgtctctcactctcgtctggtcttacttctcaatcttttcaccttctttcaccagtttacgtcacgacggcaaaccggttcaatgctccggtttagacatgcaattcgacccatccgagcccggtttttacgacgacccggatctaagctactcgatcgagaaaccaatcacaaaatgggacgagaaacgaaaccaatggtttgaatcacacccatctttcaaacccggttcagaaaaccggatcgtaatggtaaccggttcacaatcctcgccgtgtaaaaacccaatcggagaccatttattactccgatgcttcaaaaacaaagtcgattacgctcgaatccatggtcacgacatcttctacagcaattctcttcttcatccgaagatgaattcttattgggcgaaacttccggtggttaaagcggcgatgcttgctcacccagaggcggagtggatttggtgggttgattccgacgctatcttcaccgacatggaatttaaaccgccgcttcaccgttaccgtcaacacaacctcgtcgttcacggttggccaaatataatctacgagaaacagagctggacggcgttaaacgccggcgttttcttaataagaaattgtcaatggtcaatggacttaattgacacgtggaagagtatgggaccagtgagtccagattacaaaaaatggggtcccatccaacggtcgatattcaaagataagttgtttccagagtcagatgatcaaacggctctgatttatttgctttataaacataaagagttgtattatcctaagatatacctcgaagcagagtattatctccaagggtattggattggtgtatttggggatttcgccaacgtgacggaacggtatcttgagatggaacgagaagacgacacgttgcgtaggcgtcacgcggagaaagtgagcgaacgatacggtgcgtttagagaagagcggtttttgaaaggcgagtttggtgggagaggaagtcgcagacgcgcgtttataacgcattttacgggatgtcaaccatgtagcggtgatcataatccgagttacgatggtgacacgtgttggaatgagatgatcagagcccttaattttgctgataatcaggtgatgcgcgtgtatggttacgttcattctgatttgagtaagacttctccgcttcaacctctgccgttcgattatcctaatgaagcttggtga

SEQ ID NO: 79366 - protein, 432 aa, Arabidopsis thaliana
  peptide (1)..(432): Ceres Seq. ID no. 12650991
  misc_feature (104)..(382): Pfam Name: galactosyl transferase GMA12/MNN10 family Pfam Description: galactosyl transferase GMA12/MNN10 family
  misc_feature (1)..(432): Homolog of NCBI NO: 22329223 NR Description: similar to alpha galactosyltransferase protein; id: At4g37690.1 [Arabidopsis thaliana] >gi|7485771|pir||T04726
  misc_feature (1)..(432): Homolog of NCBI NO: 18400116 NR Description: Expressed protein; protein id: At2g22900.1, by cDNA: gi_14334701, supported by cDNA: gi_16323413 [Arabidopsis >gi|25349319|pir||C84618 hypothetical protein At2g22900
  misc_feature (6)..(428): Homolog of NCBI NO: 25486551 NR Description: alpha galactosyltransferase (EC 2.4.1.-)
  misc_feature (63)..(320): Homolog of NCBI NO: 15240848 NR Description: alpha galactosyltransferase protein; protein id: [Arabidopsis thaliana] >gi|9716848|emb|CAC01676.1| putative golgi [Arabidopsis thaliana] >gi|9759594|dbj|BAB11451.1| alpha
  misc_feature (348)..(414): Homolog of NCBI NO: 15240848 NR Description: alpha galactosyltransferase protein; protein id: [Arabidopsis thaliana] >gi|9716848|emb|CAC01676.1| putative golgi [Arabidopsis thaliana] >gi|9759594|dbj|BAB11451.1| alpha
  misc_feature (72)..(320): Homolog of NCBI NO: 18411962 NR Description: putative glycosyltransferase; protein id: supported by cDNA: gi_16209668 [Arabidopsis thaliana]
  misc_feature (72)..(320): Homolog of NCBI NO: 25349323 NR Description: probable glycosyltransferase [imported] - thaliana >gi|3892054|gb|AAC78266.1|AAC78266 putative [Arabidopsis thaliana] >gi|7269010|emb|CAB80743.1| putative
  misc_feature (346)..(415): Homolog of NCBI NO: 18411962 NR Description: putative glycosyltransferase; protein id: supported by cDNA: gi_16209668 [Arabidopsis thaliana]
  misc_feature (346)..(415): Homolog of NCBI NO: 25349323 NR Description: probable glycosyltransferase [imported] - thaliana >gi|3892054|gb|AAC78266.1|AAC78266 putative [Arabidopsis thaliana] >gi|7269010|emb|CAB80743.1| putative
  misc_feature (71)..(312): Homolog of NCBI NO: 15228843 NR Description: alpha galactosyltransferase-like protein; protein At3g62720.1, supported by cDNA: gi_15983425 [Arabidopsis
MGKPGGAKTRTAVCLSDGVFFLAGAFMSLTLVWSYFSIFSPSFTSLRHDGKPVQCSGLDMQFDPSEPGFYDDPDLSYSIEKPITKWDEKRNQWFESHPSFKPGSENRIVMVTGSQSSPCKNPIGDHLLLRCFKNKVDYARIHGHDIFYSNSLLHPKMNSYWAKLPVVKAAMLAHPEAEWIWWVDSDAIFTDMEFKPPLHRYRQHNLVVHGWPNIIYEKQSWTALNAGVFLIRNCQWSMDLIDTWKSMGPVSPDYKKWGPIQRSIFKDKLFPESDDQTALIYLLYKHKELYYPKIYLEAEYYLQGYWIGVFGDFANVTERYLEMEREDDTLRRRHAEKVSERYGAFREERFLKGEFGGRGSRRRAFITHFTGCQPCSGDHNPSYDGDTCWNEMIRALNFADNQVMRVYGYVHSDLSKTSPLQPLPFDYPNEAW

SEQ ID NO: 79367 - protein, 406 aa, Arabidopsis thaliana
  peptide (1)..(406): Ceres Seq. ID no. 12650992
  misc_feature (78)..(356): Pfam Name: galactosyl transferase GMA12/MNN10 family Pfam Description: galactosyl transferase GMA12/MNN10 family
  misc_feature (1)..(406): Homolog of NCBI NO: 22329223 NR Description: similar to alpha galactosyltransferase protein; id: At4g37690.1 [Arabidopsis thaliana] >gi|7485771|pir||T04726
  misc_feature (1)..(406): Homolog of NCBI NO: 18400116 NR Description: Expressed protein; protein id: At2g22900.1, by cDNA: gi_14334701, supported by cDNA: gi_16323413 [Arabidopsis >gi|25349319|pir||C84618 hypothetical protein At2g22900
  misc_feature (1)..(402): Homolog of NCBI NO: 25486551 NR Description: alpha galactosyltransferase (EC 2.4.1.-)
  misc_feature (37)..(294): Homolog of NCBI NO: 15240848 NR Description: alpha galactosyltransferase protein; protein id: [Arabidopsis thaliana] >gi|9716848|emb|CAC01676.1| putative golgi [Arabidopsis thaliana] >gi|9759594|dbj|BAB11451.1| alpha
  misc_feature (322)..(388): Homolog of NCBI NO: 15240848 NR Description: alpha galactosyltransferase protein; protein id: [Arabidopsis thaliana] >gi|9716848|emb|CAC01676.1| putative golgi [Arabidopsis thaliana] >gi|9759594|dbj|BAB11451.1| alpha
  misc_feature (46)..(294): Homolog of NCBI NO: 18411962 NR Description: putative glycosyltransferase; protein id: supported by cDNA: gi_16209668 [Arabidopsis thaliana]
  misc_feature (46)..(294): Homolog of NCBI NO: 25349323 NR Description: probable glycosyltransferase [imported] - thaliana >gi|3892054|gb|AAC78266.1|AAC78266 putative [Arabidopsis thaliana] >gi|7269010|emb|CAB80743.1| putative
  misc_feature (320)..(389): Homolog of NCBI NO: 18411962 NR Description: putative glycosyltransferase; protein id: supported by cDNA: gi_16209668 [Arabidopsis thaliana]
  misc_feature (320)..(389): Homolog of NCBI NO: 25349323 NR Description: probable glycosyltransferase [imported] - thaliana >gi|3892054|gb|AAC78266.1|AAC78266 putative [Arabidopsis thaliana] >gi|7269010|emb|CAB80743.1| putative
  misc_feature (45)..(286): Homolog of NCBI NO: 15228843 NR Description: alpha galactosyltransferase-like protein; protein At3g62720.1, supported by cDNA: gi_15983425 [Arabidopsis
MSLTLVWSYFSIFSPSFTSLRHDGKPVQCSGLDMQFDPSEPGFYDDPDLSYSIEKPITKWDEKRNQWFESHPSFKPGSENRIVMVTGSQSSPCKNPIGDHLLLRCFKNKVDYARIHGHDIFYSNSLLHPKMNSYWAKLPVVKAAMLAHPEAEWIWWVDSDAIFTDMEFKPPLHRYRQHNLVVHGWPNIIYEKQSWTALNAGVFLIRNCQWSMDLIDTWKSMGPVSPDYKKWGPIQRSIFKDKLFPESDDQTALIYLLYKHKELYYPKIYLEAEYYLQGYWIGVFGDFANVTERYLEMEREDDTLRRRHAEKVSERYGAFREERFLKGEFGGRGSRRRAFITHFTGCQPCSGDHNPSYDGDTCWNEMIRALNFADNQVMRVYGYVHSDLSKTSPLQPLPFDYPNEAW

SEQ ID NO: 79368 - protein, 373 aa, Arabidopsis thaliana
  peptide (1)..(373): Ceres Seq. ID no. 12650993
  misc_feature (45)..(323): Pfam Name: galactosyl transferase GMA12/MNN10 family Pfam Description: galactosyl transferase GMA12/MNN10 family
  misc_feature (1)..(373): Homolog of NCBI NO: 22329223 NR Description: similar to alpha galactosyltransferase protein; id: At4g37690.1 [Arabidopsis thaliana] >gi|7485771|pir||T04726
  misc_feature (1)..(373): Homolog of NCBI NO: 18400116 NR Description: Expressed protein; protein id: At2g22900.1, by cDNA: gi_14334701, supported by cDNA: gi_16323413 [Arabidopsis >gi|25349319|pir||C84618 hypothetical protein At2g22900
  misc_feature (1)..(369): Homolog of NCBI NO: 25486551 NR Description: alpha galactosyltransferase (EC 2.4.1.-)
  misc_feature (4)..(261): Homolog of NCBI NO: 15240848 NR Description: alpha galactosyltransferase protein; protein id: [Arabidopsis thaliana] >gi|9716848|emb|CAC01676.1| putative golgi [Arabidopsis thaliana] >gi|9759594|dbj|BAB11451.1| alpha
  misc_feature (289)..(355): Homolog of NCBI NO: 15240848 NR Description: alpha galactosyltransferase protein; protein id: [Arabidopsis thaliana] >gi|9716848|emb|CAC01676.1| putative golgi [Arabidopsis thaliana] >gi|9759594|dbj|BAB11451.1| alpha
  misc_feature (13)..(261): Homolog of NCBI NO: 18411962 NR Description: putative glycosyltransferase; protein id: supported by cDNA: gi_16209668 [Arabidopsis thaliana]
  misc_feature (13)..(261): Homolog of NCBI NO: 25349323 NR Description: probable glycosyltransferase [imported] - thaliana >gi|3892054|gb|AAC78266.1|AAC78266 putative [Arabidopsis thaliana] >gi|7269010|emb|CAB80743.1| putative
  misc_feature (287)..(356): Homolog of NCBI NO: 18411962 NR Description: putative glycosyltransferase; protein id: supported by cDNA: gi_16209668 [Arabidopsis thaliana]
  misc_feature (287)..(356): Homolog of NCBI NO: 25349323 NR Description: probable glycosyltransferase [imported] - thaliana >gi|3892054|gb|AAC78266.1|AAC78266 putative [Arabidopsis thaliana] >gi|7269010|emb|CAB80743.1| putative
  misc_feature (12)..(253): Homolog of NCBI NO: 15228843 NR Description: alpha galactosyltransferase-like protein; protein At3g62720.1, supported by cDNA: gi_15983425 [Arabidopsis
MQFDPSEPGFYDDPDLSYSIEKPITKWDEKRNQWFESHPSFKPGSENRIVMVTGSQSSPCKNPIGDHLLLRCFKNKVDYARIHGHDIFYSNSLLHPKMNSYWAKLPVVKAAMLAHPEAEWIWWVDSDAIFTDMEFKPPLHRYRQHNLVVHGWPNIIYEKQSWTALNAGVFLIRNCQWSMDLIDTWKSMGPVSPDYKKWGPIQRSIFKDKLFPESDDQTALIYLLYKHKELYYPKIYLEAEYYLQGYWIGVFGDFANVTERYLEMEREDDTLRRRHAEKVSERYGAFREERFLKGEFGGRGSRRRAFITHFTGCQPCSGDHNPSYDGDTCWNEMIRALNFADNQVMRVYGYVHSDLSKTSPLQPLPFDYPNEAW

SEQ ID NO: 79369 - DNA, 1761 bp, Arabidopsis thaliana
  misc_feature (1)..(1761): Ceres Seq. ID no. 12651001
  misc_feature: MA Experiment ID: 20000169 Result: Down-regulated in Transcription
  misc_feature: MA Experiment 20000169 PARAMETER Experiment Name: At_100uM_ABA_P Parameter: Age (day) Value: 14
  misc_feature: MA Experiment 20000169 PARAMETER Experiment Name: At_100uM_ABA_P Parameter: Organism Value: A. thaliana
  misc_feature: MA Experiment 20000169 PARAMETER Experiment Name: At_100uM_ABA_P Parameter: Plant Line Value: WS
  misc_feature: MA Experiment 20000169 PARAMETER Experiment Name: At_100uM_ABA_P Parameter: Timepoint (hr) Value: 6
  misc_feature: MA Experiment 20000169 PARAMETER Experiment Name: At_100uM_ABA_P Parameter: Tissue Value: Aerial
  misc_feature: MA Experiment 20000169 PARAMETER Experiment Name: At_100uM_ABA_P Parameter: Treatment Value: 100uM ABA vs. No Treatment
  misc_feature: MA Experiment ID: 20000171 Result: Down-regulated in Transcription
  misc_feature: MA Experiment 20000171 PARAMETER Experiment Name: At_42deg_Heat_P Parameter: Age (day) Value: 14
  misc_feature: MA Experiment 20000171 PARAMETER Experiment Name: At_42deg_Heat_P Parameter: Organism Value: A. thaliana
  misc_feature: MA Experiment 20000171 PARAMETER Experiment Name: At_42deg_Heat_P Parameter: Plant Line Value: WS
  misc_feature: MA Experiment 20000171 PARAMETER Experiment Name: At_42deg_Heat_P Parameter: Temperature (deg C) Value: 42 vs. 22
  misc_feature: MA Experiment 20000171 PARAMETER Experiment Name: At_42deg_Heat_P Parameter: Timepoint (hr) Value: 1
  misc_feature: MA Experiment 20000171 PARAMETER Experiment Name: At_42deg_Heat_P Parameter: Tissue Value: Aerial
  misc_feature: MA Experiment ID: 20000173 Result: Down-regulated in Transcription
  misc_feature: MA Experiment 20000173 PARAMETER Experiment Name: At_42deg_Heat_P Parameter: Age (day) Value: 14
  misc_feature: MA Experiment 20000173 PARAMETER Experiment Name: At_42deg_Heat_P Parameter: Organism Value: A. thaliana
  misc_feature: MA Experiment 20000173 PARAMETER Experiment Name: At_42deg_Heat_P Parameter: Plant Line Value: WS
  misc_feature: MA Experiment 20000173 PARAMETER Experiment Name: At_42deg_Heat_P Parameter: Temperature (deg C) Value: 42 vs. 22
  misc_feature: MA Experiment 20000173 PARAMETER Experiment Name: At_42deg_Heat_P Parameter: Timepoint (hr) Value: 6
  misc_feature: MA Experiment 20000173 PARAMETER Experiment Name: At_42deg_Heat_P Parameter: Tissue Value: Aerial
  misc_feature: MA Experiment ID: 20000182 Result: Up-regulated in Transcription
  misc_feature: MA Experiment 20000182 PARAMETER Experiment Name: At_2mM_SA_P Parameter: Age (day) Value: 14
  misc_feature: MA Experiment 20000182 PARAMETER Experiment Name: At_2mM_SA_P Parameter: Organism Value: A. thaliana
  misc_feature: MA Experiment 20000182 PARAMETER Experiment Name: At_2mM_SA_P Parameter: Plant Line Value: WS
  misc_feature: MA Experiment 20000182 PARAMETER Experiment Name: At_2mM_SA_P Parameter: Timepoint (hr) Value: 6
  misc_feature: MA Experiment 20000182 PARAMETER Experiment Name: At_2mM_SA_P Parameter: Tissue Value: Aerial
  misc_feature: MA Experiment 20000182 PARAMETER Experiment Name: At_2mM_SA_P Parameter: Treatment Value: 2mM SA vs. No Treatment
  misc_feature: MA Experiment ID: 20000184 Result: Down-regulated in Transcription
  misc_feature: MA Experiment 20000184 PARAMETER Experiment Name: At_Shoots__P Parameter: Age (day) Value: 7
  misc_feature: MA Experiment 20000184 PARAMETER Experiment Name: At_Shoots__P Parameter: Tissue Value: Shoots vs. Whole Plant
  misc_feature: MA Experiment ID: 20000185 Result: Down-regulated in Transcription
  misc_feature: MA Experiment 20000185 PARAMETER Experiment Name: At_Roots__P Parameter: Age (day) Value: 7 vs. 21
  misc_feature: MA Experiment 20000185 PARAMETER Experiment Name: At_Roots__P Parameter: Organism Value: A. thaliana
  misc_feature: MA Experiment 20000185 PARAMETER Experiment Name: At_Roots__P Parameter: Tissue Value: Roots vs. Whole Plant
  misc_feature: MA Experiment ID: 20000213 Result: Up-regulated in Transcription
  misc_feature: MA Experiment 20000213 PARAMETER Experiment Name: At_4deg_Cold_P Parameter: Timepoint (hr) Value: 2
  misc_feature: MA Experiment ID: 20000234 Result: Down-regulated in Transcription
  misc_feature: MA Experiment 20000234 PARAMETER Experiment Name: At_Siliques_P Parameter: Age (day) Value: 21
  misc_feature: MA Experiment 20000234 PARAMETER Experiment Name: At_Siliques_P Parameter: Organism Value: A. thaliana
  misc_feature: MA Experiment 20000234 PARAMETER Experiment Name: At_Siliques_P Parameter: Plant Line Value: WS
  misc_feature: MA Experiment 20000234 PARAMETER Experiment Name: At_Siliques_P Parameter: Tissue Value: Less Than 5mm Siliques vs. Whole Plant
  misc_feature: MA Experiment ID: 20000235 Result: Down-regulated in Transcription
  misc_feature: MA Experiment 20000235 PARAMETER Experiment Name: At_Siliques_P Parameter: Age (day) Value: 21
  misc_feature: MA Experiment 20000235 PARAMETER Experiment Name: At_Siliques_P Parameter: Organism Value: A. thaliana
  misc_feature: MA Experiment 20000235 PARAMETER Experiment Name: At_Siliques_P Parameter: Plant Line Value: WS
  misc_feature: MA Experiment 20000235 PARAMETER Experiment Name: At_Siliques_P Parameter: Tissue Value: 5-10mm Siliques vs. Whole Plant
  misc_feature: MA Experiment ID: 20000264 Result: Down-regulated in Transcription
  misc_feature: MA Experiment 20000264 PARAMETER Experiment Name: At_Open_Flower_P Parameter: Age (day) Value: 21
  misc_feature: MA Experiment 20000264 PARAMETER Experiment Name: At_Open_Flower_P Parameter: Plant Line Value: WS
  misc_feature: MA Experiment 20000264 PARAMETER Experiment Name: At_Open_Flower_P Parameter: Tissue Value: Open Flower vs. Whole Plant
  misc_feature: MA Experiment ID: 20000265 Result: Down-regulated in Transcription
  misc_feature: MA Experiment 20000265 PARAMETER Experiment Name: At_Open_Flower_P Parameter: Age (day) Value: 21
  misc_feature: MA Experiment 20000265 PARAMETER Experiment Name: At_Open_Flower_P Parameter: Plant Line Value: WS
  misc_feature: MA Experiment 20000265 PARAMETER Experiment Name: At_Open_Flower_P Parameter: Tissue Value: Closed Flower vs. Whole Plant
  misc_feature: MA Experiment ID: 20000286 Result: Down-regulated in Transcription
  misc_feature: MA Experiment 20000286 PARAMETER Experiment Name: At_Open_Flower_P Parameter: Age (day) Value: 21
  misc_feature: MA Experiment 20000286 PARAMETER Experiment Name: At_Open_Flower_P Parameter: Plant Line Value: WS
  misc_feature: MA Experiment 20000286 PARAMETER Experiment Name: At_Open_Flower_P Parameter: Tissue Value: Half Open vs. Whole Plant
  misc_feature: MA Experiment ID: 20000438 Result: Down-regulated in Transcription
  misc_feature: MA Experiment 20000438 PARAMETER Experiment Name: At_Shoots__P Parameter: Age (day) Value: 14
  misc_feature: MA Experiment 20000438 PARAMETER Experiment Name: At_Shoots__P Parameter: Tissue Value: Shoots vs. Whole Plant
  misc_feature: MA Experiment ID: 20000439 Result: Down-regulated in Transcription
  misc_feature: MA Experiment 20000439 PARAMETER Experiment Name: At_Roots__P Parameter: Age (day) Value: 14 vs. 21
  misc_feature: MA Experiment 20000439 PARAMETER Experiment Name: At_Roots__P Parameter: Organism Value: A. thaliana
  misc_feature: MA Experiment 20000439 PARAMETER Experiment Name: At_Roots__P Parameter: Tissue Value: Roots vs. Whole Plant
  misc_feature: MA Experiment ID: 20000445 Result: Up-regulated in Transcription
  misc_feature: MA Experiment 20000445 PARAMETER Experiment Name: At_100uM_NAA__P Parameter: Age (day) Value: 14
  misc_feature: MA Experiment 20000445 PARAMETER Experiment Name: At_100uM_NAA__P Parameter: Organism Value: A. thaliana
  misc_feature: MA Experiment 20000445 PARAMETER Experiment Name: At_100uM_NAA__P Parameter: Plant Line Value: WS
  misc_feature: MA Experiment 20000445 PARAMETER Experiment Name: At_100uM_NAA__P Parameter: Timepoint (hr) Value: 6
  misc_feature: MA Experiment 20000445 PARAMETER Experiment Name: At_100uM_NAA__P Parameter: Tissue Value: Aerial
  misc_feature: MA Experiment 20000445 PARAMETER Experiment Name: At_100uM_NAA__P Parameter: Treatment Value: 100uM NAA vs. No Treatment
  misc_feature: MA Experiment ID: 20000495 Result: Down-regulated in Transcription
  misc_feature: MA Experiment 20000495 PARAMETER Experiment Name: At_Guard_Cells_P Parameter: Harvest Date Value: 8/2/2002
  misc_feature: MA Experiment 20000495 PARAMETER Experiment Name: At_Guard_Cells_P Parameter: Organism Value: A. thaliana
  misc_feature: MA Experiment 20000495 PARAMETER Experiment Name: At_Guard_Cells_P Parameter: Tissue Value: Guard Cells vs. Leaves
  misc_feature: MA Experiment ID: 20000527 Result: Down-regulated in Transcription
  misc_feature: MA Experiment 20000527 PARAMETER Experiment Name: At_10percent_PEG_P Parameter: Age (day) Value: 20
  misc_feature: MA Experiment 20000527 PARAMETER Experiment Name: At_10percent_PEG_P Parameter: Organism Value: A. thaliana
  misc_feature: MA Experiment 20000527 PARAMETER Experiment Name: At_10percent_PEG_P Parameter: Plant Line Value: WS
  misc_feature: MA Experiment 20000527 PARAMETER Experiment Name: At_10percent_PEG_P Parameter: Timepoint (day) Value: 20
  misc_feature: MA Experiment 20000527 PARAMETER Experiment Name: At_10percent_PEG_P Parameter: Tissue Value: Whole Plant
  misc_feature: MA Experiment 20000527 PARAMETER Experiment Name: At_10percent_PEG_P Parameter: Treatment Value: 10percent PEG vs. No Treatment
  misc_feature: MA Experiment ID: 20000709 Result: Down-regulated in Transcription
  misc_feature: MA Experiment 20000709 PARAMETER Experiment Name: At_15mM_NH4NO3_L-to-H_P Parameter: Age (hr) Value: 14
  misc_feature: MA Experiment 20000709 PARAMETER Experiment Name: At_15mM_NH4NO3_L-to-H_P Parameter: Organism Value: A. thaliana
  misc_feature: MA Experiment 20000709 PARAMETER Experiment Name: At_15mM_NH4NO3_L-to-H_P Parameter: Plant Line Value: WS
  misc_feature: MA Experiment 20000709 PARAMETER Experiment Name: At_15mM_NH4NO3_L-to-H_P Parameter: Timepoint (hr) Value: 4
  misc_feature: MA Experiment 20000709 PARAMETER Experiment Name: At_15mM_NH4NO3_L-to-H_P Parameter: Tissue Value: Aerial
  misc_feature: MA Experiment 20000709 PARAMETER Experiment Name: At_15mM_NH4NO3_L-to-H_P Parameter: Treatment Value: 15mM NH4NO3 vs. 30mM Mannitol
  misc_feature: MA Experiment ID: 20000794 Result: Down-regulated in Transcription
  misc_feature: MA Experiment 20000794 PARAMETER Experiment Name: At_Petals_P Parameter: Age (day) Value: 23-25 days
  misc_feature: MA Experiment 20000794 PARAMETER Experiment Name: At_Petals_P Parameter: Plant Line Value: WS
  misc_feature: MA Experiment 20000794 PARAMETER Experiment Name: At_Petals_P Parameter: Tissue Value: Petals vs. Whole plant
  misc_feature: MA Experiment ID: 20001450 Result: Down-regulated in Transcription
  misc_feature: MA Experiment 20001450 PARAMETER Experiment Name: At_Far-red-induction_P Parameter: Age (day) Value: 7
  misc_feature: MA Experiment 20001450 PARAMETER Experiment Name: At_Far-red-induction_P Parameter: Light Value: Far-red vs. White
  misc_feature: MA Experiment 20001450 PARAMETER Experiment Name: At_Far-red-induction_P Parameter: Organism Value: A. thaliana
  misc_feature: MA Experiment 20001450 PARAMETER Experiment Name: At_Far-red-induction_P Parameter: Plant Line Value: Columbia
  misc_feature: MA Experiment 20001450 PARAMETER Experiment Name: At_Far-red-induction_P Parameter: Timepoint (hr) Value: 8
  misc_feature: MA Experiment 20001450 PARAMETER Experiment Name: At_Far-red-induction_P Parameter: Tissue Value: Whole Plant
  misc_feature: MA Experiment ID: 20001451 Result: Down-regulated in Transcription
  misc_feature: MA Experiment 20001451 PARAMETER Experiment Name: At_Far-red-induction_P Parameter: Age (day) Value: 7
  misc_feature: MA Experiment 20001451 PARAMETER Experiment Name: At_Far-red-induction_P Parameter: Light Value: Far-red vs. White
  misc_feature: MA Experiment 20001451 PARAMETER Experiment Name: At_Far-red-induction_P Parameter: Organism Value: A. thaliana
  misc_feature: MA Experiment 20001451 PARAMETER Experiment Name: At_Far-red-induction_P Parameter: Plant Line Value: Columbia
  misc_feature: MA Experiment 20001451 PARAMETER Experiment Name: At_Far-red-induction_P Parameter: Timepoint (hr) Value: 24
  misc_feature: MA Experiment 20001451 PARAMETER Experiment Name: At_Far-red-induction_P Parameter: Tissue Value: Whole Plant
  misc_feature: MA Experiment ID: 20001554 Result: Down-regulated in Transcription
  misc_feature: MA Experiment 20001554 PARAMETER Experiment Name: At_Drought_Soil_Dry_P Parameter: Age (day) Value: 21
  misc_feature: MA Experiment 20001554 PARAMETER Experiment Name: At_Drought_Soil_Dry_P Parameter: Organism Value: A. thaliana
  misc_feature: MA Experiment 20001554 PARAMETER Experiment Name: At_Drought_Soil_Dry_P Parameter: Plant Line Value: WS
  misc_feature: MA Experiment 20001554 PARAMETER Experiment Name: At_Drought_Soil_Dry_P Parameter: Post Timepoint (hr) Value: None
  misc_feature: MA Experiment 20001554 PARAMETER Experiment Name: At_Drought_Soil_Dry_P Parameter: Post-Treatment Value: None
  misc_feature: MA Experiment 20001554 PARAMETER Experiment Name: At_Drought_Soil_Dry_P Parameter: Timepoint (day) Value: 7
  misc_feature: MA Experiment 20001554 PARAMETER Experiment Name: At_Drought_Soil_Dry_P Parameter: Treatment Value: Drought vs. No Drought
  misc_feature: MA Experiment ID: 20001555 Result: Down-regulated in Transcription
  misc_feature: MA Experiment 20001555 PARAMETER Experiment Name: At_Drought_Soil_Dry_P Parameter: Age (day) Value: 24
  misc_feature: MA Experiment 20001555 PARAMETER Experiment Name: At_Drought_Soil_Dry_P Parameter: Organism Value: A. thaliana
  misc_feature: MA Experiment 20001555 PARAMETER Experiment Name: At_Drought_Soil_Dry_P Parameter: Plant Line Value: WS
  misc_feature: MA Experiment 20001555 PARAMETER Experiment Name: At_Drought_Soil_Dry_P Parameter: Post Timepoint (hr) Value: None
  misc_feature: MA Experiment 20001555 PARAMETER Experiment Name: At_Drought_Soil_Dry_P Parameter: Post-Treatment Value: None
  misc_feature: MA Experiment 20001555 PARAMETER Experiment Name: At_Drought_Soil_Dry_P Parameter: Timepoint (day) Value: 10
  misc_feature: MA Experiment 20001555 PARAMETER Experiment Name: At_Drought_Soil_Dry_P Parameter: Treatment Value: Drought vs. No Drought
  misc_feature: MA Experiment ID: 20001556 Result: Down-regulated in Transcription
  misc_feature: MA Experiment 20001556 PARAMETER Experiment Name: At_Drought_Soil_Dry_P Parameter: Age (day) Value: 26
  misc_feature: MA Experiment 20001556 PARAMETER Experiment Name: At_Drought_Soil_Dry_P Parameter: Organism Value: A. thaliana
  misc_feature: MA Experiment 20001556 PARAMETER Experiment Name: At_Drought_Soil_Dry_P Parameter: Plant Line Value: WS
  misc_feature: MA Experiment 20001556 PARAMETER Experiment Name: At_Drought_Soil_Dry_P Parameter: Post Timepoint (hr) Value: None
  misc_feature: MA Experiment 20001556 PARAMETER Experiment Name: At_Drought_Soil_Dry_P Parameter: Post-Treatment Value: None
  misc_feature: MA Experiment 20001556 PARAMETER Experiment Name: At_Drought_Soil_Dry_P Parameter: Timepoint (day) Value: 12
  misc_feature: MA Experiment 20001556 PARAMETER Experiment Name: At_Drought_Soil_Dry_P Parameter: Treatment Value: Drought vs. No Drought
  misc_feature: MA Experiment ID: 20001557 Result: Down-regulated in Transcription
  misc_feature: MA Experiment 20001557 PARAMETER Experiment Name: At_Drought_Soil_Dry_P Parameter: Age (day) Value: 27
  misc_feature: MA Experiment 20001557 PARAMETER Experiment Name: At_Drought_Soil_Dry_P Parameter: Organism Value: A. thaliana
  misc_feature: MA Experiment 20001557 PARAMETER Experiment Name: At_Drought_Soil_Dry_P Parameter: Plant Line Value: WS
  misc_feature: MA Experiment 20001557 PARAMETER Experiment Name: At_Drought_Soil_Dry_P Parameter: Post Timepoint (hr) Value: 3
  misc_feature: MA Experiment 20001557 PARAMETER Experiment Name: At_Drought_Soil_Dry_P Parameter: Post-Treatment Value: Re-Water vs. No Drought
  misc_feature: MA Experiment 20001557 PARAMETER Experiment Name: At_Drought_Soil_Dry_P Parameter: Timepoint (day) Value: 13
  misc_feature: MA Experiment 20001557 PARAMETER Experiment Name: At_Drought_Soil_Dry_P Parameter: Treatment Value: Drought vs. No Drought
  misc_feature: MA Experiment ID: 20001558 Result: Down-regulated in Transcription
  misc_feature: MA Experiment 20001558 PARAMETER Experiment Name: At_Drought_Soil_Dry_P Parameter: Age (day) Value: 27
  misc_feature: MA Experiment 20001558 PARAMETER Experiment Name: At_Drought_Soil_Dry_P Parameter: Organism Value: A. thaliana
  misc_feature: MA Experiment 20001558 PARAMETER Experiment Name: At_Drought_Soil_Dry_P Parameter: Plant Line Value: WS
  misc_feature: MA Experiment 20001558 PARAMETER Experiment Name: At_Drought_Soil_Dry_P Parameter: Post Timepoint (hr) Value: 6
  misc_feature: MA Experiment 20001558 PARAMETER Experiment Name: At_Drought_Soil_Dry_P Parameter: Post-Treatment Value: Re-Water vs. No Drought
  misc_feature: MA Experiment 20001558 PARAMETER Experiment Name: At_Drought_Soil_Dry_P Parameter: Timepoint (day) Value: 13
  misc_feature: MA Experiment 20001558 PARAMETER Experiment Name: At_Drought_Soil_Dry_P Parameter: Treatment Value: Drought vs. No Drought
  misc_feature: MA Experiment ID: 20001559 Result: Down-regulated in Transcription
  misc_feature: MA Experiment 20001559 PARAMETER Experiment Name: At_Drought_Soil_Dry_P Parameter: Age (day) Value: 28
  misc_feature: MA Experiment 20001559 PARAMETER Experiment Name: At_Drought_Soil_Dry_P Parameter: Organism Value: A. thaliana
  misc_feature: MA Experiment 20001559 PARAMETER Experiment Name: At_Drought_Soil_Dry_P Parameter: Plant Line Value: WS
  misc_feature: MA Experiment 20001559 PARAMETER Experiment Name: At_Drought_Soil_Dry_P Parameter: Post Timepoint (hr) Value: 29
  misc_feature: MA Experiment 20001559 PARAMETER Experiment Name: At_Drought_Soil_Dry_P Parameter: Post-Treatment Value: Re-Water vs. No Drought
  misc_feature: MA Experiment 20001559 PARAMETER Experiment Name: At_Drought_Soil_Dry_P Parameter: Timepoint (day) Value: 14
  misc_feature: MA Experiment 20001559 PARAMETER Experiment Name: At_Drought_Soil_Dry_P Parameter: Treatment Value: Drought vs. No Drought
  misc_feature: MA Experiment ID: 20001560 Result: Down-regulated in Transcription
  misc_feature: MA Experiment 20001560 PARAMETER Experiment Name: At_Drought_Soil_Dry_P Parameter: Age (day) Value: 28
  misc_feature: MA Experiment 20001560 PARAMETER Experiment Name: At_Drought_Soil_Dry_P Parameter: Organism Value: A. thaliana
  misc_feature: MA Experiment 20001560 PARAMETER Experiment Name: At_Drought_Soil_Dry_P Parameter: Plant Line Value: WS
  misc_feature: MA Experiment 20001560 PARAMETER Experiment Name: At_Drought_Soil_Dry_P Parameter: Post Timepoint (hr) Value: None
  misc_feature: MA Experiment 20001560 PARAMETER Experiment Name: At_Drought_Soil_Dry_P Parameter: Post-Treatment Value: None
  misc_feature: MA Experiment 20001560 PARAMETER Experiment Name: At_Drought_Soil_Dry_P Parameter: Timepoint (day) Value: 14
  misc_feature: MA Experiment 20001560 PARAMETER Experiment Name: At_Drought_Soil_Dry_P Parameter: Treatment Value: Drought vs. No Drought
  misc_feature: MA Experiment ID: 20001904 Result: Down-regulated in Transcription
  misc_feature: MA Experiment 20001904 PARAMETER Experiment Name: At_Drought_Reproduction_P Parameter: Age (day) Value: 37
  misc_feature: MA Experiment 20001904 PARAMETER Experiment Name: At_Drought_Reproduction_P Parameter: Organism Value: A. thaliana
  misc_feature: MA Experiment 20001904 PARAMETER Experiment Name: At_Drought_Reproduction_P Parameter: Plant Line Value: WS
  misc_feature: MA Experiment 20001904 PARAMETER Experiment Name: At_Drought_Reproduction_P Parameter: Timepoint (day) Value: 7
  misc_feature: MA Experiment 20001904 PARAMETER Experiment Name: At_Drought_Reproduction_P Parameter: Tissue Value: Rosettes
  misc_feature: MA Experiment 20001904 PARAMETER Experiment Name: At_Drought_Reproduction_P Parameter: Treatment Value: Drought vs. No Drought
  misc_feature: MA Experiment ID: 20001905 Result: Down-regulated in Transcription
  misc_feature: MA Experiment 20001905 PARAMETER Experiment Name: At_Drought_Reproduction_P Parameter: Age (day) Value: 40
  misc_feature: MA Experiment 20001905 PARAMETER Experiment Name: At_Drought_Reproduction_P Parameter: Organism Value: A. thaliana
  misc_feature: MA Experiment 20001905 PARAMETER Experiment Name: At_Drought_Reproduction_P Parameter: Plant Line Value: WS
  misc_feature: MA Experiment 20001905 PARAMETER Experiment Name: At_Drought_Reproduction_P Parameter: Timepoint (day) Value: 10
  misc_feature: MA Experiment 20001905 PARAMETER Experiment Name: At_Drought_Reproduction_P Parameter: Tissue Value: Rosettes
  misc_feature: MA Experiment 20001905 PARAMETER Experiment Name: At_Drought_Reproduction_P Parameter: Treatment Value: Drought vs. No Drought
aacacttttcttgttgtgagagtaagagggaggttaaaatgagcataatgaggaatttcttgagtatgataattatgctttgcgtatgtctcaattggtgttttgctgaaggagctgagaaaagcgatagtggaaaggtacttgattcttacaccattcaagtcagctctctgttcccttcatcatcatcttgtgtcccttcttcaaaagcatctaataccaagtcgtcgctgcgcgtggtgcacatgcatggtgcgtgctcgcatcttagcagcgatgcgagagtcgaccatgacgaaatcatcagacgcgatcaagcacgtgtggagtccatctactcaaaattgtcaaagaatagcgcaaatgaagtcagcgaagccaagtcaacggagctaccggctaaaagtggaatcacactcggatcaggaaactacatcgtaacaatcggaatcgggacaccgaagcacgatctatcgctggtcttcgacaccggaagtgacctgacatggactcaatgtgagccatgtctaggaagttgctattcacaaaaggaaccaaaatttaacccttcttcgtcttctacttaccaaaacgtctcgtgctcatctccaatgtgtgaagacgctgagagttgttcggcttccaactgcgtatacagtatcgtttacggcgataagtcgtttacccaaggatttcttgcaaaggagaaatttaccctaacgaactctgatgttttggaggatgtttactttggttgcggtgaaaacaaccaaggacttttcgacggtgttgctgggcttctcggccttggccctggcaaactctcactaccggcgcaaacaacaacgacctacaacaatatcttctcctactgtctaccttctttcacaagtaacagtactggccatcttacctttggatccgctggaatctctgaatccgttaaattcacaccgatttcttccttcccaagcgcattcaattatggcatcgatatcataggtatcagtgtaggcgacaaggaattagcgattactccaaactcattctcgaccgaaggtgctataatcgactcaggcacagtgtttactcgcctccctaccaaagtctacgcggaactccgcagtgtttttaaggaaaagatgtcgagttacaagagtacgtcgggatacgggctttttgacacatgttacgatttcactggcttggatacggtgacatacccgacgattgcattctccttcgccggtagcactgtcgtagaacttgatggatcagggatttcgttgccgatcaagatatcacaggtttgtttggcgtttgcagggaatgatgaccttcccgccatctttggaaacgttcagcagacgacgctagatgttgtgtacgacgtggctggtggacgagtcggttttgctcccaatggttgttaattagctacttgaacaaaaagaagaggagagggttttgtaatttgagtaagggtttggctcgtaaatttagctcctatttatatatagtacgtgtgctaagtaaattgccccaaaaataattttgtgtgtgcgcggcaattgctttcttatatatatacgacatgtagatttgctttcttatatacttcaatcctgacttggaagtaagttttttagtaacgtcaaacatgcttcaacatttgcttaatgtacaagtccgatttaagctaccagaatcatctttttccttgagtgtaaccttttttactcgaaaaagcataaattcatt

SEQ ID NO: 79370 - protein, 476 aa, Arabidopsis thaliana
  peptide (1)..(476): Ceres Seq. ID no. 12651002
  misc_feature (100)..(474): Pfam Name: Eukaryotic aspartyl protease Pfam Description: Eukaryotic aspartyl protease
  misc_feature (13)..(476): Homolog of NCBI NO: 15238250 NR Description: nucleoid DNA-binding protein cnd41 - like protein id: At5g10760.1, supported by cDNA: gi_18176135
  misc_feature (13)..(476): Homolog of NCBI NO: 24417232 NR Description: unknown [Arabidopsis thaliana]
  misc_feature (13)..(476): Homolog of NCBI NO: 22326716 NR Description: nucleoid DNA-binding protein cnd41 - like protein id: At5g10770.1, supported by cDNA: gi_18700102 thaliana] >gi|18700103|gb|AAL77663.1| AT5g10770/T30N20_40
  misc_feature (74)..(476): Homolog of NCBI NO: 11358588 NR Description: nucleoid DNA-binding protein cnd41-like protein -
  misc_feature (89)..(476): Homolog of NCBI NO: 7489168 NR Description: nucleoid DNA-binding protein cnd41, chloroplast - tobacco >gi|2541876|dbj|BAA22813.1| CND41, chloroplast nucleoid
  misc_feature (89)..(476): Homolog of NCBI NO: 24430421 NR Description: 41 kD chloroplast nucleoid DNA binding protein
  misc_feature (67)..(476): Homolog of NCBI NO: 15223368 NR Description: chloroplast nucleoid DNA binding protein, protein id: At1g01300.1, supported by cDNA: 7567. [Arabidopsis
  misc_feature (12)..(476): Homolog of NCBI NO: 18412482 NR Description: putative aspartyl protease; protein id: supported by cDNA: 7650., supported by cDNA: gi_19699358 thaliana] >gi|19699359|gb|AAL91289.1| At1g79720/F19K16_30
  misc_feature (12)..(476): Homolog of NCBI NO: 21595063 NR Description: putative aspartyl protease [Arabidopsis thaliana]
  misc_feature (67)..(476): Homolog of NCBI NO: 21594980 NR Description: chloroplast nucleoid DNA binding protein,
HFSCCESKREVKMSIMRNFLSMIIMLCVCLNWCFAEGAEKSDSGKVLDSYTIQVSSLFPSSSSCVPSSKASNTKSSLRVVHMHGACSHLSSDARVDHDEIIRRDQARVESIYSKLSKNSANEVSEAKSTELPAKSGITLGSGNYIVTIGIGTPKHDLSLVFDTGSDLTWTQCEPCLGSCYSQKEPKFNPSSSSTYQNVSCSSPMCEDAESCSASNCVYSIVYGDKSFTQGFLAKEKFTLTNSDVLEDVYFGCGENNQGLFDGVAGLLGLGPGKLSLPAQTTTTYNNIFSYCLPSFTSNSTGHLTFGSAGISESVKFTPISSFPSAFNYGIDIIGISVGDKELAITPNSFSTEGAIIDSGTVFTRLPTKVYAELRSVFKEKMSSYKSTSGYGLFDTCYDFTGLDTVTYPTIAFSFAGSTVVELDGSGISLPIKISQVCLAFAGNDDLPAIFGNVQQTTLDVVYDVAGGRVGFAPNGC

SEQ ID NO: 79371 - protein, 464 aa, Arabidopsis thaliana
  peptide (1)..(464): Ceres Seq. ID no. 12651003
  misc_feature (88)..(462): Pfam Name: Eukaryotic aspartyl protease Pfam Description: Eukaryotic aspartyl protease
  misc_feature (1)..(464): Homolog of NCBI NO: 15238250 NR Description: nucleoid DNA-binding protein cnd41 - like protein id: At5g10760.1, supported by cDNA: gi_18176135
  misc_feature (1)..(464): Homolog of NCBI NO: 24417232 NR Description: unknown [Arabidopsis thaliana]
  misc_feature (1)..(464): Homolog of NCBI NO: 22326716 NR Description: nucleoid DNA-binding protein cnd41 - like protein id: At5g10770.1, supported by cDNA: gi_18700102 thaliana] >gi|18700103|gb|AAL77663.1| AT5g10770/T30N20_40
  misc_feature (62)..(464): Homolog of NCBI NO: 11358588 NR Description: nucleoid DNA-binding protein cnd41-like protein -
  misc_feature (77)..(464): Homolog of NCBI NO: 7489168 NR Description: nucleoid DNA-binding protein cnd41, chloroplast - tobacco >gi|2541876|dbj|BAA22813.1| CND41, chloroplast nucleoid
  misc_feature (77)..(464): Homolog of NCBI NO: 24430421 NR Description: 41 kD chloroplast nucleoid DNA binding protein
  misc_feature (55)..(464): Homolog of NCBI NO: 15223368 NR Description: chloroplast nucleoid DNA binding protein, protein id: At1g01300.1, supported by cDNA: 7567. [Arabidopsis
  misc_feature (1)..(464): Homolog of NCBI NO: 18412482 NR Description: putative aspartyl protease; protein id: supported by cDNA: 7650., supported by cDNA: gi_19699358 thaliana] >gi|19699359|gb|AAL91289.1| At1g79720/F19K16_30
  misc_feature (1)..(464): Homolog of NCBI NO: 21595063 NR Description: putative aspartyl protease [Arabidopsis thaliana]
  misc_feature (55)..(464): Homolog of NCBI NO: 21594980 NR Description: chloroplast nucleoid DNA binding protein,
MSIMRNFLSMIIMLCVCLNWCFAEGAEKSDSGKVLDSYTIQVSSLFPSSSSCVPSSKASNTKSSLRVVHMHGACSHLSSDARVDHDEIIRRDQARVESIYSKLSKNSANEVSEAKSTELPAKSGITLGSGNYIVTIGIGTPKHDLSLVFDTGSDLTWTQCEPCLGSCYSQKEPKFNPSSSSTYQNVSCSSPMCEDAESCSASNCVYSIVYGDKSFTQGFLAKEKFTLTNSDVLEDVYFGCGENNQGLFDGVAGLLGLGPGKLSLPAQTTTTYNNIFSYCLPSFTSNSTGHLTFGSAGISESVKFTPISSFPSAFNYGIDIIGISVGDKELAITPNSFSTEGAIIDSGTVFTRLPTKVYAELRSVFKEKMSSYKSTSGYGLFDTCYDFTGLDTVTYPTIAFSFAGSTVVELDGSGISLPIKISQVCLAFAGNDDLPAIFGNVQQTTLDVVYDVAGGRVGFAPNGC

SEQ ID NO: 79372 - protein, 461 aa, Arabidopsis thaliana
  peptide (1)..(461): Ceres Seq. ID no. 12651004
  misc_feature (85)..(459): Pfam Name: Eukaryotic aspartyl protease Pfam Description: Eukaryotic aspartyl protease
  misc_feature (1)..(461): Homolog of NCBI NO: 15238250 NR Description: nucleoid DNA-binding protein cnd41 - like protein id: At5g10760.1, supported by cDNA: gi_18176135
  misc_feature (1)..(461): Homolog of NCBI NO: 24417232 NR Description: unknown [Arabidopsis thaliana]
  misc_feature (1)..(461): Homolog of NCBI NO: 22326716 NR Description: nucleoid DNA-binding protein cnd41 - like protein id: At5g10770.1, supported by cDNA: gi_18700102 thaliana] >gi|18700103|gb|AAL77663.1| AT5g10770/T30N20_40
  misc_feature (59)..(461): Homolog of NCBI NO: 11358588 NR Description: nucleoid DNA-binding protein cnd41-like protein -
  misc_feature (74)..(461): Homolog of NCBI NO: 7489168 NR Description: nucleoid DNA-binding protein cnd41, chloroplast - tobacco >gi|2541876|dbj|BAA22813.1| CND41, chloroplast nucleoid
  misc_feature (74)..(461): Homolog of NCBI NO: 24430421 NR Description: 41 kD chloroplast nucleoid DNA binding protein
  misc_feature (52)..(461): Homolog of NCBI NO: 15223368 NR Description: chloroplast nucleoid DNA binding protein, protein id: At1g01300.1, supported by cDNA: 7567. [Arabidopsis
  misc_feature (1)..(461): Homolog of NCBI NO: 18412482 NR Description: putative aspartyl protease; protein id: supported by cDNA: 7650., supported by cDNA: gi_19699358 thaliana] >gi|19699359|gb|AAL91289.1| At1g79720/F19K16_30
  misc_feature (1)..(461): Homolog of NCBI NO: 21595063 NR Description: putative aspartyl protease [Arabidopsis thaliana]
  misc_feature (52)..(461): Homolog of NCBI NO: 21594980 NR Description: chloroplast nucleoid DNA binding protein,
MRNFLSMIIMLCVCLNWCFAEGAEKSDSGKVLDSYTIQVSSLFPSSSSCVPSSKASNTKSSLRVVHMHGACSHLSSDARVDHDEIIRRDQARVESIYSKLSKNSANEVSEAKSTELPAKSGITLGSGNYIVTIGIGTPKHDLSLVFDTGSDLTWTQCEPCLGSCYSQKEPKFNPSSSSTYQNVSCSSPMCEDAESCSASNCVYSIVYGDKSFTQGFLAKEKFTLTNSDVLEDVYFGCGENNQGLFDGVAGLLGLGPGKLSLPAQTTTTYNNIFSYCLPSFTSNSTGHLTFGSAGISESVKFTPISSFPSAFNYGIDIIGISVGDKELAITPNSFSTEGAIIDSGTVFTRLPTKVYAELRSVFKEKMSSYKSTSGYGLFDTCYDFTGLDTVTYPTIAFSFAGSTVVELDGSGISLPIKISQVCLAFAGNDDLPAIFGNVQQTTLDVVYDVAGGRVGFAPNGC

SEQ ID NO: 79373 - DNA, 1011 bp, Arabidopsis thaliana
  misc_feature (1)..(1011): Ceres Seq. ID no. 12651056
  misc_feature: MA Experiment ID: 20000171 Result: Up-regulated in Transcription
  misc_feature: MA Experiment 20000171 PARAMETER Experiment Name: At_42deg_Heat_P Parameter: Age (day) Value: 14
  misc_feature: MA Experiment 20000171 PARAMETER Experiment Name: At_42deg_Heat_P Parameter: Organism Value: A. thaliana
  misc_feature: MA Experiment 20000171 PARAMETER Experiment Name: At_42deg_Heat_P Parameter: Plant Line Value: WS
  misc_feature: MA Experiment 20000171 PARAMETER Experiment Name: At_42deg_Heat_P Parameter: Temperature (deg C) Value: 42 vs. 22
  misc_feature: MA Experiment 20000171 PARAMETER Experiment Name: At_42deg_Heat_P Parameter: Timepoint (hr) Value: 1
  misc_feature: MA Experiment 20000171 PARAMETER Experiment Name: At_42deg_Heat_P Parameter: Tissue Value: Aerial
  misc_feature: MA Experiment ID: 20000185 Result: Down-regulated in Transcription
  misc_feature: MA Experiment 20000185 PARAMETER Experiment Name: At_Roots__P Parameter: Age (day) Value: 7 vs. 21
  misc_feature: MA Experiment 20000185 PARAMETER Experiment Name: At_Roots__P Parameter: Organism Value: A. thaliana
  misc_feature: MA Experiment 20000185 PARAMETER Experiment Name: At_Roots__P Parameter: Tissue Value: Roots vs. Whole Plant
  misc_feature: MA Experiment ID: 20000438 Result: Down-regulated in Transcription
  misc_feature: MA Experiment 20000438 PARAMETER Experiment Name: At_Shoots__P Parameter: Age (day) Value: 14
  misc_feature: MA Experiment 20000438 PARAMETER Experiment Name: At_Shoots__P Parameter: Tissue Value: Shoots vs. Whole Plant
  misc_feature: MA Experiment ID: 20001247 Result: Down-regulated in Transcription
  misc_feature: MA Experiment 20001247 PARAMETER Experiment Name: At_Far-red-induction_P Parameter: Age (day) Value: 7
  misc_feature: MA Experiment 20001247 PARAMETER Experiment Name: At_Far-red-induction_P Parameter: Light Value: Far-red vs. White
  misc_feature: MA Experiment 20001247 PARAMETER Experiment Name: At_Far-red-induction_P Parameter: Organism Value: A. thaliana
  misc_feature: MA Experiment 20001247 PARAMETER Experiment Name: At_Far-red-induction_P Parameter: Plant Line Value: Columbia
  misc_feature: MA Experiment 20001247 PARAMETER Experiment Name: At_Far-red-induction_P Parameter: Timepoint (hr) Value: 1
  misc_feature: MA Experiment 20001247 PARAMETER Experiment Name: At_Far-red-induction_P Parameter: Tissue Value: Whole Plant
atggagaagagattcaagatatggacatatagagaaggagaagctcctctgtttcacaagggtccactcaacaacatttacgccattgaaggccaattcatggacgagatcgagaacggaaacagccgttttaaggcggcttcaccggaggaagccactgtgttctacatccccgtagggattgtcaatatcatacgctttgtctatagaccttacactagctatgcacgtgaccgtctccaaaacattgttaaagactacatctctctcatctctaaccgttacccttactggaatcgcagtcgcggtgctgatcacttcttcctctcctgtcacgattgggcacctgatgtctcagctgtggatccagaattatacaagcattttataagagctctctgcaatgccaattcctccgaaggattcaccccaatgagagacgtttcattaccggaaatcaacattccacacagccaattagggtttgtacacaccggagaaccgcctcaaaaccgcaaactcttagcattcttcgcgggcggttctcacggagatgtccgaaaaatacttttccaacactggaaagaaaaagacaaagacgtccttgtctacgagaatctccccaaaaccatgaactacacgaaaatgatggacaaggcaaagttttgtttatgtcctagcggttgggaagtggcgagtccgagaattgtcgagtcactttactccggctgtgttccggtcatcatagctgattattacgtcctcccgttcagcgacgtgttgaattggaagacattctcggttcatattccaatatcaaagatgcctgacataaagaagattctagaagcaataacagaagaagagtacttgaatatgcaaagaagagtgcttgaggttcggaaacactttgtcataaacagaccatcaaagccatatgatatgttgcatatgatcatgcattctatttggttacggaggcttaatgttcgaatccctctttcacagtga

SEQ ID NO: 79374 - protein, 336 aa, Arabidopsis thaliana
  peptide (1)..(336): Ceres Seq. ID no. 12651057
  misc_feature (7)..(297): Pfam Name: Exostosin family Pfam Description: Exostosin family
  misc_feature (1)..(336): Homolog of NCBI NO: 15238967 NR Description: Exostosin family; protein id: At5g11130.1 thaliana] >gi|8953375|emb|CAB96648.1| putative protein
  misc_feature (1)..(333): Homolog of NCBI NO: 15241301 NR Description: Exostosin family; protein id: At5g20260.1
  misc_feature (4)..(332): Homolog of NCBI NO: 15242798 NR Description: Exostosin family; protein id: At5g33290.1
  misc_feature (1)..(332): Homolog of NCBI NO: 15146187 NR Description: AT5g33290/F19N2_10 [Arabidopsis thaliana]
  misc_feature (1)..(333): Homolog of NCBI NO: 30690502 NR Description: Exostosin family [Arabidopsis thaliana]
  misc_feature (3)..(333): Homolog of NCBI NO: 11358246 NR Description: hypothetical protein T27B3.50 - Arabidopsis >gi|6735291|emb|CAB68119.1| putative protein [Arabidopsis
  misc_feature (1)..(332): Homolog of NCBI NO: 9758008 NR Description: contains similarity to limonene
  misc_feature (1)..(332): Homolog of NCBI NO: 15237526 NR Description: putative protein; protein id: At5g03800.1
  misc_feature (1)..(332): Homolog of NCBI NO: 34394611 NR Description: putative pectin-glucuronyltransferase [Oryza
  misc_feature (1)..(332): Homolog of NCBI NO: 15231488 NR Description: Exostosin family; protein id: At3g07620.1 thaliana] >gi|6466945|gb|AAF13080.1|AC009176_7 hypothetical
MEKRFKIWTYREGEAPLFHKGPLNNIYAIEGQFMDEIENGNSRFKAASPEEATVFYIPVGIVNIIRFVYRPYTSYARDRLQNIVKDYISLISNRYPYWNRSRGADHFFLSCHDWAPDVSAVDPELYKHFIRALCNANSSEGFTPMRDVSLPEINIPHSQLGFVHTGEPPQNRKLLAFFAGGSHGDVRKILFQHWKEKDKDVLVYENLPKTMNYTKMMDKAKFCLCPSGWEVASPRIVESLYSGCVPVIIADYYVLPFSDVLNWKTFSVHIPISKMPDIKKILEAITEEEYLNMQRRVLEVRKHFVINRPSKPYDMLHMIMHSIWLRRLNVRIPLSQ

SEQ ID NO: 79375 - protein, 303 aa, Arabidopsis thaliana
  peptide (1)..(303): Ceres Seq. ID no. 12651058
  misc_feature (1)..(264): Pfam Name: Exostosin family Pfam Description: Exostosin family
  misc_feature (1)..(303): Homolog of NCBI NO: 15238967 NR Description: Exostosin family; protein id: At5g11130.1 thaliana] >gi|8953375|emb|CAB96648.1| putative protein
  misc_feature (1)..(300): Homolog of NCBI NO: 15241301 NR Description: Exostosin family; protein id: At5g20260.1
  misc_feature (1)..(299): Homolog of NCBI NO: 15242798 NR Description: Exostosin family; protein id: At5g33290.1
  misc_feature (1)..(299): Homolog of NCBI NO: 15146187 NR Description: AT5g33290/F19N2_10 [Arabidopsis thaliana]
  misc_feature (1)..(300): Homolog of NCBI NO: 30690502 NR Description: Exostosin family [Arabidopsis thaliana]
  misc_feature (1)..(300): Homolog of NCBI NO: 11358246 NR Description: hypothetical protein T27B3.50 - Arabidopsis >gi|6735291|emb|CAB68119.1| putative protein [Arabidopsis
  misc_feature (1)..(299): Homolog of NCBI NO: 9758008 NR Description: contains similarity to limonene
  misc_feature (1)..(299): Homolog of NCBI NO: 15237526 NR Description: putative protein; protein id: At5g03800.1
  misc_feature (1)..(299): Homolog of NCBI NO: 34394611 NR Description: putative pectin-glucuronyltransferase [Oryza
  misc_feature (1)..(299): Homolog of NCBI NO: 15231488 NR Description: Exostosin family; protein id: At3g07620.1 thaliana] >gi|6466945|gb|AAF13080.1|AC009176_7 hypothetical
MDEIENGNSRFKAASPEEATVFYIPVGIVNIIRFVYRPYTSYARDRLQNIVKDYISLISNRYPYWNRSRGADHFFLSCHDWAPDVSAVDPELYKHFIRALCNANSSEGFTPMRDVSLPEINIPHSQLGFVHTGEPPQNRKLLAFFAGGSHGDVRKILFQHWKEKDKDVLVYENLPKTMNYTKMMDKAKFCLCPSGWEVASPRIVESLYSGCVPVIIADYYVLPFSDVLNWKTFSVHIPISKMPDIKKILEAITEEEYLNMQRRVLEVRKHFVINRPSKPYDMLHMIMHSIWLRRLNVRIPLSQ

SEQ ID NO: 79376 - protein, 192 aa, Arabidopsis thaliana
  peptide (1)..(192): Ceres Seq. ID no. 12651059
  misc_feature (1)..(153): Pfam Name: Exostosin family Pfam Description: Exostosin family
  misc_feature (1)..(192): Homolog of NCBI NO: 15238967 NR Description: Exostosin family; protein id: At5g11130.1 thaliana] >gi|8953375|emb|CAB96648.1| putative protein
  misc_feature (1)..(189): Homolog of NCBI NO: 15241301 NR Description: Exostosin family; protein id: At5g20260.1
  misc_feature (1)..(188): Homolog of NCBI NO: 15242798 NR Description: Exostosin family; protein id: At5g33290.1
  misc_feature (1)..(188): Homolog of NCBI NO: 15146187 NR Description: AT5g33290/F19N2_10 [Arabidopsis thaliana]
  misc_feature (1)..(189): Homolog of NCBI NO: 30690502 NR Description: Exostosin family [Arabidopsis thaliana]
  misc_feature (1)..(189): Homolog of NCBI NO: 11358246 NR Description: hypothetical protein T27B3.50 - Arabidopsis >gi|6735291|emb|CAB68119.1| putative protein [Arabidopsis
  misc_feature (1)..(188): Homolog of NCBI NO: 9758008 NR Description: contains similarity to limonene
  misc_feature (1)..(188): Homolog of NCBI NO: 15237526 NR Description: putative protein; protein id: At5g03800.1
  misc_feature (1)..(188): Homolog of NCBI NO: 34394611 NR Description: putative pectin-glucuronyltransferase [Oryza
  misc_feature (1)..(188): Homolog of NCBI NO: 15231488 NR Description: Exostosin family; protein id: At3g07620.1 thaliana] >gi|6466945|gb|AAF13080.1|AC009176_7 hypothetical
MRDVSLPEINIPHSQLGFVHTGEPPQNRKLLAFFAGGSHGDVRKILFQHWKEKDKDVLVYENLPKTMNYTKMMDKAKFCLCPSGWEVASPRIVESLYSGCVPVIIADYYVLPFSDVLNWKTFSVHIPISKMPDIKKILEAITEEEYLNMQRRVLEVRKHFVINRPSKPYDMLHMIMHSIWLRRLNVRIPLSQ

SEQ ID NO: 79377 - DNA, 570 bp, Arabidopsis thaliana
  misc_feature (1)..(570): Ceres Seq. ID no. 12651064
  misc_feature: MA Experiment ID: 20000438 Result: Up-regulated in Transcription
  misc_feature: MA Experiment 20000438 PARAMETER Experiment Name: At_Shoots__P Parameter: Age (day) Value: 14
  misc_feature: MA Experiment 20000438 PARAMETER Experiment Name: At_Shoots__P Parameter: Tissue Value: Shoots vs. Whole Plant
  misc_feature: MA Experiment ID: 20001450 Result: Down-regulated in Transcription
  misc_feature: MA Experiment 20001450 PARAMETER Experiment Name: At_Far-red-induction_P Parameter: Age (day) Value: 7
  misc_feature: MA Experiment 20001450 PARAMETER Experiment Name: At_Far-red-induction_P Parameter: Light Value: Far-red vs. White
  misc_feature: MA Experiment 20001450 PARAMETER Experiment Name: At_Far-red-induction_P Parameter: Organism Value: A. thaliana
  misc_feature: MA Experiment 20001450 PARAMETER Experiment Name: At_Far-red-induction_P Parameter: Plant Line Value: Columbia
  misc_feature: MA Experiment 20001450 PARAMETER Experiment Name: At_Far-red-induction_P Parameter: Timepoint (hr) Value: 8
  misc_feature: MA Experiment 20001450 PARAMETER Experiment Name: At_Far-red-induction_P Parameter: Tissue Value: Whole Plant
  misc_feature: MA Experiment ID: 20001451 Result: Down-regulated in Transcription
  misc_feature: MA Experiment 20001451 PARAMETER Experiment Name: At_Far-red-induction_P Parameter: Age (day) Value: 7
  misc_feature: MA Experiment 20001451 PARAMETER Experiment Name: At_Far-red-induction_P Parameter: Light Value: Far-red vs. White
  misc_feature: MA Experiment 20001451 PARAMETER Experiment Name: At_Far-red-induction_P Parameter: Organism Value: A. thaliana
  misc_feature: MA Experiment 20001451 PARAMETER Experiment Name: At_Far-red-induction_P Parameter: Plant Line Value: Columbia
  misc_feature: MA Experiment 20001451 PARAMETER Experiment Name: At_Far-red-induction_P Parameter: Timepoint (hr) Value: 24
  misc_feature: MA Experiment 20001451 PARAMETER Experiment Name: At_Far-red-induction_P Parameter: Tissue Value: Whole Plant
  misc_feature: MA Experiment ID: 20001555 Result: Down-regulated in Transcription
  misc_feature: MA Experiment 20001555 PARAMETER Experiment Name: At_Drought_Soil_Dry_P Parameter: Age (day) Value: 24
  misc_feature: MA Experiment 20001555 PARAMETER Experiment Name: At_Drought_Soil_Dry_P Parameter: Organism Value: A. thaliana
  misc_feature: MA Experiment 20001555 PARAMETER Experiment Name: At_Drought_Soil_Dry_P Parameter: Plant Line Value: WS
  misc_feature: MA Experiment 20001555 PARAMETER Experiment Name: At_Drought_Soil_Dry_P Parameter: Post Timepoint (hr) Value: None
  misc_feature: MA Experiment 20001555 PARAMETER Experiment Name: At_Drought_Soil_Dry_P Parameter: Post-Treatment Value: None
  misc_feature: MA Experiment 20001555 PARAMETER Experiment Name: At_Drought_Soil_Dry_P Parameter: Timepoint (day) Value: 10
  misc_feature: MA Experiment 20001555 PARAMETER Experiment Name: At_Drought_Soil_Dry_P Parameter: Treatment Value: Drought vs. No Drought
atggtacattcgaggaagttccgaggtgtccgccagcgacaatggggttcttgggtctctgagattcgccatcctctattgaagagaagagtgtggcttggaactttcgaaacggcagaagcggctgcaagagcatacgaccaagcggctcttctaatgaacggccaaaacgctaagaccaatttccctgtcgtaaaatcagaggaaggctccgatcacgttaaagatgttaactctccgttgatgtcaccaaagtcattatctgagcttttgaacgctaagctaaggaagagctgcaaagacctaacgccttctttgacgtgtctccgtcttgatactgacagttcccacattggagtttggcagaaacgggccgggtcgaaaacaagtccgacttgggtcatgcgcctcgaacttgggaacgtagtcaacgaaagtgcggttgacttagggttgactacgatgaacaaacaaaacgttgagaaagaagaagaagaagaagaagctattattagtgatgaggatcagttagctatggagatgatcgaggagttgctgaattggagttga

SEQ ID NO: 79378 - protein, 189 aa, Arabidopsis thaliana
  peptide (1)..(189): Ceres Seq. ID no. 12651065
  misc_feature (4)..(68): Pfam Name: AP2 domain Pfam Description: AP2 domain
  misc_feature (1)..(189): Homolog of NCBI NO: 15238976 NR Description: putative protein; protein id: At5g11190.1 thaliana] >gi|8953381|emb|CAB96654.1| putative protein
  misc_feature (1)..(189): Homolog of NCBI NO: 15239413 NR Description: AP2 domain containing protein; protein id:
  misc_feature (1)..(189): Homolog of NCBI NO: 30689846 NR Description: AP2 domain transcription factor, putative thaliana] >gi|26452577|dbj|BAC43373.1| putative AP2 domain protein [Arabidopsis thaliana] >gi|28973113|gb|AAO63881.1|
  misc_feature (1)..(187): Homolog of NCBI NO: 15218134 NR Description: putative ethylene responsive element; protein id:
  misc_feature (1)..(187): Homolog of NCBI NO: 21553845 NR Description: putative ethylene responsive element [Arabidopsis
  misc_feature (5)..(141): Homolog of NCBI NO: 15238727 NR Description: ethylene-responsive element - like protein; id: At5g25190.1, supported by cDNA: gi_15010715, supported by gi_16974344 [Arabidopsis thaliana] >gi|15010716|gb|AAK74017.1|
  misc_feature (5)..(188): Homolog of NCBI NO: 18650662 NR Description: ethylene response factor 1 [Lycopersicon
  misc_feature (6)..(99): Homolog of NCBI NO: 38343976 NR Description: OSJNBb0022F16.15 [Oryza sativa (japonica
  misc_feature (5)..(117): Homolog of NCBI NO: 15219139 NR Description: TINY-like protein; protein id: At1g21910.1, by cDNA: 19721. [Arabidopsis thaliana] >gi|25402947|pir||D86352
  misc_feature (5)..(117): Homolog of NCBI NO: 21554056 NR Description: TINY-like protein [Arabidopsis thaliana]
MVHSRKFRGVRQRQWGSWVSEIRHPLLKRRVWLGTFETAEAAARAYDQAALLMNGQNAKTNFPVVKSEEGSDHVKDVNSPLMSPKSLSELLNAKLRKSCKDLTPSLTCLRLDTDSSHIGVWQKRAGSKTSPTWVMRLELGNVVNESAVDLGLTTMNKQNVEKEEEEEEAIISDEDQLAMEMIEELLNWS

SEQ ID NO: 79379 - protein, 137 aa, Arabidopsis thaliana
  peptide (1)..(137): Ceres Seq. ID no. 12651066
  misc_feature (1)..(137): Homolog of NCBI NO: 15238976 NR Description: putative protein; protein id: At5g11190.1 thaliana] >gi|8953381|emb|CAB96654.1| putative protein
  misc_feature (1)..(137): Homolog of NCBI NO: 15239413 NR Description: AP2 domain containing protein; protein id:
  misc_feature (1)..(137): Homolog of NCBI NO: 30689846 NR Description: AP2 domain transcription factor, putative thaliana] >gi|26452577|dbj|BAC43373.1| putative AP2 domain protein [Arabidopsis thaliana] >gi|28973113|gb|AAO63881.1|
  misc_feature (1)..(135): Homolog of NCBI NO: 15218134 NR Description: putative ethylene responsive element; protein id:
  misc_feature (1)..(135): Homolog of NCBI NO: 21553845 NR Description: putative ethylene responsive element [Arabidopsis
  misc_feature (1)..(89): Homolog of NCBI NO: 15238727 NR Description: ethylene-responsive element - like protein; id: At5g25190.1, supported by cDNA: gi_15010715, supported by gi_16974344 [Arabidopsis thaliana] >gi|15010716|gb|AAK74017.1|
  misc_feature (1)..(136): Homolog of NCBI NO: 18650662 NR Description: ethylene response factor 1 [Lycopersicon
  misc_feature (1)..(47): Homolog of NCBI NO: 38343976 NR Description: OSJNBb0022F16.15 [Oryza sativa (japonica
  misc_feature (1)..(65): Homolog of NCBI NO: 15219139 NR Description: TINY-like protein; protein id: At1g21910.1, by cDNA: 19721. [Arabidopsis thaliana] >gi|25402947|pir||D86352
  misc_feature (1)..(65): Homolog of NCBI NO: 21554056 NR Description: TINY-like protein [Arabidopsis thaliana]
MNGQNAKTNFPVVKSEEGSDHVKDVNSPLMSPKSLSELLNAKLRKSCKDLTPSLTCLRLDTDSSHIGVWQKRAGSKTSPTWVMRLELGNVVNESAVDLGLTTMNKQNVEKEEEEEEAIISDEDQLAMEMIEELLNWS

SEQ ID NO: 79380 - protein, 108 aa, Arabidopsis thaliana
  peptide (1)..(108): Ceres Seq. ID no. 12651067
  misc_feature (1)..(108): Homolog of NCBI NO: 15238976 NR Description: putative protein; protein id: At5g11190.1 thaliana] >gi|8953381|emb|CAB96654.1| putative protein
  misc_feature (1)..(108): Homolog of NCBI NO: 15239413 NR Description: AP2 domain containing protein; protein id:
  misc_feature (1)..(108): Homolog of NCBI NO: 30689846 NR Description: AP2 domain transcription factor, putative thaliana] >gi|26452577|dbj|BAC43373.1| putative AP2 domain protein [Arabidopsis thaliana] >gi|28973113|gb|AAO63881.1|
  misc_feature (1)..(106): Homolog of NCBI NO: 15218134 NR Description: putative ethylene responsive element; protein id:
  misc_feature (1)..(106): Homolog of NCBI NO: 21553845 NR Description: putative ethylene responsive element [Arabidopsis
  misc_feature (1)..(60): Homolog of NCBI NO: 15238727 NR Description: ethylene-responsive element - like protein; id: At5g25190.1, supported by cDNA: gi_15010715, supported by gi_16974344 [Arabidopsis thaliana] >gi|15010716|gb|AAK74017.1|
  misc_feature (1)..(107): Homolog of NCBI NO: 18650662 NR Description: ethylene response factor 1 [Lycopersicon
  misc_feature (1)..(18): Homolog of NCBI NO: 38343976 NR Description: OSJNBb0022F16.15 [Oryza sativa (japonica
  misc_feature (1)..(36): Homolog of NCBI NO: 15219139 NR Description: TINY-like protein; protein id: At1g21910.1, by cDNA: 19721. [Arabidopsis thaliana] >gi|25402947|pir||D86352
  misc_feature (1)..(36): Homolog of NCBI NO: 21554056 NR Description: TINY-like protein [Arabidopsis thaliana]
MSPKSLSELLNAKLRKSCKDLTPSLTCLRLDTDSSHIGVWQKRAGSKTSPTWVMRLELGNVVNESAVDLGLTTMNKQNVEKEEEEEEAIISDEDQLAMEMIEELLNWS

SEQ ID NO: 79381 - DNA, 1056 bp, Arabidopsis thaliana
  misc_feature (1)..(1056): Ceres Seq. ID no. 12651072
  misc_feature: MA Experiment ID: 20000171 Result: Up-regulated in Transcription
  misc_feature: MA Experiment 20000171 PARAMETER Experiment Name: At_42deg_Heat_P Parameter: Age (day) Value: 14
  misc_feature: MA Experiment 20000171 PARAMETER Experiment Name: At_42deg_Heat_P Parameter: Organism Value: A. thaliana
  misc_feature: MA Experiment 20000171 PARAMETER Experiment Name: At_42deg_Heat_P Parameter: Plant Line Value: WS
  misc_feature: MA Experiment 20000171 PARAMETER Experiment Name: At_42deg_Heat_P Parameter: Temperature (deg C) Value: 42 vs. 22
  misc_feature: MA Experiment 20000171 PARAMETER Experiment Name: At_42deg_Heat_P Parameter: Timepoint (hr) Value: 1
  misc_feature: MA Experiment 20000171 PARAMETER Experiment Name: At_42deg_Heat_P Parameter: Tissue Value: Aerial
  misc_feature: MA Experiment ID: 20000180 Result: Up-regulated in Transcription
  misc_feature: MA Experiment 20000180 PARAMETER Experiment Name: At_Germinating_Seeds_P Parameter: Age (hr) Value: 24 vs. 0
  misc_feature: MA Experiment 20000180 PARAMETER Experiment Name: At_Germinating_Seeds_P Parameter: Tissue Value: Germinating Seeds
  misc_feature: MA Experiment ID: 20000185 Result: Up-regulated in Transcription
  misc_feature: MA Experiment 20000185 PARAMETER Experiment Name: At_Roots__P Parameter: Age (day) Value: 7 vs. 21
  misc_feature: MA Experiment 20000185 PARAMETER Experiment Name: At_Roots__P Parameter: Organism Value: A. thaliana
  misc_feature: MA Experiment 20000185 PARAMETER Experiment Name: At_Roots__P Parameter: Tissue Value: Roots vs. Whole Plant
  misc_feature: MA Experiment ID: 20000286 Result: Down-regulated in Transcription
  misc_feature: MA Experiment 20000286 PARAMETER Experiment Name: At_Open_Flower_P Parameter: Age (day) Value: 21
  misc_feature: MA Experiment 20000286 PARAMETER Experiment Name: At_Open_Flower_P Parameter: Plant Line Value: WS
  misc_feature: MA Experiment 20000286 PARAMETER Experiment Name: At_Open_Flower_P Parameter: Tissue Value: Half Open vs. Whole Plant
  misc_feature: MA Experiment ID: 20000438 Result: Down-regulated in Transcription
  misc_feature: MA Experiment 20000438 PARAMETER Experiment Name: At_Shoots__P Parameter: Age (day) Value: 14
  misc_feature: MA Experiment 20000438 PARAMETER Experiment Name: At_Shoots__P Parameter: Tissue Value: Shoots vs. Whole Plant
atggggaaaggtggcgcactaagcgaaagcgtgataaagaacatcgttctctcatacagctacgtagcgatatggatcttcttaagcttcacagtaattgtctacaacaaatacatcctcgacaagaagatgtacaattggccattcccgatctcactcacaatgatccacatgtccttttgttcaaccctagcttttctcatcatcaaggttttcaaattcgtcgagccagttaaaatgactcgcgagacttacctgagatccgtcgtaccgatcggtgctttgtacgctctctcactctggttatcgaattccgcttacatttacctatcagtctcctttatccagatgcttaaagctctcatgcctgtagctgtttactcaatcggtgttctgtttaaaaaggaaggattcaaatctgatactatgatgaacatgttatcgatttcgtttggtgttgcgattgctgcttatggtgaagctaggtttgatgtttggggtgtgattcttcagcttggtgctgttgcttttgaagctactcgtttggttttgattcagatcttgttaggagataaagggattaagcttaatcccattacttcgttatattacgttgctccttgttgtttggccttcttgtttattccatggatctacgttgagtttcctgttcttagagatacgtctagcttccacttggattacgcaattttcggagcgaattcgttttgtgcgtttgcgttgaatcttgctgtgtttcttttggttgggaagacatctgctttgactatgaatgttgctggtgtggttaaggattggctcttgattgctttctcatggtctgtgattaaggatactgtgacacctattaatcttttcgggtacgggattgcgttcttgggagttgcgtattataatcacgccaagttacaggctttgaaggctaaagaggaggagaagaagaagattcagcaagctgatgaggagagtggtcggttgcttgaagagagggaaggtgatgttgaaggtaagaagaatgatcagtctggtaattaa

SEQ ID NO: 79382 - protein, 351 aa, Arabidopsis thaliana
  peptide (1)..(351): Ceres Seq. ID no. 12651073
  misc_feature (179)..(307): Pfam Name: Integral membrane protein DUF6 Pfam Description: Integral membrane protein DUF6
  misc_feature (1)..(351): Homolog of NCBI NO: 15238995 NR Description: putative protein; protein id: At5g11230.1 thaliana] >gi|8953385|emb|CAB96658.1| putative protein
  misc_feature (1)..(347): Homolog of NCBI NO: 18420914 NR Description: expressed protein; protein id: At5g25400.1
  misc_feature (1)..(347): Homolog of NCBI NO: 15236781 NR Description: putative protein; protein id: At4g32390.1
  misc_feature (1)..(347): Homolog of NCBI NO: 15224742 NR Description: putative phosphate/phosphoenolpyruvate protein; protein id: At2g25520.1, supported by cDNA: gi_15809997, by cDNA: gi_15810280 [Arabidopsis thaliana]
  misc_feature (2)..(349): Homolog of NCBI NO: 34908982 NR Description: P0003D09.29 [Oryza sativa (japonica
  misc_feature (7)..(315): Homolog of NCBI NO: 15221115 NR Description: unknown protein; protein id: At1g48230.1
  misc_feature (7)..(317): Homolog of NCBI NO: 18401506 NR Description: expressed protein; protein id: At3g17430.1, by cDNA: gi_16648966, supported by cDNA: gi_20259901 [Arabidopsis
  misc_feature (7)..(315): Homolog of NCBI NO: 8778534 NR Description: F21D18.5 [Arabidopsis thaliana]
  misc_feature (8)..(316): Homolog of NCBI NO: 18400381 NR Description: expressed protein; protein id: At3g14410.1, by cDNA: gi_15294189, supported by cDNA: gi_20147278 [Arabidopsis >gi|15294190|gb|AAK95272.1|AF410286_1 AT3g14410/MLN21_19
  misc_feature (8)..(316): Homolog of NCBI NO: 9279588 NR Description: phosphate/phosphoenolpyruvate translocator
MGKGGALSESVIKNIVLSYSYVAIWIFLSFTVIVYNKYILDKKMYNWPFPISLTMIHMSFCSTLAFLIIKVFKFVEPVKMTRETYLRSVVPIGALYALSLWLSNSAYIYLSVSFIQMLKALMPVAVYSIGVLFKKEGFKSDTMMNMLSISFGVAIAAYGEARFDVWGVILQLGAVAFEATRLVLIQILLGDKGIKLNPITSLYYVAPCCLAFLFIPWIYVEFPVLRDTSSFHLDYAIFGANSFCAFALNLAVFLLVGKTSALTMNVAGVVKDWLLIAFSWSVIKDTVTPINLFGYGIAFLGVAYYNHAKLQALKAKEEEKKKIQQADEESGRLLEEREGDVEGKKNDQSGN

SEQ ID NO: 79383 - protein, 308 aa, Arabidopsis thaliana
  peptide (1)..(308): Ceres Seq. ID no. 12651074
  misc_feature (136)..(264): Pfam Name: Integral membrane protein DUF6 Pfam Description: Integral membrane protein DUF6
  misc_feature (1)..(308): Homolog of NCBI NO: 15238995 NR Description: putative protein; protein id: At5g11230.1 thaliana] >gi|8953385|emb|CAB96658.1| putative protein
  misc_feature (1)..(304): Homolog of NCBI NO: 18420914 NR Description: expressed protein; protein id: At5g25400.1
  misc_feature (1)..(304): Homolog of NCBI NO: 15236781 NR Description: putative protein; protein id: At4g32390.1
  misc_feature (1)..(304): Homolog of NCBI NO: 15224742 NR Description: putative phosphate/phosphoenolpyruvate protein; protein id: At2g25520.1, supported by cDNA: gi_15809997, by cDNA: gi_15810280 [Arabidopsis thaliana]
  misc_feature (1)..(306): Homolog of NCBI NO: 34908982 NR Description: P0003D09.29 [Oryza sativa (japonica
  misc_feature (1)..(272): Homolog of NCBI NO: 15221115 NR Description: unknown protein; protein id: At1g48230.1
  misc_feature (1)..(274): Homolog of NCBI NO: 18401506 NR Description: expressed protein; protein id: At3g17430.1, by cDNA: gi_16648966, supported by cDNA: gi_20259901 [Arabidopsis
  misc_feature (1)..(272): Homolog of NCBI NO: 8778534 NR Description: F21D18.5 [Arabidopsis thaliana]
  misc_feature (1)..(273): Homolog of NCBI NO: 18400381 NR Description: expressed protein; protein id: At3g14410.1, by cDNA: gi_15294189, supported by cDNA: gi_20147278 [Arabidopsis >gi|15294190|gb|AAK95272.1|AF410286_1 AT3g14410/MLN21_19
  misc_feature (1)..(273): Homolog of NCBI NO: 9279588 NR Description: phosphate/phosphoenolpyruvate translocator
MYNWPFPISLTMIHMSFCSTLAFLIIKVFKFVEPVKMTRETYLRSVVPIGALYALSLWLSNSAYIYLSVSFIQMLKALMPVAVYSIGVLFKKEGFKSDTMMNMLSISFGVAIAAYGEARFDVWGVILQLGAVAFEATRLVLIQILLGDKGIKLNPITSLYYVAPCCLAFLFIPWIYVEFPVLRDTSSFHLDYAIFGANSFCAFALNLAVFLLVGKTSALTMNVAGVVKDWLLIAFSWSVIKDTVTPINLFGYGIAFLGVAYYNHAKLQALKAKEEEKKKIQQADEESGRLLEEREGDVEGKKNDQSGN

SEQ ID NO: 79384 - protein, 297 aa, Arabidopsis thaliana
  peptide (1)..(297): Ceres Seq. ID no. 12651075
  misc_feature (125)..(253): Pfam Name: Integral membrane protein DUF6 Pfam Description: Integral membrane protein DUF6
  misc_feature (1)..(297): Homolog of NCBI NO: 15238995 NR Description: putative protein; protein id: At5g11230.1 thaliana] >gi|8953385|emb|CAB96658.1| putative protein
  misc_feature (1)..(293): Homolog of NCBI NO: 18420914 NR Description: expressed protein; protein id: At5g25400.1
  misc_feature (1)..(293): Homolog of NCBI NO: 15236781 NR Description: putative protein; protein id: At4g32390.1
  misc_feature (1)..(293): Homolog of NCBI NO: 15224742 NR Description: putative phosphate/phosphoenolpyruvate protein; protein id: At2g25520.1, supported by cDNA: gi_15809997, by cDNA: gi_15810280 [Arabidopsis thaliana]
  misc_feature (1)..(295): Homolog of NCBI NO: 34908982 NR Description: P0003D09.29 [Oryza sativa (japonica
  misc_feature (1)..(261): Homolog of NCBI NO: 15221115 NR Description: unknown protein; protein id: At1g48230.1
  misc_feature (1)..(263): Homolog of NCBI NO: 18401506 NR Description: expressed protein; protein id: At3g17430.1, by cDNA: gi_16648966, supported by cDNA: gi_20259901 [Arabidopsis
  misc_feature (1)..(261): Homolog of NCBI NO: 8778534 NR Description: F21D18.5 [Arabidopsis thaliana]
  misc_feature (1)..(262): Homolog of NCBI NO: 18400381 NR Description: expressed protein; protein id: At3g14410.1, by cDNA: gi_15294189, supported by cDNA: gi_20147278 [Arabidopsis >gi|15294190|gb|AAK95272.1|AF410286_1 AT3g14410/MLN21_19
  misc_feature (1)..(262): Homolog of NCBI NO: 9279588 NR Description: phosphate/phosphoenolpyruvate translocator
MIHMSFCSTLAFLIIKVFKFVEPVKMTRETYLRSVVPIGALYALSLWLSNSAYIYLSVSFIQMLKALMPVAVYSIGVLFKKEGFKSDTMMNMLSISFGVAIAAYGEARFDVWGVILQLGAVAFEATRLVLIQILLGDKGIKLNPITSLYYVAPCCLAFLFIPWIYVEFPVLRDTSSFHLDYAIFGANSFCAFALNLAVFLLVGKTSALTMNVAGVVKDWLLIAFSWSVIKDTVTPINLFGYGIAFLGVAYYNHAKLQALKAKEEEKKKIQQADEESGRLLEEREGDVEGKKNDQSGN

SEQ ID NO: 79385 - DNA, 1737 bp, Arabidopsis thaliana
  misc_feature (1)..(1737): Ceres Seq. ID no. 12651082
  misc_feature: MA Experiment ID: 20000185 Result: Up-regulated in Transcription
  misc_feature: MA Experiment 20000185 PARAMETER Experiment Name: At_Roots__P Parameter: Age (day) Value: 7 vs. 21
  misc_feature: MA Experiment 20000185 PARAMETER Experiment Name: At_Roots__P Parameter: Organism Value: A. thaliana
  misc_feature: MA Experiment 20000185 PARAMETER Experiment Name: At_Roots__P Parameter: Tissue Value: Roots vs. Whole Plant
  misc_feature: MA Experiment ID: 20000234 Result: Up-regulated in Transcription
  misc_feature: MA Experiment 20000234 PARAMETER Experiment Name: At_Siliques_P Parameter: Age (day) Value: 21
  misc_feature: MA Experiment 20000234 PARAMETER Experiment Name: At_Siliques_P Parameter: Organism Value: A. thaliana
  misc_feature: MA Experiment 20000234 PARAMETER Experiment Name: At_Siliques_P Parameter: Plant Line Value: WS
  misc_feature: MA Experiment 20000234 PARAMETER Experiment Name: At_Siliques_P Parameter: Tissue Value: Less Than 5mm Siliques vs. Whole Plant
  misc_feature: MA Experiment ID: 20000235 Result: Up-regulated in Transcription
  misc_feature: MA Experiment 20000235 PARAMETER Experiment Name: At_Siliques_P Parameter: Age (day) Value: 21
  misc_feature: MA Experiment 20000235 PARAMETER Experiment Name: At_Siliques_P Parameter: Organism Value: A. thaliana
  misc_feature: MA Experiment 20000235 PARAMETER Experiment Name: At_Siliques_P Parameter: Plant Line Value: WS
  misc_feature: MA Experiment 20000235 PARAMETER Experiment Name: At_Siliques_P Parameter: Tissue Value: 5-10mm Siliques vs. Whole Plant
  misc_feature: MA Experiment ID: 20000286 Result: Up-regulated in Transcription
  misc_feature: MA Experiment 20000286 PARAMETER Experiment Name: At_Open_Flower_P Parameter: Age (day) Value: 21
  misc_feature: MA Experiment 20000286 PARAMETER Experiment Name: At_Open_Flower_P Parameter: Plant Line Value: WS
  misc_feature: MA Experiment 20000286 PARAMETER Experiment Name: At_Open_Flower_P Parameter: Tissue Value: Half Open vs. Whole Plant
  misc_feature: MA Experiment ID: 20000439 Result: Up-regulated in Transcription
  misc_feature: MA Experiment 20000439 PARAMETER Experiment Name: At_Roots__P Parameter: Age (day) Value: 14 vs. 21
  misc_feature: MA Experiment 20000439 PARAMETER Experiment Name: At_Roots__P Parameter: Organism Value: A. thaliana
  misc_feature: MA Experiment 20000439 PARAMETER Experiment Name: At_Roots__P Parameter: Tissue Value: Roots vs. Whole Plant
  misc_feature: MA Experiment ID: 20000495 Result: Up-regulated in Transcription
  misc_feature: MA Experiment 20000495 PARAMETER Experiment Name: At_Guard_Cells_P Parameter: Harvest Date Value: 8/2/2002
  misc_feature: MA Experiment 20000495 PARAMETER Experiment Name: At_Guard_Cells_P Parameter: Organism Value: A. thaliana
  misc_feature: MA Experiment 20000495 PARAMETER Experiment Name: At_Guard_Cells_P Parameter: Tissue Value: Guard Cells vs. Leaves
  misc_feature: MA Experiment ID: 20001451 Result: Down-regulated in Transcription
  misc_feature: MA Experiment 20001451 PARAMETER Experiment Name: At_Far-red-induction_P Parameter: Age (day) Value: 7
  misc_feature: MA Experiment 20001451 PARAMETER Experiment Name: At_Far-red-induction_P Parameter: Light Value: Far-red vs. White
  misc_feature: MA Experiment 20001451 PARAMETER Experiment Name: At_Far-red-induction_P Parameter: Organism Value: A. thaliana
  misc_feature: MA Experiment 20001451 PARAMETER Experiment Name: At_Far-red-induction_P Parameter: Plant Line Value: Columbia
  misc_feature: MA Experiment 20001451 PARAMETER Experiment Name: At_Far-red-induction_P Parameter: Timepoint (hr) Value: 24
  misc_feature: MA Experiment 20001451 PARAMETER Experiment Name: At_Far-red-induction_P Parameter: Tissue Value: Whole Plant
tctctctctctctggagcgttctcttctctccttgagcttctcttaccgccattagagctccttcacaaactcataaacctatttgttgagccaggcttggcttaaccactggcctttttccagactaaattatgtattgctcttcttcgatgcatccaaatgcaaacaaagaaaatatctctacttcagatgtacaggagagttttgtacgaataacgagatcacgagctaaaaaagccatgggaagaggagtatcaatacctccaacaaaaccttcttttaaacagcaaaagagacgtgcagtacttaaggatgtgagtaatacctctgcagatattatttattcagaacttcgaaagggaggcaacatcaaggcaaacagaaaatgtctaaaagagcctaaaaaagcagcaaaggaaggtgctaacagtgccatggatattctggtagatatgcatacagaaaaatcaaaattagcagaagatttgtccaagatcaggatggctgaagcccaagatgtctctctttcaaactttaaagatgaagaaattactgagcaacaagaagatggatcaggtgtcatggagttacttcaagttgtagatattgattccaacgtcgaagatccacagtgttgcagcttgtatgctgctgatatatatgacaacatacatgttgcagagcttcaacaacgacccttggctaattatatggagcttgtgcagcgagatatcgacccagacatgagaaagattctgattgactggcttgtagaagtttctgacgactacaagctggttccagatacgctttaccttacagtgaatcttatcgaccggtttctgtccaacagttacattgaaaggcaaagactccagctccttggtgtctcttgcatgcttatagcttcaaaatatgaagagctttccgcaccaggggtggaggagttttgcttcattacggccaacacatacacaagaccagaagtgctgagcatggagattcaaattctaaattttgtgcactttagattatcggttcctaccaccaaaacatttctgaggcggttcattaaagcagctcaagcttcgtacaaggtgcctttcattgaactggagtatttagcaaactatctcgccgaattgacactggtggaatatagtttcctaaggttcctgccatcactaattgctgcttcagctgttttcctagcccgatggacactcgaccaaactgaccatccttggaaccctactctgcaacactacaccagatatgaggtagctgagctgaagaacacagttctcgccatggaggacttgcagctcaacaccagtggctgtactctcgctgccacccgtgagaaatacaaccaaccaaagtttaagagcgtggcaaagctgacatctcccaaacgagtcacatcactattctcaagatgacaccaagcaacatcgaaaacagagcccaagtcaggtgatcaaaatacctattttcagacattggatgttatgtcgtctctttgccagttttgtctgtctgtaattctgtagctattgtgtggcgccttaattgtaggccattacttgtcacaccacttagctttaaataaatgttatggaatttttctaatcgcattgctacaactatttactatcctgcgggattttgtacctaggagcacttggaaaacgaatacaaaagtgttaattaatataaatttcactgttcatggc

SEQ ID NO: 79386 - protein, 436 aa, Arabidopsis thaliana
  peptide (1)..(436): Ceres Seq. ID no. 12651083
  misc_feature (304)..(431): Pfam Name: Cyclin, C-terminal domain Pfam Description: Cyclin, C-terminal domain
  misc_feature (1)..(436): Homolog of NCBI NO: 22326727 NR Description: Cyclin A2;2; protein id: At5g11300.1 [Arabidopsis
  misc_feature (1)..(436): Homolog of NCBI NO: 784946 NR Description: cyclin 3b [Arabidopsis thaliana]
  misc_feature (1)..(436): Homolog of NCBI NO: 8953392 NR Description: cyclin 3b [Arabidopsis thaliana]
  misc_feature (1)..(436): Homolog of NCBI NO: 4063736 NR Description: cyclin 3a [Arabidopsis thaliana]
  misc_feature (1)..(436): Homolog of NCBI NO: 509425 NR Description: cyclin 3a [Arabidopsis thaliana]
  misc_feature (1)..(436): Homolog of NCBI NO: 22327058 NR Description: Cyclin A2;1; protein id: At5g25380.1 [Arabidopsis
  misc_feature (128)..(399): Homolog of NCBI NO: 2129565 NR Description: mitosis-specific cyclin 2 - Arabidopsis thaliana
MYCSSSMHPNANKENISTSDVQESFVRITRSRAKKAMGRGVSIPPTKPSFKQQKRRAVLKDVSNTSADIIYSELRKGGNIKANRKCLKEPKKAAKEGANSAMDILVDMHTEKSKLAEDLSKIRMAEAQDVSLSNFKDEEITEQQEDGSGVMELLQVVDIDSNVEDPQCCSLYAADIYDNIHVAELQQRPLANYMELVQRDIDPDMRKILIDWLVEVSDDYKLVPDTLYLTVNLIDRFLSNSYIERQRLQLLGVSCMLIASKYEELSAPGVEEFCFITANTYTRPEVLSMEIQILNFVHFRLSVPTTKTFLRRFIKAAQASYKVPFIELEYLANYLAELTLVEYSFLRFLPSLIAASAVFLARWTLDQTDHPWNPTLQHYTRYEVAELKNTVLAMEDLQLNTSGCTLAATREKYNQPKFKSVAKLTSPKRVTSLFSR

SEQ ID NO: 79387 - protein, 430 aa, Arabidopsis thaliana
  peptide (1)..(430): Ceres Seq. ID no. 12651084
  misc_feature (298)..(425): Pfam Name: Cyclin, C-terminal domain Pfam Description: Cyclin, C-terminal domain
  misc_feature (1)..(430): Homolog of NCBI NO: 22326727 NR Description: Cyclin A2;2; protein id: At5g11300.1 [Arabidopsis
  misc_feature (1)..(430): Homolog of NCBI NO: 784946 NR Description: cyclin 3b [Arabidopsis thaliana]
  misc_feature (1)..(430): Homolog of NCBI NO: 8953392 NR Description: cyclin 3b [Arabidopsis thaliana]
  misc_feature (1)..(430): Homolog of NCBI NO: 4063736 NR Description: cyclin 3a [Arabidopsis thaliana]
  misc_feature (1)..(430): Homolog of NCBI NO: 509425 NR Description: cyclin 3a [Arabidopsis thaliana]
  misc_feature (1)..(430): Homolog of NCBI NO: 22327058 NR Description: Cyclin A2;1; protein id: At5g25380.1 [Arabidopsis
  misc_feature (122)..(393): Homolog of NCBI NO: 2129565 NR Description: mitosis-specific cyclin 2 - Arabidopsis thaliana
MHPNANKENISTSDVQESFVRITRSRAKKAMGRGVSIPPTKPSFKQQKRRAVLKDVSNTSADIIYSELRKGGNIKANRKCLKEPKKAAKEGANSAMDILVDMHTEKSKLAEDLSKIRMAEAQDVSLSNFKDEEITEQQEDGSGVMELLQVVDIDSNVEDPQCCSLYAADIYDNIHVAELQQRPLANYMELVQRDIDPDMRKILIDWLVEVSDDYKLVPDTLYLTVNLIDRFLSNSYIERQRLQLLGVSCMLIASKYEELSAPGVEEFCFITANTYTRPEVLSMEIQILNFVHFRLSVPTTKTFLRRFIKAAQASYKVPFIELEYLANYLAELTLVEYSFLRFLPSLIAASAVFLARWTLDQTDHPWNPTLQHYTRYEVAELKNTVLAMEDLQLNTSGCTLAATREKYNQPKFKSVAKLTSPKRVTSLFSR

SEQ ID NO: 79388 - protein, 400 aa, Arabidopsis thaliana
  peptide (1)..(400): Ceres Seq. ID no. 12651085
  misc_feature (268)..(395): Pfam Name: Cyclin, C-terminal domain Pfam Description: Cyclin, C-terminal domain
  misc_feature (1)..(400): Homolog of NCBI NO: 22326727 NR Description: Cyclin A2;2; protein id: At5g11300.1 [Arabidopsis
  misc_feature (1)..(400): Homolog of NCBI NO: 784946 NR Description: cyclin 3b [Arabidopsis thaliana]
  misc_feature (1)..(400): Homolog of NCBI NO: 8953392 NR Description: cyclin 3b [Arabidopsis thaliana]
  misc_feature (1)..(400): Homolog of NCBI NO: 4063736 NR Description: cyclin 3a [Arabidopsis thaliana]
  misc_feature (1)..(400): Homolog of NCBI NO: 509425 NR Description: cyclin 3a [Arabidopsis thaliana]
  misc_feature (1)..(400): Homolog of NCBI NO: 22327058 NR Description: Cyclin A2;1; protein id: At5g25380.1 [Arabidopsis
  misc_feature (92)..(363): Homolog of NCBI NO: 2129565 NR Description: mitosis-specific cyclin 2 - Arabidopsis thaliana
MGRGVSIPPTKPSFKQQKRRAVLKDVSNTSADIIYSELRKGGNIKANRKCLKEPKKAAKEGANSAMDILVDMHTEKSKLAEDLSKIRMAEAQDVSLSNFKDEEITEQQEDGSGVMELLQVVDIDSNVEDPQCCSLYAADIYDNIHVAELQQRPLANYMELVQRDIDPDMRKILIDWLVEVSDDYKLVPDTLYLTVNLIDRFLSNSYIERQRLQLLGVSCMLIASKYEELSAPGVEEFCFITANTYTRPEVLSMEIQILNFVHFRLSVPTTKTFLRRFIKAAQASYKVPFIELEYLANYLAELTLVEYSFLRFLPSLIAASAVFLARWTLDQTDHPWNPTLQHYTRYEVAELKNTVLAMEDLQLNTSGCTLAATREKYNQPKFKSVAKLTSPKRVTSLFSR

SEQ ID NO: 79389 - DNA, 1809 bp, Arabidopsis thaliana
  misc_feature (1)..(1809): Ceres Seq. ID no. 12651086
  misc_feature: MA Experiment ID: 20000307 Result: Down-regulated in Transcription
  misc_feature: MA Experiment 20000307 PARAMETER Experiment Name: At_Germinating_Seeds_Sub_P Parameter: Age (hr) Value: 24 vs. 0
  misc_feature: MA Experiment 20000307 PARAMETER Experiment Name: At_Germinating_Seeds_Sub_P Parameter: Organism Value: A. thaliana
  misc_feature: MA Experiment 20000307 PARAMETER Experiment Name: At_Germinating_Seeds_Sub_P Parameter: Plant Line Value: WS
  misc_feature: MA Experiment 20000307 PARAMETER Experiment Name: At_Germinating_Seeds_Sub_P Parameter: Tissue Value: Germinating Seeds
  misc_feature: MA Experiment ID: 20000315 Result: Down-regulated in Transcription
  misc_feature: MA Experiment 20000315 PARAMETER Experiment Name: At_14day_Shoots-Roots_Sub_P Parameter: Age (day) Value: 14
  misc_feature: MA Experiment 20000315 PARAMETER Experiment Name: At_14day_Shoots-Roots_Sub_P Parameter: Organism Value: A. thaliana
  misc_feature: MA Experiment 20000315 PARAMETER Experiment Name: At_14day_Shoots-Roots_Sub_P Parameter: Plant Line Value: WS
  misc_feature: MA Experiment 20000315 PARAMETER Experiment Name: At_14day_Shoots-Roots_Sub_P Parameter: Tissue Value: Shoots vs. Whole Plant
atgaactctctgttcaccgccttccgccgcaacctcctcttaaaccctaatcctcaccgcaacttctttcttcatagattgttatcatcatctcgccgttcatccccgctcattcccgtcgagcctctcatccaacggatacaatcacccgccgtacccgattctacatgtactccaccgcaacaaaacaccgtctcgaaaaccgatctctctactatatcgaatcttctcgagaacactgatgttgttcccggttcgagtctcgagtcagctttagatgaaaccggaatcgaaccgagtgttgagttggttcacgcgttgttcgatcggttaagttcatcgccgatgttgcttcactcagtgttcaaatgggcggagatgaaacctgggtttacactttctccttcacttttcgattctgttgtcaattctctatgtaaagctcgtgaatttgaaattgcttggtcgttggtttttgatcgagtgagaagcgatgaaggatcgaatttggtttctgcagatacgttcatcgttttgatcagacggtatgctcgtgctggtatggtgcaacaagctatacgagcttttgaattcgctagaagttatgaaccggtttgtaaatcagctacggaacttaggttgcttgaggttttgttagatgcactttgtaaagaaggtcatgttagagaagcttcaatgtatttggagagaataggagggacgatggattcgaattgggttccttctgttcggattttcaacattttattgaatggatggtttcgttcaagaaagctaaagcaggcagagaagttatgggaagagatgaaagcgatgaatgtgaagccgactgttgttacttacggtactcttatcgaagggtattgcaggatgcgtcgtgttcagattgctatggaggttcttgaagaaatgaagatggcagaaatggagattaattttatggtctttaatccgattatcgatggtttaggagaagcggggcggttaagtgaagctctaggtatgatggaaaggttcttcgtttgtgaatcaggtcctactatagtgacttataattcactagtgaagaatttctgcaaggctggagatcttcctggtgctagcaaaatactcaagatgatgatgacacgaggtgttgatcctaccacgactacatacaaccatttcttcaagtatttctcaaagcataacaaaacggaagagggcatgaacttatatttcaagttgattgaagctggacacagtccagaccggttaacgtatcatttgatcttgaaaatgctgtgtgaggatgggaagctgagcttggcgatgcaagtgaacaaggagatgaaaaacagaggaatcgatcctgacttattaacaaccacaatgcttatacatttgctctgcagactcgagatgttagaagaagcctttgaagagtttgacaacgcagtgagacgagggattattccacagtacatcacatttaagatgatcgataacgggttgagatcgaaagggatgagcgatatggcgaagagactatccagcctaatgtcgtctcttcctcactcgaagaagctgccaaatacatacagagaagcagtagatgcaccgcctgataaagatagaaggaagtctattttgcatagagcagaagccatgtctgatgtgttgaaaggttgcaggaacccgagaaaactcgtgaagatgcgtggatcgcacaaaaaagctgttggtgaagacataaacctgatagatgatatcaatgaacgaaatggagatgcaggggattttgagtga

SEQ ID NO: 79390 - protein, 602 aa, Arabidopsis thaliana
  peptide (1)..(602): Ceres Seq. ID no. 12651087
  misc_feature (391)..(425): Pfam Name: PPR repeat Pfam Description: PPR repeat
  misc_feature (90)..(574): Homolog of NCBI NO: 13359056 NR Description: P0436D06.17 [Oryza sativa (japonica
  misc_feature (28)..(524): Homolog of NCBI NO: 15223927 NR Description: hypothetical protein; protein id: At1g71060.1
  misc_feature (69)..(530): Homolog of NCBI NO: 15229604 NR Description: putative protein; protein id: At3g49730.1
  misc_feature (66)..(524): Homolog of NCBI NO: 15223926 NR Description: hypothetical protein; protein id: At1g77360.1
  misc_feature (88)..(523): Homolog of NCBI NO: 15239161 NR Description: putative protein; protein id: At5g65820.1
  misc_feature (86)..(524): Homolog of NCBI NO: 14488357 NR Description: unknown protein [Oryza sativa (japonica
  misc_feature (53)..(530): Homolog of NCBI NO: 21686921 NR Description: putative reverse transcriptase [Oryza sativa
  misc_feature (63)..(523): Homolog of NCBI NO: 15228825 NR Description: hypothetical protein; protein id: At3g22670.1 thaliana] >gi|9279685|dbj|BAB01242.1|
  misc_feature (69)..(501): Homolog of NCBI NO: 15217756 NR Description: hypothetical protein; protein id: At1g02420.1
  misc_feature (103)..(524): Homolog of NCBI NO: 6721172 NR Description: hypothetical protein [Arabidopsis thaliana]
MNSLFTAFRRNLLLNPNPHRNFFLHRLLSSSRRSSPLIPVEPLIQRIQSPAVPDSTCTPPQQNTVSKTDLSTISNLLENTDVVPGSSLESALDETGIEPSVELVHALFDRLSSSPMLLHSVFKWAEMKPGFTLSPSLFDSVVNSLCKAREFEIAWSLVFDRVRSDEGSNLVSADTFIVLIRRYARAGMVQQAIRAFEFARSYEPVCKSATELRLLEVLLDALCKEGHVREASMYLERIGGTMDSNWVPSVRIFNILLNGWFRSRKLKQAEKLWEEMKAMNVKPTVVTYGTLIEGYCRMRRVQIAMEVLEEMKMAEMEINFMVFNPIIDGLGEAGRLSEALGMMERFFVCESGPTIVTYNSLVKNFCKAGDLPGASKILKMMMTRGVDPTTTTYNHFFKYFSKHNKTEEGMNLYFKLIEAGHSPDRLTYHLILKMLCEDGKLSLAMQVNKEMKNRGIDPDLLTTTMLIHLLCRLEMLEEAFEEFDNAVRRGIIPQYITFKMIDNGLRSKGMSDMAKRLSSLMSSLPHSKKLPNTYREAVDAPPDKDRRKSILHRAEAMSDVLKGCRNPRKLVKMRGSHKKAVGEDINLIDDINERNGDAGDFE

SEQ ID NO: 79391 - protein, 487 aa, Arabidopsis thaliana
  peptide (1)..(487): Ceres Seq. ID no. 12651088
  misc_feature (276)..(310): Pfam Name: PPR repeat Pfam Description: PPR repeat
  misc_feature (1)..(459): Homolog of NCBI NO: 13359056 NR Description: P0436D06.17 [Oryza sativa (japonica
  misc_feature (1)..(409): Homolog of NCBI NO: 15223927 NR Description: hypothetical protein; protein id: At1g71060.1
  misc_feature (1)..(415): Homolog of NCBI NO: 15229604 NR Description: putative protein; protein id: At3g49730.1
  misc_feature (1)..(409): Homolog of NCBI NO: 15223926 NR Description: hypothetical protein; protein id: At1g77360.1
  misc_feature (1)..(408): Homolog of NCBI NO: 15239161 NR Description: putative protein; protein id: At5g65820.1
  misc_feature (1)..(409): Homolog of NCBI NO: 14488357 NR Description: unknown protein [Oryza sativa (japonica
  misc_feature (1)..(415): Homolog of NCBI NO: 21686921 NR Description: putative reverse transcriptase [Oryza sativa
  misc_feature (1)..(408): Homolog of NCBI NO: 15228825 NR Description: hypothetical protein; protein id: At3g22670.1 thaliana] >gi|9279685|dbj|BAB01242.1|
  misc_feature (1)..(386): Homolog of NCBI NO: 15217756 NR Description: hypothetical protein; protein id: At1g02420.1
  misc_feature (1)..(409): Homolog of NCBI NO: 6721172 NR Description: hypothetical protein [Arabidopsis thaliana]
MLLHSVFKWAEMKPGFTLSPSLFDSVVNSLCKAREFEIAWSLVFDRVRSDEGSNLVSADTFIVLIRRYARAGMVQQAIRAFEFARSYEPVCKSATELRLLEVLLDALCKEGHVREASMYLERIGGTMDSNWVPSVRIFNILLNGWFRSRKLKQAEKLWEEMKAMNVKPTVVTYGTLIEGYCRMRRVQIAMEVLEEMKMAEMEINFMVFNPIIDGLGEAGRLSEALGMMERFFVCESGPTIVTYNSLVKNFCKAGDLPGASKILKMMMTRGVDPTTTTYNHFFKYFSKHNKTEEGMNLYFKLIEAGHSPDRLTYHLILKMLCEDGKLSLAMQVNKEMKNRGIDPDLLTTTMLIHLLCRLEMLEEAFEEFDNAVRRGIIPQYITFKMIDNGLRSKGMSDMAKRLSSLMSSLPHSKKLPNTYREAVDAPPDKDRRKSILHRAEAMSDVLKGCRNPRKLVKMRGSHKKAVGEDINLIDDINERNGDAGDFE

SEQ ID NO: 79392 - protein, 476 aa, Arabidopsis thaliana
  peptide (1)..(476): Ceres Seq. ID no. 12651089
  misc_feature (265)..(299): Pfam Name: PPR repeat Pfam Description: PPR repeat
  misc_feature (1)..(448): Homolog of NCBI NO: 13359056 NR Description: P0436D06.17 [Oryza sativa (japonica
  misc_feature (1)..(398): Homolog of NCBI NO: 15223927 NR Description: hypothetical protein; protein id: At1g71060.1
  misc_feature (1)..(404): Homolog of NCBI NO: 15229604 NR Description: putative protein; protein id: At3g49730.1
  misc_feature (1)..(398): Homolog of NCBI NO: 15223926 NR Description: hypothetical protein; protein id: At1g77360.1
  misc_feature (1)..(397): Homolog of NCBI NO: 15239161 NR Description: putative protein; protein id: At5g65820.1
  misc_feature (1)..(398): Homolog of NCBI NO: 14488357 NR Description: unknown protein [Oryza sativa (japonica
  misc_feature (1)..(404): Homolog of NCBI NO: 21686921 NR Description: putative reverse transcriptase [Oryza sativa
  misc_feature (1)..(397): Homolog of NCBI NO: 15228825 NR Description: hypothetical protein; protein id: At3g22670.1 thaliana] >gi|9279685|dbj|BAB01242.1|
  misc_feature (1)..(375): Homolog of NCBI NO: 15217756 NR Description: hypothetical protein; protein id: At1g02420.1
  misc_feature (1)..(398): Homolog of NCBI NO: 6721172 NR Description: hypothetical protein [Arabidopsis thaliana]
MKPGFTLSPSLFDSVVNSLCKAREFEIAWSLVFDRVRSDEGSNLVSADTFIVLIRRYARAGMVQQAIRAFEFARSYEPVCKSATELRLLEVLLDALCKEGHVREASMYLERIGGTMDSNWVPSVRIFNILLNGWFRSRKLKQAEKLWEEMKAMNVKPTVVTYGTLIEGYCRMRRVQIAMEVLEEMKMAEMEINFMVFNPIIDGLGEAGRLSEALGMMERFFVCESGPTIVTYNSLVKNFCKAGDLPGASKILKMMMTRGVDPTTTTYNHFFKYFSKHNKTEEGMNLYFKLIEAGHSPDRLTYHLILKMLCEDGKLSLAMQVNKEMKNRGIDPDLLTTTMLIHLLCRLEMLEEAFEEFDNAVRRGIIPQYITFKMIDNGLRSKGMSDMAKRLSSLMSSLPHSKKLPNTYREAVDAPPDKDRRKSILHRAEAMSDVLKGCRNPRKLVKMRGSHKKAVGEDINLIDDINERNGDAGDFE

SEQ ID NO: 79393 - DNA, 711 bp, Arabidopsis thaliana
  misc_feature (1)..(711): Ceres Seq. ID no. 12651114
  misc_feature: MA Experiment ID: 20001248 Result: Down-regulated in Transcription
  misc_feature: MA Experiment 20001248 PARAMETER Experiment Name: At_Far-red-induction_P Parameter: Age (day) Value: 7
  misc_feature: MA Experiment 20001248 PARAMETER Experiment Name: At_Far-red-induction_P Parameter: Light Value: Far-red vs. White
  misc_feature: MA Experiment 20001248 PARAMETER Experiment Name: At_Far-red-induction_P Parameter: Organism Value: A. thaliana
  misc_feature: MA Experiment 20001248 PARAMETER Experiment Name: At_Far-red-induction_P Parameter: Plant Line Value: Columbia
  misc_feature: MA Experiment 20001248 PARAMETER Experiment Name: At_Far-red-induction_P Parameter: Timepoint (hr) Value: 4
  misc_feature: MA Experiment 20001248 PARAMETER Experiment Name: At_Far-red-induction_P Parameter: Tissue Value: Whole Plant
  misc_feature: MA Experiment ID: 20001450 Result: Down-regulated in Transcription
  misc_feature: MA Experiment 20001450 PARAMETER Experiment Name: At_Far-red-induction_P Parameter: Age (day) Value: 7
  misc_feature: MA Experiment 20001450 PARAMETER Experiment Name: At_Far-red-induction_P Parameter: Light Value: Far-red vs. White
  misc_feature: MA Experiment 20001450 PARAMETER Experiment Name: At_Far-red-induction_P Parameter: Organism Value: A. thaliana
  misc_feature: MA Experiment 20001450 PARAMETER Experiment Name: At_Far-red-induction_P Parameter: Plant Line Value: Columbia
  misc_feature: MA Experiment 20001450 PARAMETER Experiment Name: At_Far-red-induction_P Parameter: Timepoint (hr) Value: 8
  misc_feature: MA Experiment 20001450 PARAMETER Experiment Name: At_Far-red-induction_P Parameter: Tissue Value: Whole Plant
  misc_feature: MA Experiment ID: 20001554 Result: Up-regulated in Transcription
  misc_feature: MA Experiment 20001554 PARAMETER Experiment Name: At_Drought_Soil_Dry_P Parameter: Age (day) Value: 21
  misc_feature: MA Experiment 20001554 PARAMETER Experiment Name: At_Drought_Soil_Dry_P Parameter: Organism Value: A. thaliana
  misc_feature: MA Experiment 20001554 PARAMETER Experiment Name: At_Drought_Soil_Dry_P Parameter: Plant Line Value: WS
  misc_feature: MA Experiment 20001554 PARAMETER Experiment Name: At_Drought_Soil_Dry_P Parameter: Post Timepoint (hr) Value: None
  misc_feature: MA Experiment 20001554 PARAMETER Experiment Name: At_Drought_Soil_Dry_P Parameter: Post-Treatment Value: None
  misc_feature: MA Experiment 20001554 PARAMETER Experiment Name: At_Drought_Soil_Dry_P Parameter: Timepoint (day) Value: 7
  misc_feature: MA Experiment 20001554 PARAMETER Experiment Name: At_Drought_Soil_Dry_P Parameter: Treatment Value: Drought vs. No Drought
  misc_feature: MA Experiment ID: 20001556 Result: Up-regulated in Transcription
  misc_feature: MA Experiment 20001556 PARAMETER Experiment Name: At_Drought_Soil_Dry_P Parameter: Age (day) Value: 26
  misc_feature: MA Experiment 20001556 PARAMETER Experiment Name: At_Drought_Soil_Dry_P Parameter: Organism Value: A. thaliana
  misc_feature: MA Experiment 20001556 PARAMETER Experiment Name: At_Drought_Soil_Dry_P Parameter: Plant Line Value: WS
  misc_feature: MA Experiment 20001556 PARAMETER Experiment Name: At_Drought_Soil_Dry_P Parameter: Post Timepoint (hr) Value: None
  misc_feature: MA Experiment 20001556 PARAMETER Experiment Name: At_Drought_Soil_Dry_P Parameter: Post-Treatment Value: None
  misc_feature: MA Experiment 20001556 PARAMETER Experiment Name: At_Drought_Soil_Dry_P Parameter: Timepoint (day) Value: 12
  misc_feature: MA Experiment 20001556 PARAMETER Experiment Name: At_Drought_Soil_Dry_P Parameter: Treatment Value: Drought vs. No Drought
  misc_feature: MA Experiment ID: 20001768 Result: Down-regulated in Transcription
  misc_feature: MA Experiment 20001768 PARAMETER Experiment Name: At_Far-red-enriched-adult_P Parameter: Age (day) Value: 28
  misc_feature: MA Experiment 20001768 PARAMETER Experiment Name: At_Far-red-enriched-adult_P Parameter: Light Value: Far-red enriched vs. White
  misc_feature: MA Experiment 20001768 PARAMETER Experiment Name: At_Far-red-enriched-adult_P Parameter: Organism Value: A. thaliana
  misc_feature: MA Experiment 20001768 PARAMETER Experiment Name: At_Far-red-enriched-adult_P Parameter: Plant Line Value: Columbia
  misc_feature: MA Experiment 20001768 PARAMETER Experiment Name: At_Far-red-enriched-adult_P Parameter: Timepoint (hr) Value: 1
  misc_feature: MA Experiment 20001768 PARAMETER Experiment Name: At_Far-red-enriched-adult_P Parameter: Tissue Value: Aerial
atggcagaggaatactacagcctccgctcggagagagtaactcagcttcttgtccctaactcggagtctgactcagtgagtgacaaaagcaaagctgagcaaagcgagaagaagactaaacgtgggagagactccggtaaacaccctgtttatcgcggagtaaggatgaggaactggggaaaatgggtgtcggagattcgtgagccgaggaagaaatcacgtatttggctgggaactttcccgacgccggagatggcggcgcgtgcacacgacgtggcggctctgagcattaaaggaacggccgctatactaaacttccctgaactcgctgactcattccctcgacccgtttcattaagccctcgagacattcagacagcagctcttaaagcagctcacatggaaccgacgacgtcgttttcatcttccacgtcttcgtcgtcgtctttgtcttctacgtcttcgctcgagtctcttgtgttggtgatggacctctcgaggactgagtcggaggagctcggtgagattgtggagcttccaagtctcggggcgagttacgacgtcgactcggctaaccttgggaacgagtttgtcttctatgactcagttgactactgtttatatccgccgccgtggggacagtcgtccgaagataactatggtcacggaattagccctaattttggccatggcttgtcatgggatctctaa

SEQ ID NO: 79394 - protein, 236 aa, Arabidopsis thaliana
  peptide (1)..(236): Ceres Seq. ID no. 12651115
  misc_feature (48)..(112): Pfam Name: AP2 domain Pfam Description: AP2 domain
  misc_feature (1)..(236): Homolog of NCBI NO: 15239113 NR Description: transcription factor TINY, putative; protein id: [Arabidopsis thaliana] >gi|11282310|pir||T48518 transcription
  misc_feature (21)..(236): Homolog of NCBI NO: 15239501 NR Description: transcription factor TINY; protein id: At5g25810.1
  misc_feature (32)..(218): Homolog of NCBI NO: 15233928 NR Description: transcription factor TINY, putative; protein id:
  misc_feature (28)..(212): Homolog of NCBI NO: 15223860 NR Description: transcription factor TINY, putative; protein id:
  misc_feature (35)..(223): Homolog of NCBI NO: 25352180 NR Description: TINY-like AP2 domain transcription factor
  misc_feature (23)..(210): Homolog of NCBI NO: 15228171 NR Description: transcription factor TINY, putative; protein id: [Arabidopsis thaliana] >gi|2062174|gb|AAB63648.1| transcription
  misc_feature (23)..(210): Homolog of NCBI NO: 9279711 NR Description: transcription factor TINY-like protein
  misc_feature (22)..(222): Homolog of NCBI NO: 25992102 NR Description: dehydration responsive element binding protein
  misc_feature (22)..(149): Homolog of NCBI NO: 37536842 NR Description: putative DNA binding protein [Oryza sativa
  misc_feature (22)..(182): Homolog of NCBI NO: 14140155 NR Description: putative AP2 domain transcription factor [Oryza
MAEEYYSLRSERVTQLLVPNSESDSVSDKSKAEQSEKKTKRGRDSGKHPVYRGVRMRNWGKWVSEIREPRKKSRIWLGTFPTPEMAARAHDVAALSIKGTAAILNFPELADSFPRPVSLSPRDIQTAALKAAHMEPTTSFSSSTSSSSSLSSTSSLESLVLVMDLSRTESEELGEIVELPSLGASYDVDSANLGNEFVFYDSVDYCLYPPPWGQSSEDNYGHGISPNFGHGLSWDL

SEQ ID NO: 79395 - protein, 181 aa, Arabidopsis thaliana
  peptide (1)..(181): Ceres Seq. ID no. 12651116
  misc_feature (1)..(57): Pfam Name: AP2 domain Pfam Description: AP2 domain
  misc_feature (1)..(181): Homolog of NCBI NO: 15239113 NR Description: transcription factor TINY, putative; protein id: [Arabidopsis thaliana] >gi|11282310|pir||T48518 transcription
  misc_feature (1)..(181): Homolog of NCBI NO: 15239501 NR Description: transcription factor TINY; protein id: At5g25810.1
  misc_feature (1)..(163): Homolog of NCBI NO: 15233928 NR Description: transcription factor TINY, putative; protein id:
  misc_feature (1)..(157): Homolog of NCBI NO: 15223860 NR Description: transcription factor TINY, putative; protein id:
  misc_feature (1)..(168): Homolog of NCBI NO: 25352180 NR Description: TINY-like AP2 domain transcription factor
  misc_feature (1)..(155): Homolog of NCBI NO: 15228171 NR Description: transcription factor TINY, putative; protein id: [Arabidopsis thaliana] >gi|2062174|gb|AAB63648.1| transcription
  misc_feature (1)..(155): Homolog of NCBI NO: 9279711 NR Description: transcription factor TINY-like protein
  misc_feature (1)..(167): Homolog of NCBI NO: 25992102 NR Description: dehydration responsive element binding protein
  misc_feature (1)..(94): Homolog of NCBI NO: 37536842 NR Description: putative DNA binding protein [Oryza sativa
  misc_feature (1)..(127): Homolog of NCBI NO: 14140155 NR Description: putative AP2 domain transcription factor [Oryza
MRNWGKWVSEIREPRKKSRIWLGTFPTPEMAARAHDVAALSIKGTAAILNFPELADSFPRPVSLSPRDIQTAALKAAHMEPTTSFSSSTSSSSSLSSTSSLESLVLVMDLSRTESEELGEIVELPSLGASYDVDSANLGNEFVFYDSVDYCLYPPPWGQSSEDNYGHGISPNFGHGLSWDL

SEQ ID NO: 79396 - protein, 152 aa, Arabidopsis thaliana
  peptide (1)..(152): Ceres Seq. ID no. 12651117
  misc_feature (1)..(152): Homolog of NCBI NO: 15239113 NR Description: transcription factor TINY, putative; protein id: [Arabidopsis thaliana] >gi|11282310|pir||T48518 transcription
  misc_feature (1)..(152): Homolog of NCBI NO: 15239501 NR Description: transcription factor TINY; protein id: At5g25810.1
  misc_feature (1)..(134): Homolog of NCBI NO: 15233928 NR Description: transcription factor TINY, putative; protein id:
  misc_feature (1)..(128): Homolog of NCBI NO: 15223860 NR Description: transcription factor TINY, putative; protein id:
  misc_feature (1)..(139): Homolog of NCBI NO: 25352180 NR Description: TINY-like AP2 domain transcription factor
  misc_feature (1)..(126): Homolog of NCBI NO: 15228171 NR Description: transcription factor TINY, putative; protein id: [Arabidopsis thaliana] >gi|2062174|gb|AAB63648.1| transcription
  misc_feature (1)..(126): Homolog of NCBI NO: 9279711 NR Description: transcription factor TINY-like protein
  misc_feature (1)..(138): Homolog of NCBI NO: 25992102 NR Description: dehydration responsive element binding protein
  misc_feature (1)..(65): Homolog of NCBI NO: 37536842 NR Description: putative DNA binding protein [Oryza sativa
  misc_feature (1)..(98): Homolog of NCBI NO: 14140155 NR Description: putative AP2 domain transcription factor [Oryza
MAARAHDVAALSIKGTAAILNFPELADSFPRPVSLSPRDIQTAALKAAHMEPTTSFSSSTSSSSSLSSTSSLESLVLVMDLSRTESEELGEIVELPSLGASYDVDSANLGNEFVFYDSVDYCLYPPPWGQSSEDNYGHGISPNFGHGLSWDL

SEQ ID NO: 79397 - DNA, 762 bp, Arabidopsis thaliana
  misc_feature (1)..(762): Ceres Seq. ID no. 12651125
  misc_feature: MA Experiment ID: 20001451 Result: Down-regulated in Transcription
  misc_feature: MA Experiment 20001451 PARAMETER Experiment Name: At_Far-red-induction_P Parameter: Age (day) Value: 7
  misc_feature: MA Experiment 20001451 PARAMETER Experiment Name: At_Far-red-induction_P Parameter: Light Value: Far-red vs. White
  misc_feature: MA Experiment 20001451 PARAMETER Experiment Name: At_Far-red-induction_P Parameter: Organism Value: A. thaliana
  misc_feature: MA Experiment 20001451 PARAMETER Experiment Name: At_Far-red-induction_P Parameter: Plant Line Value: Columbia
  misc_feature: MA Experiment 20001451 PARAMETER Experiment Name: At_Far-red-induction_P Parameter: Timepoint (hr) Value: 24
  misc_feature: MA Experiment 20001451 PARAMETER Experiment Name: At_Far-red-induction_P Parameter: Tissue Value: Whole Plant
atggagaagaaacgcgaaggagtaatcgaaggaatgagtcggatcgtatcagatccttactacttcctccatttcatggcctttttctcttacctcccgattcgtagctccgccgcaccgtacacttctcatcgactcttcgacagagaaatccaagcatttctagcgtttcttatgttttccgccattaagatggtgagggaggaaacatgggaagctttcgttgctgatagtttactctatgctaagatctttcttattgcggtttcgttgattatggattatcgagtggcggtctggtttagtatcatattttcagttatatatctattagctcaacaaccagcatttagtaaactaggaactgcgaagaagctaacacctatgcagttggaggatttgttatcagatggtaacacaacaaaatactggttgatagaattctttgcatgtagttcatccaagtgtgttcgttctagccgttgctttcctgagctctccatcacgtactcgaataatcttttgtcttttggaactgtcgatcttggacttttccctaatactgcggcaaagtttggaatatctcttgctggtggaatgtctcagcttcccacatacatattgtttgaaaagggtgtcgaagtttctcggttcccagacttttatgttgacgctgcaccttctttacccataaccaagaaacttttgtgtcaacattttgagcttgatcggcttctgctcgactatataaacggaacatag

SEQ ID NO: 79398 - protein, 253 aa, Arabidopsis thaliana
  peptide (1)..(253): Ceres Seq. ID no. 12651126
  misc_feature (1)..(253): Homolog of NCBI NO: 15239121 NR Description: putative protein; protein id: At5g11640.1
  misc_feature (16)..(251): Homolog of NCBI NO: 34903644 NR Description: B1015E06.5 [Oryza sativa (japonica
  misc_feature (15)..(219): Homolog of NCBI NO: 20130157 NR Description: CG11007-PA [Drosophila melanogaster]
  misc_feature (12)..(245): Homolog of NCBI NO: 7705726 NR Description: CGI-31 protein [Homo sapiens]
  misc_feature (12)..(245): Homolog of NCBI NO: 12001958 NR Description: My009 protein [Homo sapiens]
  misc_feature (12)..(245): Homolog of NCBI NO: 22761396 NR Description: unnamed protein product [Homo sapiens]
  misc_feature (47)..(245): Homolog of NCBI NO: 27700999 NR Description: similar to CGI-31 protein [Homo sapiens] [Rattus
  misc_feature (47)..(245): Homolog of NCBI NO: 21313210 NR Description: RIKEN cDNA 2310042M24 [Mus musculus] unnamed protein product [Mus musculus]
  misc_feature (47)..(245): Homolog of NCBI NO: 26344562 NR Description: unnamed protein product [Mus musculus]
  misc_feature (48)..(230): Homolog of NCBI NO: 39591530 NR Description: Hypothetical protein CBG17959 [Caenorhabditis
MEKKREGVIEGMSRIVSDPYYFLHFMAFFSYLPIRSSAAPYTSHRLFDREIQAFLAFLMFSAIKMVREETWEAFVADSLLYAKIFLIAVSLIMDYRVAVWFSIIFSVIYLLAQQPAFSKLGTAKKLTPMQLEDLLSDGNTTKYWLIEFFACSSSKCVRSSRCFPELSITYSNNLLSFGTVDLGLFPNTAAKFGISLAGGMSQLPTYILFEKGVEVSRFPDFYVDAAPSLPITKKLLCQHFELDRLLLDYINGT

SEQ ID NO: 79399 - protein, 242 aa, Arabidopsis thaliana
  peptide (1)..(242): Ceres Seq. ID no. 12651127
  misc_feature (1)..(242): Homolog of NCBI NO: 15239121 NR Description: putative protein; protein id: At5g11640.1
  misc_feature (5)..(240): Homolog of NCBI NO: 34903644 NR Description: B1015E06.5 [Oryza sativa (japonica
  misc_feature (4)..(208): Homolog of NCBI NO: 20130157 NR Description: CG11007-PA [Drosophila melanogaster]
  misc_feature (1)..(234): Homolog of NCBI NO: 7705726 NR Description: CGI-31 protein [Homo sapiens]
  misc_feature (1)..(234): Homolog of NCBI NO: 12001958 NR Description: My009 protein [Homo sapiens]
  misc_feature (1)..(234): Homolog of NCBI NO: 22761396 NR Description: unnamed protein product [Homo sapiens]
  misc_feature (36)..(234): Homolog of NCBI NO: 27700999 NR Description: similar to CGI-31 protein [Homo sapiens] [Rattus
  misc_feature (36)..(234): Homolog of NCBI NO: 21313210 NR Description: RIKEN cDNA 2310042M24 [Mus musculus] unnamed protein product [Mus musculus]
  misc_feature (36)..(234): Homolog of NCBI NO: 26344562 NR Description: unnamed protein product [Mus musculus]
  misc_feature (37)..(219): Homolog of NCBI NO: 39591530 NR Description: Hypothetical protein CBG17959 [Caenorhabditis
MSRIVSDPYYFLHFMAFFSYLPIRSSAAPYTSHRLFDREIQAFLAFLMFSAIKMVREETWEAFVADSLLYAKIFLIAVSLIMDYRVAVWFSIIFSVIYLLAQQPAFSKLGTAKKLTPMQLEDLLSDGNTTKYWLIEFFACSSSKCVRSSRCFPELSITYSNNLLSFGTVDLGLFPNTAAKFGISLAGGMSQLPTYILFEKGVEVSRFPDFYVDAAPSLPITKKLLCQHFELDRLLLDYINGT

SEQ ID NO: 79400 - protein, 228 aa, Arabidopsis thaliana
  peptide (1)..(228): Ceres Seq. ID no. 12651128
  misc_feature (1)..(228): Homolog of NCBI NO: 15239121 NR Description: putative protein; protein id: At5g11640.1
  misc_feature (1)..(226): Homolog of NCBI NO: 34903644 NR Description: B1015E06.5 [Oryza sativa (japonica
  misc_feature (1)..(194): Homolog of NCBI NO: 20130157 NR Description: CG11007-PA [Drosophila melanogaster]
  misc_feature (1)..(220): Homolog of NCBI NO: 7705726 NR Description: CGI-31 protein [Homo sapiens]
  misc_feature (1)..(220): Homolog of NCBI NO: 12001958 NR Description: My009 protein [Homo sapiens]
  misc_feature (1)..(220): Homolog of NCBI NO: 22761396 NR Description: unnamed protein product [Homo sapiens]
  misc_feature (22)..(220): Homolog of NCBI NO: 27700999 NR Description: similar to CGI-31 protein [Homo sapiens] [Rattus
  misc_feature (22)..(220): Homolog of NCBI NO: 21313210 NR Description: RIKEN cDNA 2310042M24 [Mus musculus] unnamed protein product [Mus musculus]
  misc_feature (22)..(220): Homolog of NCBI NO: 26344562 NR Description: unnamed protein product [Mus musculus]
  misc_feature (23)..(205): Homolog of NCBI NO: 39591530 NR Description: Hypothetical protein CBG17959 [Caenorhabditis
MAFFSYLPIRSSAAPYTSHRLFDREIQAFLAFLMFSAIKMVREETWEAFVADSLLYAKIFLIAVSLIMDYRVAVWFSIIFSVIYLLAQQPAFSKLGTAKKLTPMQLEDLLSDGNTTKYWLIEFFACSSSKCVRSSRCFPELSITYSNNLLSFGTVDLGLFPNTAAKFGISLAGGMSQLPTYILFEKGVEVSRFPDFYVDAAPSLPITKKLLCQHFELDRLLLDYINGT

SEQ ID NO: 79401 - DNA, 1015 bp, Arabidopsis thaliana
  misc_feature (1)..(1015): Ceres Seq. ID no. 12651137
  misc_feature: MA Experiment ID: 20000111 Result: Up-regulated in Transcription
  misc_feature: MA Experiment 20000111 PARAMETER Experiment Name: At_42deg_Heat_cDNA_P Parameter: Temperature (deg C) Value: 42 vs. 22
  misc_feature: MA Experiment 20000111 PARAMETER Experiment Name: At_42deg_Heat_cDNA_P Parameter: Timepoint (hr) Value: 6
  misc_feature: MA Experiment 20000111 PARAMETER Experiment Name: At_42deg_Heat_cDNA_P Parameter: Tissue Value: Aerial
  misc_feature: MA Experiment ID: 20000113 Result: Up-regulated in Transcription
  misc_feature: MA Experiment 20000113 PARAMETER Experiment Name: At_42deg_Heat_cDNA_P Parameter: Temperature (deg C) Value: 42 vs. 22
  misc_feature: MA Experiment 20000113 PARAMETER Experiment Name: At_42deg_Heat_cDNA_P Parameter: Timepoint (hr) Value: 8
  misc_feature: MA Experiment 20000113 PARAMETER Experiment Name: At_42deg_Heat_cDNA_P Parameter: Tissue Value: Aerial
  misc_feature: MA Experiment ID: 20001911 Result: Up-regulated in Transcription
  misc_feature: MA Experiment 20001911 PARAMETER Experiment Name: At_Drought_Reproduction_P Parameter: Age (day) Value: 40
  misc_feature: MA Experiment 20001911 PARAMETER Experiment Name: At_Drought_Reproduction_P Parameter: Organism Value: A. thaliana
  misc_feature: MA Experiment 20001911 PARAMETER Experiment Name: At_Drought_Reproduction_P Parameter: Plant Line Value: WS
  misc_feature: MA Experiment 20001911 PARAMETER Experiment Name: At_Drought_Reproduction_P Parameter: Timepoint (day) Value: 10
  misc_feature: MA Experiment 20001911 PARAMETER Experiment Name: At_Drought_Reproduction_P Parameter: Tissue Value: Flowers
  misc_feature: MA Experiment 20001911 PARAMETER Experiment Name: At_Drought_Reproduction_P Parameter: Treatment Value: Drought vs. No Drought
ggttagagactcgtttggttatcacaactccacgacgagaggaaaaaaaaaactcagagagacaaatctaaatggcgatgattacgcgcaacaccgccacgcgcctccctctcctcctccaatctcaacgcgccgtcgccgctgcctcggtctctcacctccacacatcccttcccgctctctctccctccacatcaccgacttcctacaccagacctggtcctccttcgacctcccctcctcctcctggtctctctaaagcggccgaatttgtgatctccaaggtcgatgatctcatgaactgggctcgtaccggatcgatctggcctatgacctttggtctcgcttgctgcgccgtcgaaatgatgcataccggtgctgctcgctacgatctcgatcgattcggtatcatcttcaggcctagtcctcgccagtctgattgtatgattgtcgccggtactcttaccaataagatggctccggctcttcgcaaggtttatgaccagatgcctgagccaaggtgggtgatttcaatgggaagttgtgccaatggaggtggatactatcactactcctactcggtggttcgaggatgtgacagaattgtcccagtcgacatatacgtcccggggtgcccaccaaccgctgaggctttgctctatggactactccagcttcagaagaaaatcaacaggcgcaaggatttcttgcattggtggaacaagtgagcttcgaacccgtcctccaatcgtgaaagggacttttttcagacatttttaccaaagtttggggataataaatcgtggacgtttcattgcatatttctttgtggtggagatgccatgtaaaggagtgtgtttctaagtttgttgtggaaacttaataaacttaagatgtttgttgtctgagttcttttatgggctcttttattatatatctctctctaccagttttcagctacatgctgactattgctaaatacctacatatatttatacatacgagtgtgttttgt

SEQ ID NO: 79402 - protein, 218 aa, Arabidopsis thaliana; identical to SEQ ID NO: 29128
  peptide (1)..(218): Ceres Seq. ID no. 12651138
  misc_feature (96)..(203): Pfam Name: NADH ubiquinone oxidoreductase, 20 Kd subunit Pfam Description: NADH ubiquinone oxidoreductase, 20 Kd subunit
  misc_feature (1)..(218): Homolog of NCBI NO: 15239782 NR Description: NADH dehydrogenase (ubiquinone); protein id: supported by cDNA: 13161., supported by cDNA: gi_15810286,
  misc_feature (1)..(218): Homolog of NCBI NO: 1171866 NR Description: NADH-ubiquinone oxidoreductase 20 kDa subunit,
  misc_feature (1)..(218): Homolog of NCBI NO: 11277624 NR Description: NADH2 dehydrogenase (ubiquinone) (EC 1.6.5.3)
  misc_feature (1)..(218): Homolog of NCBI NO: 9652180 NR Description: NADH-ubiquinone oxidoreductase subunit PSST
  misc_feature (30)..(218): Homolog of NCBI NO: 9652190 NR Description: NADH-ubiquinone oxidoreductase subunit PSST
  misc_feature (1)..(218): Homolog of NCBI NO: 2499328 NR Description: NADH-ubiquinone oxidoreductase 20 kDa subunit,
  misc_feature (33)..(218): Homolog of NCBI NO: 34910678 NR Description: putative NADH dehydrogenase (ubiquinone) chain
  misc_feature (9)..(218): Homolog of NCBI NO: 1171865 NR Description: NADH-ubiquinone oxidoreductase 20 kDa subunit,
  misc_feature (58)..(218): Homolog of NCBI NO: 34328788 NR Description: NADH:ubiquinone oxidoreductase subunit 10;
  misc_feature (20)..(218): Homolog of NCBI NO: 34862315 NR Description: similar to NADH dehydrogenase (ubiquinone) Fe-S

SEQ ID NO: 79403 - protein, 216 aa, Arabidopsis thaliana; identical to SEQ ID NO: 29129
  peptide (1)..(216): Ceres Seq. ID no. 12651139
  misc_feature (94)..(201): Pfam Name: NADH ubiquinone oxidoreductase, 20 Kd subunit Pfam Description: NADH ubiquinone oxidoreductase, 20 Kd subunit
  misc_feature (1)..(216): Homolog of NCBI NO: 15239782 NR Description: NADH dehydrogenase (ubiquinone); protein id: supported by cDNA: 13161., supported by cDNA: gi_15810286,
  misc_feature (1)..(216): Homolog of NCBI NO: 1171866 NR Description: NADH-ubiquinone oxidoreductase 20 kDa subunit,
  misc_feature (1)..(216): Homolog of NCBI NO: 11277624 NR Description: NADH2 dehydrogenase (ubiquinone) (EC 1.6.5.3)
  misc_feature (1)..(216): Homolog of NCBI NO: 9652180 NR Description: NADH-ubiquinone oxidoreductase subunit PSST
  misc_feature (28)..(216): Homolog of NCBI NO: 9652190 NR Description: NADH-ubiquinone oxidoreductase subunit PSST
  misc_feature (1)..(216): Homolog of NCBI NO: 2499328 NR Description: NADH-ubiquinone oxidoreductase 20 kDa subunit,
  misc_feature (31)..(216): Homolog of NCBI NO: 34910678 NR Description: putative NADH dehydrogenase (ubiquinone) chain
  misc_feature (7)..(216): Homolog of NCBI NO: 1171865 NR Description: NADH-ubiquinone oxidoreductase 20 kDa subunit,
  misc_feature (56)..(216): Homolog of NCBI NO: 34328788 NR Description: NADH:ubiquinone oxidoreductase subunit 10;
  misc_feature (18)..(216): Homolog of NCBI NO: 34862315 NR Description: similar to NADH dehydrogenase (ubiquinone) Fe-S

SEQ ID NO: 79404 - protein, 143 aa, Arabidopsis thaliana; identical to SEQ ID NO: 29130
  peptide (1)..(143): Ceres Seq. ID no. 12651140
  misc_feature (21)..(128): Pfam Name: NADH ubiquinone oxidoreductase, 20 Kd subunit Pfam Description: NADH ubiquinone oxidoreductase, 20 Kd subunit
  misc_feature (1)..(143): Homolog of NCBI NO: 15239782 NR Description: NADH dehydrogenase (ubiquinone); protein id: supported by cDNA: 13161., supported by cDNA: gi_15810286,
  misc_feature (1)..(143): Homolog of NCBI NO: 1171866 NR Description: NADH-ubiquinone oxidoreductase 20 kDa subunit,
  misc_feature (1)..(143): Homolog of NCBI NO: 11277624 NR Description: NADH2 dehydrogenase (ubiquinone) (EC 1.6.5.3)
  misc_feature (1)..(143): Homolog of NCBI NO: 9652180 NR Description: NADH-ubiquinone oxidoreductase subunit PSST
  misc_feature (1)..(143): Homolog of NCBI NO: 9652190 NR Description: NADH-ubiquinone oxidoreductase subunit PSST
  misc_feature (1)..(143): Homolog of NCBI NO: 2499328 NR Description: NADH-ubiquinone oxidoreductase 20 kDa subunit,
  misc_feature (1)..(143): Homolog of NCBI NO: 34910678 NR Description: putative NADH dehydrogenase (ubiquinone) chain
  misc_feature (1)..(143): Homolog of NCBI NO: 1171865 NR Description: NADH-ubiquinone oxidoreductase 20 kDa subunit,
  misc_feature (1)..(143): Homolog of NCBI NO: 34328788 NR Description: NADH:ubiquinone oxidoreductase subunit 10;
  misc_feature (1)..(143): Homolog of NCBI NO: 34862315 NR Description: similar to NADH dehydrogenase (ubiquinone) Fe-S

SEQ ID NO: 79405 - DNA, 2971 bp, Arabidopsis thaliana
  misc_feature (1)..(2971): Ceres Seq. ID no. 12651160
  misc_feature: MA Experiment ID: 20000180 Result: Up-regulated in Transcription
  misc_feature: MA Experiment 20000180 PARAMETER Experiment Name: At_Germinating_Seeds_P Parameter: Age (hr) Value: 24 vs. 0
  misc_feature: MA Experiment 20000180 PARAMETER Experiment Name: At_Germinating_Seeds_P Parameter: Tissue Value: Germinating Seeds
  misc_feature: MA Experiment ID: 20000184 Result: Down-regulated in Transcription
  misc_feature: MA Experiment 20000184 PARAMETER Experiment Name: At_Shoots__P Parameter: Age (day) Value: 7
  misc_feature: MA Experiment 20000184 PARAMETER Experiment Name: At_Shoots__P Parameter: Tissue Value: Shoots vs. Whole Plant
  misc_feature: MA Experiment ID: 20000185 Result: Up-regulated in Transcription
  misc_feature: MA Experiment 20000185 PARAMETER Experiment Name: At_Roots__P Parameter: Age (day) Value: 7 vs. 21
  misc_feature: MA Experiment 20000185 PARAMETER Experiment Name: At_Roots__P Parameter: Organism Value: A. thaliana
  misc_feature: MA Experiment 20000185 PARAMETER Experiment Name: At_Roots__P Parameter: Tissue Value: Roots vs. Whole Plant
  misc_feature: MA Experiment ID: 20000439 Result: Up-regulated in Transcription
  misc_feature: MA Experiment 20000439 PARAMETER Experiment Name: At_Roots__P Parameter: Age (day) Value: 14 vs. 21
  misc_feature: MA Experiment 20000439 PARAMETER Experiment Name: At_Roots__P Parameter: Organism Value: A. thaliana
  misc_feature: MA Experiment 20000439 PARAMETER Experiment Name: At_Roots__P Parameter: Tissue Value: Roots vs. Whole Plant
  misc_feature: MA Experiment ID: 20000794 Result: Up-regulated in Transcription
  misc_feature: MA Experiment 20000794 PARAMETER Experiment Name: At_Petals_P Parameter: Age (day) Value: 23-25 days
  misc_feature: MA Experiment 20000794 PARAMETER Experiment Name: At_Petals_P Parameter: Plant Line Value: WS
  misc_feature: MA Experiment 20000794 PARAMETER Experiment Name: At_Petals_P Parameter: Tissue Value: Petals vs. Whole plant
  misc_feature: MA Experiment ID: 20001451 Result: Down-regulated in Transcription
  misc_feature: MA Experiment 20001451 PARAMETER Experiment Name: At_Far-red-induction_P Parameter: Age (day) Value: 7
  misc_feature: MA Experiment 20001451 PARAMETER Experiment Name: At_Far-red-induction_P Parameter: Light Value: Far-red vs. White
  misc_feature: MA Experiment 20001451 PARAMETER Experiment Name: At_Far-red-induction_P Parameter: Organism Value: A. thaliana
  misc_feature: MA Experiment 20001451 PARAMETER Experiment Name: At_Far-red-induction_P Parameter: Plant Line Value: Columbia
  misc_feature: MA Experiment 20001451 PARAMETER Experiment Name: At_Far-red-induction_P Parameter: Timepoint (hr) Value: 24
  misc_feature: MA Experiment 20001451 PARAMETER Experiment Name: At_Far-red-induction_P Parameter: Tissue Value: Whole Plant
agagagagaaagaaatagagagagagatcagttcgtcgttgacgatcgatgtcgaagatgaagcatcttctacggaagctccacatcggcggaagtagtggcgtcggcggcggatttgctgaccatcacaggttagacgactcgactagacctatgatcgatcctagccctattcttagtactagccctagccctgcatcgacttcttccgtctcttcctctggttttggtaacgcttccacgacaatgccgagactggatacatttgagcctgttggccgtgatctgacggctgttgatggtgttgatttcaatttgatggaggaggagtaccaagtccagttagctatggcgatcagcgtctctgatcctgatccgagagagaatgcagatacagctcagcttgatgccgctaagaggattagccttggggtttctgctccggtcaccgacgctgattccgccgttgactttctctcgcttcgttattggggacataaggtcattaattatgaccagaaagtcagggatggattttacgatgtgtatgggattacatctaattctctttcacaggggaagatgccacttcttgttgatcttcaagcgatctctatttcagataatgttgattatgaggtcattctagttaacagattgattgatcctgaactacaagagctagagaggagagtattcgctttggcttcggaatgtccagactttgctcctggtcaggtgtcaagtgatttgactcagaaaattgcaaatatagttgtagagcaaatgggtggccccgttgaaaatgctgatgaagcattgagaaggtggatgcttcggagctatgaactaagaaattctttgaacactactattcttccacttggtcgagttaatgttggtcttgcacgacacagggctttgcttttcaaggtccttgctgataggattaatctcccatgtatgctggtaaaaggcagttactacactggaactgatgatggggctgtgaacttgattaaactagatgacaaaagtgaatacattattgatttaatgggtgctccgggtgctctgatcccttctgaggttccaagcagttttcttccagtttcttgcacagatacaagagtatttcctgagaatttggactctttgcaacattcatcccccgtacttgagaaagaaattgaaacgccagcattttcagtttcgaaggaagcagattctagatctggtatggtagcaaacttcttcactggaaaccaggaagaaaacagtgacagatgtgctgttgaaaaacatcaaacagagagatttgagcatgattttgggaagttaatgcactcacagcagatatctggtgaaaatatgccaccattttctgggaaaccgacttgtgcacagaaagttaaagttaaaaatgtctcaaagtatgtcataagtgcagcaaagaaccctgaatttgcgcagaaattacatgctgtgttgttagaaagtggtgcatcacctcccccagatttgtttatggatattaacccacataacttgagggggaagaatttgcttcaagagctccgccaagaaagtagcaattctatggtttctggtattccatgctacccagaaaaggtagctgaacaactgagagaatctgaaaggaaccccacagccgagagttaccaacaatcagtggaggtcgatttgtcaatgaagaggaactttgatttggataatactggtaaagcttcttcatccgaaaatatggaggttggcactgctgatggggagtctgctgtttgtgatagtcatgaccaagggattaatccattgctcggagaagctgcaaagtgggaaattatgtgggaagatcttcagattggcgagcgcattggtattggttcatatggagaagtttatcgtgcagagtggaatggaactgaagtggctgttaagaagtttctggaccaagatttctctggtgatgcattgacacagttcaaatctgaaattgaaataatgttgaggttacggcatccaaacgttgttcttttcatgggagcagttactcgtcccccaaatttctccatcctgacagagttcctacccaggggaagtttgtatagattactccatcggccgaaccatcagcttgatgagaagaggagaatgcggatggctcttgatgtggcaaagggaatgaactacttacacaccagccacccgactgttgtacatagggatttaaaatctccaaaccttcttgttgataaaaattgggttgtgaaggtttgtgattttggattgtcccgcatgaaacaccacacatatttgtcctcgaaatcaactgcaggaacgcctgagtggatggctccagaagtgttgaggaatgaaccggctaatgagaaatgtgacgtgtacagctttggtgtcatattgtgggaattagctacttcacgcgtcccctggaaaggtttgaacccgatgcaagtcgttggagctgtgggattccagaatcgacgccttgaaatcccagatgatatcgatctaactgtggcacagataatccgtgaatgttggcaaacggaaccgcatttacggccatcgtttacacagctgatgcaaagtttgaagcggcttcagggtctaaacataagcaacagagcgaatacgagtgaaagtttgatgtaagatacgttagacagaagatgttgccttacctggtctggttcaaagagccaacgggtggggattgccattcttctttgcttttttttgttctttttgttattacggtcagacgagaggagacaaacaaaaaaagattgatgggttggggaaaagcttgtggagttcaatcgaagtgggagctcaacaagaaaagaaaaagccctattcttaaccctttgtaactattattattatcatcattgttgttgctacttgtaacgataaaattaggtgaatgaac

SEQ ID NO: 79406 - protein, 880 aa, Arabidopsis thaliana
  peptide (1)..(880): Ceres Seq. ID no. 12651161
  misc_feature (609)..(861): Pfam Name: Protein kinase domain Pfam Description: Protein kinase domain
  misc_feature (476)..(880): Homolog of NCBI NO: 25387032 NR Description: probable mitogen-activated protein kinase MAP3K
  misc_feature (4)..(501): Homolog of NCBI NO: 15219517 NR Description: putative protein kinase; protein id: At1g73660.1, by cDNA: gi_20466321 [Arabidopsis thaliana]
  misc_feature (4)..(501): Homolog of NCBI NO: 20466322 NR Description: putative protein kinase [Arabidopsis thaliana]
  misc_feature (563)..(879): Homolog of NCBI NO: 15219517 NR Description: putative protein kinase; protein id: At1g73660.1, by cDNA: gi_20466321 [Arabidopsis thaliana]
  misc_feature (563)..(879): Homolog of NCBI NO: 20466322 NR Description: putative protein kinase [Arabidopsis thaliana]
  misc_feature (1)..(515): Homolog of NCBI NO: 32527767 NR Description: shoot regeneration-related mitogen activated
  misc_feature (596)..(880): Homolog of NCBI NO: 32527767 NR Description: shoot regeneration-related mitogen activated
  misc_feature (24)..(514): Homolog of NCBI NO: 22329643 NR Description: MAP kinase, putative; protein id: At1g18160.1,
  misc_feature (554)..(865): Homolog of NCBI NO: 22329643 NR Description: MAP kinase, putative; protein id: At1g18160.1,
  misc_feature (24)..(514): Homolog of NCBI NO: 20466652 NR Description: MAP kinase, putative [Arabidopsis thaliana]
MSKMKHLLRKLHIGGSSGVGGGFADHHRLDDSTRPMIDPSPILSTSPSPASTSSVSSSGFGNASTTMPRLDTFEPVGRDLTAVDGVDFNLMEEEYQVQLAMAISVSDPDPRENADTAQLDAAKRISLGVSAPVTDADSAVDFLSLRYWGHKVINYDQKVRDGFYDVYGITSNSLSQGKMPLLVDLQAISISDNVDYEVILVNRLIDPELQELERRVFALASECPDFAPGQVSSDLTQKIANIVVEQMGGPVENADEALRRWMLRSYELRNSLNTTILPLGRVNVGLARHRALLFKVLADRINLPCMLVKGSYYTGTDDGAVNLIKLDDKSEYIIDLMGAPGALIPSEVPSSFLPVSCTDTRVFPENLDSLQHSSPVLEKEIETPAFSVSKEADSRSGMVANFFTGNQEENSDRCAVEKHQTERFEHDFGKLMHSQQISGENMPPFSGKPTCAQKVKVKNVSKYVISAAKNPEFAQKLHAVLLESGASPPPDLFMDINPHNLRGKNLLQELRQESSNSMVSGIPCYPEKVAEQLRESERNPTAESYQQSVEVDLSMKRNFDLDNTGKASSSENMEVGTADGESAVCDSHDQGINPLLGEAAKWEIMWEDLQIGERIGIGSYGEVYRAEWNGTEVAVKKFLDQDFSGDALTQFKSEIEIMLRLRHPNVVLFMGAVTRPPNFSILTEFLPRGSLYRLLHRPNHQLDEKRRMRMALDVAKGMNYLHTSHPTVVHRDLKSPNLLVDKNWVVKVCDFGLSRMKHHTYLSSKSTAGTPEWMAPEVLRNEPANEKCDVYSFGVILWELATSRVPWKGLNPMQVVGAVGFQNRRLEIPDDIDLTVAQIIRECWQTEPHLRPSFTQLMQSLKRLQGLNISNRANTSESLM

SEQ ID NO: 79407 - protein, 877 aa, Arabidopsis thaliana
  peptide (1)..(877): Ceres Seq. ID no. 12651162
  misc_feature (606)..(858): Pfam Name: Protein kinase domain Pfam Description: Protein kinase domain
  misc_feature (473)..(877): Homolog of NCBI NO: 25387032 NR Description: probable mitogen-activated protein kinase MAP3K
  misc_feature (1)..(498): Homolog of NCBI NO: 15219517 NR Description: putative protein kinase; protein id: At1g73660.1, by cDNA: gi_20466321 [Arabidopsis thaliana]
  misc_feature (1)..(498): Homolog of NCBI NO: 20466322 NR Description: putative protein kinase [Arabidopsis thaliana]
  misc_feature (560)..(876): Homolog of NCBI NO: 15219517 NR Description: putative protein kinase; protein id: At1g73660.1, by cDNA: gi_20466321 [Arabidopsis thaliana]
  misc_feature (560)..(876): Homolog of NCBI NO: 20466322 NR Description: putative protein kinase [Arabidopsis thaliana]
  misc_feature (1)..(512): Homolog of NCBI NO: 32527767 NR Description: shoot regeneration-related mitogen activated
  misc_feature (593)..(877): Homolog of NCBI NO: 32527767 NR Description: shoot regeneration-related mitogen activated
  misc_feature (21)..(511): Homolog of NCBI NO: 22329643 NR Description: MAP kinase, putative; protein id: At1g18160.1,
  misc_feature (551)..(862): Homolog of NCBI NO: 22329643 NR Description: MAP kinase, putative; protein id: At1g18160.1,
  misc_feature (21)..(511): Homolog of NCBI NO: 20466652 NR Description: MAP kinase, putative [Arabidopsis thaliana]
MKHLLRKLHIGGSSGVGGGFADHHRLDDSTRPMIDPSPILSTSPSPASTSSVSSSGFGNASTTMPRLDTFEPVGRDLTAVDGVDFNLMEEEYQVQLAMAISVSDPDPRENADTAQLDAAKRISLGVSAPVTDADSAVDFLSLRYWGHKVINYDQKVRDGFYDVYGITSNSLSQGKMPLLVDLQAISISDNVDYEVILVNRLIDPELQELERRVFALASECPDFAPGQVSSDLTQKIANIVVEQMGGPVENADEALRRWMLRSYELRNSLNTTILPLGRVNVGLARHRALLFKVLADRINLPCMLVKGSYYTGTDDGAVNLIKLDDKSEYIIDLMGAPGALIPSEVPSSFLPVSCTDTRVFPENLDSLQHSSPVLEKEIETPAFSVSKEADSRSGMVANFFTGNQEENSDRCAVEKHQTERFEHDFGKLMHSQQISGENMPPFSGKPTCAQKVKVKNVSKYVISAAKNPEFAQKLHAVLLESGASPPPDLFMDINPHNLRGKNLLQELRQESSNSMVSGIPCYPEKVAEQLRESERNPTAESYQQSVEVDLSMKRNFDLDNTGKASSSENMEVGTADGESAVCDSHDQGINPLLGEAAKWEIMWEDLQIGERIGIGSYGEVYRAEWNGTEVAVKKFLDQDFSGDALTQFKSEIEIMLRLRHPNVVLFMGAVTRPPNFSILTEFLPRGSLYRLLHRPNHQLDEKRRMRMALDVAKGMNYLHTSHPTVVHRDLKSPNLLVDKNWVVKVCDFGLSRMKHHTYLSSKSTAGTPEWMAPEVLRNEPANEKCDVYSFGVILWELATSRVPWKGLNPMQVVGAVGFQNRRLEIPDDIDLTVAQIIRECWQTEPHLRPSFTQLMQSLKRLQGLNISNRANTSESLM

SEQ ID NO: 79408 - protein, 845 aa, Arabidopsis thaliana
  peptide (1)..(845): Ceres Seq. ID no. 12651163
  misc_feature (574)..(826): Pfam Name: Protein kinase domain Pfam Description: Protein kinase domain
  misc_feature (441)..(845): Homolog of NCBI NO: 25387032 NR Description: probable mitogen-activated protein kinase MAP3K
  misc_feature (1)..(466): Homolog of NCBI NO: 15219517 NR Description: putative protein kinase; protein id: At1g73660.1, by cDNA: gi_20466321 [Arabidopsis thaliana]
  misc_feature (1)..(466): Homolog of NCBI NO: 20466322 NR Description: putative protein kinase [Arabidopsis thaliana]
  misc_feature (528)..(844): Homolog of NCBI NO: 15219517 NR Description: putative protein kinase; protein id: At1g73660.1, by cDNA: gi_20466321 [Arabidopsis thaliana]
  misc_feature (528)..(844): Homolog of NCBI NO: 20466322 NR Description: putative protein kinase [Arabidopsis thaliana]
  misc_feature (1)..(480): Homolog of NCBI NO: 32527767 NR Description: shoot regeneration-related mitogen activated
  misc_feature (561)..(845): Homolog of NCBI NO: 32527767 NR Description: shoot regeneration-related mitogen activated
  misc_feature (1)..(479): Homolog of NCBI NO: 22329643 NR Description: MAP kinase, putative; protein id: At1g18160.1,
  misc_feature (519)..(830): Homolog of NCBI NO: 22329643 NR Description: MAP kinase, putative; protein id: At1g18160.1,
  misc_feature (1)..(479): Homolog of NCBI NO: 20466652 NR Description: MAP kinase, putative [Arabidopsis thaliana]
MIDPSPILSTSPSPASTSSVSSSGFGNASTTMPRLDTFEPVGRDLTAVDGVDFNLMEEEYQVQLAMAISVSDPDPRENADTAQLDAAKRISLGVSAPVTDADSAVDFLSLRYWGHKVINYDQKVRDGFYDVYGITSNSLSQGKMPLLVDLQAISISDNVDYEVILVNRLIDPELQELERRVFALASECPDFAPGQVSSDLTQKIANIVVEQMGGPVENADEALRRWMLRSYELRNSLNTTILPLGRVNVGLARHRALLFKVLADRINLPCMLVKGSYYTGTDDGAVNLIKLDDKSEYIIDLMGAPGALIPSEVPSSFLPVSCTDTRVFPENLDSLQHSSPVLEKEIETPAFSVSKEADSRSGMVANFFTGNQEENSDRCAVEKHQTERFEHDFGKLMHSQQISGENMPPFSGKPTCAQKVKVKNVSKYVISAAKNPEFAQKLHAVLLESGASPPPDLFMDINPHNLRGKNLLQELRQESSNSMVSGIPCYPEKVAEQLRESERNPTAESYQQSVEVDLSMKRNFDLDNTGKASSSENMEVGTADGESAVCDSHDQGINPLLGEAAKWEIMWEDLQIGERIGIGSYGEVYRAEWNGTEVAVKKFLDQDFSGDALTQFKSEIEIMLRLRHPNVVLFMGAVTRPPNFSILTEFLPRGSLYRLLHRPNHQLDEKRRMRMALDVAKGMNYLHTSHPTVVHRDLKSPNLLVDKNWVVKVCDFGLSRMKHHTYLSSKSTAGTPEWMAPEVLRNEPANEKCDVYSFGVILWELATSRVPWKGLNPMQVVGAVGFQNRRLEIPDDIDLTVAQIIRECWQTEPHLRPSFTQLMQSLKRLQGLNISNRANTSESLM

SEQ ID NO: 79409 - DNA, 789 bp, Arabidopsis thaliana
  misc_feature (1)..(789): Ceres Seq. ID no. 12651164
  misc_feature: MA Experiment ID: 20000185 Result: Up-regulated in Transcription
  misc_feature: MA Experiment 20000185 PARAMETER Experiment Name: At_Roots__P Parameter: Age (day) Value: 7 vs. 21
  misc_feature: MA Experiment 20000185 PARAMETER Experiment Name: At_Roots__P Parameter: Organism Value: A. thaliana
  misc_feature: MA Experiment 20000185 PARAMETER Experiment Name: At_Roots__P Parameter: Tissue Value: Roots vs. Whole Plant
  misc_feature: MA Experiment ID: 20000439 Result: Up-regulated in Transcription
  misc_feature: MA Experiment 20000439 PARAMETER Experiment Name: At_Roots__P Parameter: Age (day) Value: 14 vs. 21
  misc_feature: MA Experiment 20000439 PARAMETER Experiment Name: At_Roots__P Parameter: Organism Value: A. thaliana
  misc_feature: MA Experiment 20000439 PARAMETER Experiment Name: At_Roots__P Parameter: Tissue Value: Roots vs. Whole Plant
atggtgtggttgacgaatcaacagatagggagatggaaaaggaaacgaattttggttgtgggatcgttcctctgttggtcaatcatcatgttcatcactcccaaagttcctctcgattcatttcgccatcatatcttcgccgataaacgcaatttcatgggagtgcctaatacattgaatgtgatgaccaactttccctttcttatcgttggagttcttggttttgttctttgcattggaggaagcttcttcaacataagtttaaatggtgagatctggggatggacactgttctacgcaggcattgcaagcttggcttttggttctgctttttatcatctcaaacctgatgacaacagaatcgtctgggacactttgcctatattgattgcgtattcgtcgcttttctctagttttttggttgagagagcgggggagaaagtgggacttagttgcctcatcttgcttctatttatatcatgtctcagtgttgcttacgccagagtgtttaatgatctccggttatgcatgacgttccagttgataccgtgtctggtgattcccgtcatggcggttttgttacctcccaaatatacacactctagattctggctctgggcaacagcggcgtacactattgccaagattgaaggacttgcagacaacaaaatatacaatgcaaatcgatatatcatcagtgggcattcactggagcatttgtgttctgccgtggctacgcttttacttaccattatgcttttgtatagaagcattcggtttaataggtaa

SEQ ID NO: 79410 - protein, 262 aa, Arabidopsis thaliana
  peptide (1)..(262): Ceres Seq. ID no. 12651165
  misc_feature (1)..(262): Homolog of NCBI NO: 15239801 NR Description: putative protein; protein id: At5g11870.1
  misc_feature (13)..(262): Homolog of NCBI NO: 15223970 NR Description: unknown protein; protein id: At1g71190.1
  misc_feature (13)..(262): Homolog of NCBI NO: 34905818 NR Description: P0483G10.13 [Oryza sativa (japonica
  misc_feature (17)..(249): Homolog of NCBI NO: 29653854 NR Description: membrane protein, putative [Coxiella burnetii RSA >gi|29541117|gb|AAO90060.1| membrane protein, putative [Coxiella
  misc_feature (149)..(259): Homolog of NCBI NO: 34903592 NR Description: P0419B01.9 [Oryza sativa (japonica
  misc_feature (16)..(256): Homolog of NCBI NO: 23029224 NR Description: hypothetical protein [Microbulbifer degradans
  misc_feature (14)..(245): Homolog of NCBI NO: 27376099 NR Description: blr0988 [Bradyrhizobium japonicum]
  misc_feature (11)..(97): Homolog of NCBI NO: 34903592 NR Description: P0419B01.9 [Oryza sativa (japonica
MVWLTNQQIGRWKRKRILVVGSFLCWSIIMFITPKVPLDSFRHHIFADKRNFMGVPNTLNVMTNFPFLIVGVLGFVLCIGGSFFNISLNGEIWGWTLFYAGIASLAFGSAFYHLKPDDNRIVWDTLPILIAYSSLFSSFLVERAGEKVGLSCLILLLFISCLSVAYARVFNDLRLCMTFQLIPCLVIPVMAVLLPPKYTHSRFWLWATAAYTIAKIEGLADNKIYNANRYIISGHSLEHLCSAVATLLLTIMLLYRSIRFNR

SEQ ID NO: 79411 - protein, 233 aa, Arabidopsis thaliana
  peptide (1)..(233): Ceres Seq. ID no. 12651166
  misc_feature (1)..(233): Homolog of NCBI NO: 15239801 NR Description: putative protein; protein id: At5g11870.1
  misc_feature (1)..(233): Homolog of NCBI NO: 15223970 NR Description: unknown protein; protein id: At1g71190.1
  misc_feature (1)..(233): Homolog of NCBI NO: 34905818 NR Description: P0483G10.13 [Oryza sativa (japonica
  misc_feature (1)..(220): Homolog of NCBI NO: 29653854 NR Description: membrane protein, putative [Coxiella burnetii RSA >gi|29541117|gb|AAO90060.1| membrane protein, putative [Coxiella
  misc_feature (120)..(230): Homolog of NCBI NO: 34903592 NR Description: P0419B01.9 [Oryza sativa (japonica
  misc_feature (1)..(227): Homolog of NCBI NO: 23029224 NR Description: hypothetical protein [Microbulbifer degradans
  misc_feature (1)..(216): Homolog of NCBI NO: 27376099 NR Description: blr0988 [Bradyrhizobium japonicum]
  misc_feature (1)..(68): Homolog of NCBI NO: 34903592 NR Description: P0419B01.9 [Oryza sativa (japonica
MFITPKVPLDSFRHHIFADKRNFMGVPNTLNVMTNFPFLIVGVLGFVLCIGGSFFNISLNGEIWGWTLFYAGIASLAFGSAFYHLKPDDNRIVWDTLPILIAYSSLFSSFLVERAGEKVGLSCLILLLFISCLSVAYARVFNDLRLCMTFQLIPCLVIPVMAVLLPPKYTHSRFWLWATAAYTIAKIEGLADNKIYNANRYIISGHSLEHLCSAVATLLLTIMLLYRSIRFNR

SEQ ID NO: 79412 - protein, 210 aa, Arabidopsis thaliana
  peptide (1)..(210): Ceres Seq. ID no. 12651167
  misc_feature (1)..(210): Homolog of NCBI NO: 15239801 NR Description: putative protein; protein id: At5g11870.1
  misc_feature (1)..(210): Homolog of NCBI NO: 15223970 NR Description: unknown protein; protein id: At1g71190.1
  misc_feature (1)..(210): Homolog of NCBI NO: 34905818 NR Description: P0483G10.13 [Oryza sativa (japonica
  misc_feature (1)..(197): Homolog of NCBI NO: 29653854 NR Description: membrane protein, putative [Coxiella burnetii RSA >gi|29541117|gb|AAO90060.1| membrane protein, putative [Coxiella
  misc_feature (97)..(207): Homolog of NCBI NO: 34903592 NR Description: P0419B01.9 [Oryza sativa (japonica
  misc_feature (1)..(204): Homolog of NCBI NO: 23029224 NR Description: hypothetical protein [Microbulbifer degradans
  misc_feature (1)..(193): Homolog of NCBI NO: 27376099 NR Description: blr0988 [Bradyrhizobium japonicum]
  misc_feature (1)..(45): Homolog of NCBI NO: 34903592 NR Description: P0419B01.9 [Oryza sativa (japonica
MGVPNTLNVMTNFPFLIVGVLGFVLCIGGSFFNISLNGEIWGWTLFYAGIASLAFGSAFYHLKPDDNRIVWDTLPILIAYSSLFSSFLVERAGEKVGLSCLILLLFISCLSVAYARVFNDLRLCMTFQLIPCLVIPVMAVLLPPKYTHSRFWLWATAAYTIAKIEGLADNKIYNANRYIISGHSLEHLCSAVATLLLTIMLLYRSIRFNR

SEQ ID NO: 79413 - DNA, 1916 bp, Arabidopsis thaliana
  misc_feature (1)..(1916): Ceres Seq. ID no. 12651168
  misc_feature: MA Experiment ID: 20000182 Result: Up-regulated in Transcription
  misc_feature: MA Experiment 20000182 PARAMETER Experiment Name: At_2mM_SA_P Parameter: Age (day) Value: 14
  misc_feature: MA Experiment 20000182 PARAMETER Experiment Name: At_2mM_SA_P Parameter: Organism Value: A. thaliana
  misc_feature: MA Experiment 20000182 PARAMETER Experiment Name: At_2mM_SA_P Parameter: Plant Line Value: WS
  misc_feature: MA Experiment 20000182 PARAMETER Experiment Name: At_2mM_SA_P Parameter: Timepoint (hr) Value: 6
  misc_feature: MA Experiment 20000182 PARAMETER Experiment Name: At_2mM_SA_P Parameter: Tissue Value: Aerial
  misc_feature: MA Experiment 20000182 PARAMETER Experiment Name: At_2mM_SA_P Parameter: Treatment Value: 2mM SA vs. No Treatment
  misc_feature: MA Experiment ID: 20000184 Result: Down-regulated in Transcription
  misc_feature: MA Experiment 20000184 PARAMETER Experiment Name: At_Shoots__P Parameter: Age (day) Value: 7
  misc_feature: MA Experiment 20000184 PARAMETER Experiment Name: At_Shoots__P Parameter: Tissue Value: Shoots vs. Whole Plant
  misc_feature: MA Experiment ID: 20000227 Result: Down-regulated in Transcription
  misc_feature: MA Experiment 20000227 PARAMETER Experiment Name: At_Root-Tips-vs-Tops_P Parameter: Tissue Value: Root Tips vs. Root Tops
  misc_feature: MA Experiment ID: 20000234 Result: Down-regulated in Transcription
  misc_feature: MA Experiment 20000234 PARAMETER Experiment Name: At_Siliques_P Parameter: Age (day) Value: 21
  misc_feature: MA Experiment 20000234 PARAMETER Experiment Name: At_Siliques_P Parameter: Organism Value: A. thaliana
  misc_feature: MA Experiment 20000234 PARAMETER Experiment Name: At_Siliques_P Parameter: Plant Line Value: WS
  misc_feature: MA Experiment 20000234 PARAMETER Experiment Name: At_Siliques_P Parameter: Tissue Value: Less Than 5mm Siliques vs. Whole Plant
  misc_feature: MA Experiment ID: 20000235 Result: Down-regulated in Transcription
  misc_feature: MA Experiment 20000235 PARAMETER Experiment Name: At_Siliques_P Parameter: Age (day) Value: 21
  misc_feature: MA Experiment 20000235 PARAMETER Experiment Name: At_Siliques_P Parameter: Organism Value: A. thaliana
  misc_feature: MA Experiment 20000235 PARAMETER Experiment Name: At_Siliques_P Parameter: Plant Line Value: WS
  misc_feature: MA Experiment 20000235 PARAMETER Experiment Name: At_Siliques_P Parameter: Tissue Value: 5-10mm Siliques vs. Whole Plant
  misc_feature: MA Experiment ID: 20000264 Result: Down-regulated in Transcription
  misc_feature: MA Experiment 20000264 PARAMETER Experiment Name: At_Open_Flower_P Parameter: Age (day) Value: 21
  misc_feature: MA Experiment 20000264 PARAMETER Experiment Name: At_Open_Flower_P Parameter: Plant Line Value: WS
  misc_feature: MA Experiment 20000264 PARAMETER Experiment Name: At_Open_Flower_P Parameter: Tissue Value: Open Flower vs. Whole Plant
  misc_feature: MA Experiment ID: 20000265 Result: Down-regulated in Transcription
  misc_feature: MA Experiment 20000265 PARAMETER Experiment Name: At_Open_Flower_P Parameter: Age (day) Value: 21
  misc_feature: MA Experiment 20000265 PARAMETER Experiment Name: At_Open_Flower_P Parameter: Plant Line Value: WS
  misc_feature: MA Experiment 20000265 PARAMETER Experiment Name: At_Open_Flower_P Parameter: Tissue Value: Closed Flower vs. Whole Plant
  misc_feature: MA Experiment ID: 20000438 Result: Down-regulated in Transcription
  misc_feature: MA Experiment 20000438 PARAMETER Experiment Name: At_Shoots__P Parameter: Age (day) Value: 14
  misc_feature: MA Experiment 20000438 PARAMETER Experiment Name: At_Shoots__P Parameter: Tissue Value: Shoots vs. Whole Plant
  misc_feature: MA Experiment ID: 20000460 Result: Down-regulated in Transcription
  misc_feature: MA Experiment 20000460 PARAMETER Experiment Name: At_10percent_PEG_P Parameter: Age (day) Value: 12
  misc_feature: MA Experiment 20000460 PARAMETER Experiment Name: At_10percent_PEG_P Parameter: Organism Value: A. thaliana
  misc_feature: MA Experiment 20000460 PARAMETER Experiment Name: At_10percent_PEG_P Parameter: Plant Line Value: WS
  misc_feature: MA Experiment 20000460 PARAMETER Experiment Name: At_10percent_PEG_P Parameter: Timepoint (day) Value: 12
  misc_feature: MA Experiment 20000460 PARAMETER Experiment Name: At_10percent_PEG_P Parameter: Tissue Value: Whole Plant
  misc_feature: MA Experiment 20000460 PARAMETER Experiment Name: At_10percent_PEG_P Parameter: Treatment Value: 10percent PEG vs. No Treatment
  misc_feature: MA Experiment ID: 20000527 Result: Down-regulated in Transcription
  misc_feature: MA Experiment 20000527 PARAMETER Experiment Name: At_10percent_PEG_P Parameter: Age (day) Value: 20
  misc_feature: MA Experiment 20000527 PARAMETER Experiment Name: At_10percent_PEG_P Parameter: Organism Value: A. thaliana
  misc_feature: MA Experiment 20000527 PARAMETER Experiment Name: At_10percent_PEG_P Parameter: Plant Line Value: WS
  misc_feature: MA Experiment 20000527 PARAMETER Experiment Name: At_10percent_PEG_P Parameter: Timepoint (day) Value: 20
  misc_feature: MA Experiment 20000527 PARAMETER Experiment Name: At_10percent_PEG_P Parameter: Tissue Value: Whole Plant
  misc_feature: MA Experiment 20000527 PARAMETER Experiment Name: At_10percent_PEG_P Parameter: Treatment Value: 10percent PEG vs. No Treatment
  misc_feature: MA Experiment ID: 20000573 Result: Up-regulated in Transcription
  misc_feature: MA Experiment 20000573 PARAMETER Experiment Name: At_100uM_ABA_Mutants__P Parameter: Organism Value: A. thaliana
  misc_feature: MA Experiment 20000573 PARAMETER Experiment Name: At_100uM_ABA_Mutants__P Parameter: Plant Line Value: CS22 vs. Ler wt
  misc_feature: MA Experiment 20000573 PARAMETER Experiment Name: At_100uM_ABA_Mutants__P Parameter: Timepoint (hr) Value: N/A
  misc_feature: MA Experiment 20000573 PARAMETER Experiment Name: At_100uM_ABA_Mutants__P Parameter: Tissue Value: Whole Plant
  misc_feature: MA Experiment 20000573 PARAMETER Experiment Name: At_100uM_ABA_Mutants__P Parameter: Treatment Value: None
  misc_feature: MA Experiment ID: 20000574 Result: Up-regulated in Transcription
  misc_feature: MA Experiment 20000574 PARAMETER Experiment Name: At_100uM_ABA_Mutants__P Parameter: Organism Value: A. thaliana
  misc_feature: MA Experiment 20000574 PARAMETER Experiment Name: At_100uM_ABA_Mutants__P Parameter: Plant Line Value: CS23 vs. Ler wt
  misc_feature: MA Experiment 20000574 PARAMETER Experiment Name: At_100uM_ABA_Mutants__P Parameter: Timepoint (hr) Value: N/A
  misc_feature: MA Experiment 20000574 PARAMETER Experiment Name: At_100uM_ABA_Mutants__P Parameter: Tissue Value: Whole Plant
  misc_feature: MA Experiment 20000574 PARAMETER Experiment Name: At_100uM_ABA_Mutants__P Parameter: Treatment Value: None
  misc_feature: MA Experiment ID: 20000576 Result: Down-regulated in Transcription
  misc_feature: MA Experiment 20000576 PARAMETER Experiment Name: At_100uM_ABA_Mutants__P Parameter: Organism Value: A. thaliana
  misc_feature: MA Experiment 20000576 PARAMETER Experiment Name: At_100uM_ABA_Mutants__P Parameter: Plant Line Value: CS23
  misc_feature: MA Experiment 20000576 PARAMETER Experiment Name: At_100uM_ABA_Mutants__P Parameter: Timepoint (hr) Value: 6
  misc_feature: MA Experiment 20000576 PARAMETER Experiment Name: At_100uM_ABA_Mutants__P Parameter: Tissue Value: Whole Plant
  misc_feature: MA Experiment 20000576 PARAMETER Experiment Name: At_100uM_ABA_Mutants__P Parameter: Treatment Value: 1uM ABA vs. No Treatment
  misc_feature: MA Experiment ID: 20000709 Result: Down-regulated in Transcription
  misc_feature: MA Experiment 20000709 PARAMETER Experiment Name: At_15mM_NH4NO3_L-to-H_P Parameter: Age (hr) Value: 14
  misc_feature: MA Experiment 20000709 PARAMETER Experiment Name: At_15mM_NH4NO3_L-to-H_P Parameter: Organism Value: A. thaliana
  misc_feature: MA Experiment 20000709 PARAMETER Experiment Name: At_15mM_NH4NO3_L-to-H_P Parameter: Plant Line Value: WS
  misc_feature: MA Experiment 20000709 PARAMETER Experiment Name: At_15mM_NH4NO3_L-to-H_P Parameter: Timepoint (hr) Value: 4
  misc_feature: MA Experiment 20000709 PARAMETER Experiment Name: At_15mM_NH4NO3_L-to-H_P Parameter: Tissue Value: Aerial
  misc_feature: MA Experiment 20000709 PARAMETER Experiment Name: At_15mM_NH4NO3_L-to-H_P Parameter: Treatment Value: 15mM NH4NO3 vs. 30mM Mannitol
  misc_feature: MA Experiment ID: 20000794 Result: Down-regulated in Transcription
  misc_feature: MA Experiment 20000794 PARAMETER Experiment Name: At_Petals_P Parameter: Age (day) Value: 23-25 days
  misc_feature: MA Experiment 20000794 PARAMETER Experiment Name: At_Petals_P Parameter: Plant Line Value: WS
  misc_feature: MA Experiment 20000794 PARAMETER Experiment Name: At_Petals_P Parameter: Tissue Value: Petals vs. Whole plant
  misc_feature: MA Experiment ID: 20001557 Result: Down-regulated in Transcription
  misc_feature: MA Experiment 20001557 PARAMETER Experiment Name: At_Drought_Soil_Dry_P Parameter: Age (day) Value: 27
  misc_feature: MA Experiment 20001557 PARAMETER Experiment Name: At_Drought_Soil_Dry_P Parameter: Organism Value: A. thaliana
  misc_feature: MA Experiment 20001557 PARAMETER Experiment Name: At_Drought_Soil_Dry_P Parameter: Plant Line Value: WS
  misc_feature: MA Experiment 20001557 PARAMETER Experiment Name: At_Drought_Soil_Dry_P Parameter: Post Timepoint (hr) Value: 3
  misc_feature: MA Experiment 20001557 PARAMETER Experiment Name: At_Drought_Soil_Dry_P Parameter: Post-Treatment Value: Re-Water vs. No Drought
  misc_feature: MA Experiment 20001557 PARAMETER Experiment Name: At_Drought_Soil_Dry_P Parameter: Timepoint (day) Value: 13
  misc_feature: MA Experiment 20001557 PARAMETER Experiment Name: At_Drought_Soil_Dry_P Parameter: Treatment Value: Drought vs. No Drought
  misc_feature: MA Experiment ID: 20001558 Result: Down-regulated in Transcription
  misc_feature: MA Experiment 20001558 PARAMETER Experiment Name: At_Drought_Soil_Dry_P Parameter: Age (day) Value: 27
  misc_feature: MA Experiment 20001558 PARAMETER Experiment Name: At_Drought_Soil_Dry_P Parameter: Organism Value: A. thaliana
  misc_feature: MA Experiment 20001558 PARAMETER Experiment Name: At_Drought_Soil_Dry_P Parameter: Plant Line Value: WS
  misc_feature: MA Experiment 20001558 PARAMETER Experiment Name: At_Drought_Soil_Dry_P Parameter: Post Timepoint (hr) Value: 6
  misc_feature: MA Experiment 20001558 PARAMETER Experiment Name: At_Drought_Soil_Dry_P Parameter: Post-Treatment Value: Re-Water vs. No Drought
  misc_feature: MA Experiment 20001558 PARAMETER Experiment Name: At_Drought_Soil_Dry_P Parameter: Timepoint (day) Value: 13
  misc_feature: MA Experiment 20001558 PARAMETER Experiment Name: At_Drought_Soil_Dry_P Parameter: Treatment Value: Drought vs. No Drought
  misc_feature: MA Experiment ID: 20001560 Result: Down-regulated in Transcription
  misc_feature: MA Experiment 20001560 PARAMETER Experiment Name: At_Drought_Soil_Dry_P Parameter: Age (day) Value: 28
  misc_feature: MA Experiment 20001560 PARAMETER Experiment Name: At_Drought_Soil_Dry_P Parameter: Organism Value: A. thaliana
  misc_feature: MA Experiment 20001560 PARAMETER Experiment Name: At_Drought_Soil_Dry_P Parameter: Plant Line Value: WS
  misc_feature: MA Experiment 20001560 PARAMETER Experiment Name: At_Drought_Soil_Dry_P Parameter: Post Timepoint (hr) Value: None
  misc_feature: MA Experiment 20001560 PARAMETER Experiment Name: At_Drought_Soil_Dry_P Parameter: Post-Treatment Value: None
  misc_feature: MA Experiment 20001560 PARAMETER Experiment Name: At_Drought_Soil_Dry_P Parameter: Timepoint (day) Value: 14
  misc_feature: MA Experiment 20001560 PARAMETER Experiment Name: At_Drought_Soil_Dry_P Parameter: Treatment Value: Drought vs. No Drought
  misc_feature: MA Experiment ID: 20001904 Result: Down-regulated in Transcription
  misc_feature: MA Experiment 20001904 PARAMETER Experiment Name: At_Drought_Reproduction_P Parameter: Age (day) Value: 37
  misc_feature: MA Experiment 20001904 PARAMETER Experiment Name: At_Drought_Reproduction_P Parameter: Organism Value: A. thaliana
  misc_feature: MA Experiment 20001904 PARAMETER Experiment Name: At_Drought_Reproduction_P Parameter: Plant Line Value: WS
  misc_feature: MA Experiment 20001904 PARAMETER Experiment Name: At_Drought_Reproduction_P Parameter: Timepoint (day) Value: 7
  misc_feature: MA Experiment 20001904 PARAMETER Experiment Name: At_Drought_Reproduction_P Parameter: Tissue Value: Rosettes
  misc_feature: MA Experiment 20001904 PARAMETER Experiment Name: At_Drought_Reproduction_P Parameter: Treatment Value: Drought vs. No Drought
atttgatcttggcaagatctcgagagcatttataaagaaattaaagcaacacatacacacatcaatttcgtaatcgttgcagagtaagaccgatcatcgatggctgatgtaatggaacagaatcttcttcaaaccgctgtgcttaaccggacgtccttccatttccaacctcagagaaattggctcaacgatccaaacgcgccaatgtattacaaaggattctaccatttgttctaccagaataaccctttggctcccgaattcagtaggacaagaatcatatggggacactctgtttcacaagacatggtcaattggatccagctcgaaccagcccttgtcccttctgagtcctttgacatcaacagctgctggtcaggatccgccacgatcctccctgatggcagacctgtaattttgtacactggactcgacgtcaacaacaaacagcaagtcacagttgttgccgaaccaaaggacgtttctgaccctttgcttcgtgagtgggttaagccaaagtacaatcctgtgatggttccgccaagtaatgtcccttttaattgtttccgtgatcccacggaggcgtggaaagggcaagatgggaaatggagagtgctcataggagctaaggagaaagatactgagaaaggaatggcgattttgtaccgaagcgatgattttgtccagtggacaaagtatccggtgcctttacttgagtcagaaggaaccggaatgtgggaatgccctgattttttcccggtttctatcactggtaaagaaggtgttgacacttcggtaaacaatgctagtgtgaggcatgtcttgaaggcgagttttggaggcaatgattgctatgtcattggtaaatactcttctgagactgaagacttttcagcggattatgagttcactaacactagtgcagatttgagatatgatcatggaacgttttatgcctcaaaggcgttcttcgatagtgttaaaaataggaggatcaactggggatgggtcatagagactgatagcaaagaagatgattttaagaaaggatgggctggccttatgactcttcccagggaaatttggatggacacaagtggaaagaagctgatgcaatggccaattgaagaaatcaacaatctccggaccaaaagtgttagccttgatgattgctatgaattcaaaaccggctctacctttgaaatctcaggcatcactgctgcccaagcagatgtagaagtgacttttaatctgcctttcctggaaaataatcccgagatacttgatgctgaccaagttgatgatgcgactctgtttgatcgtgatagctcggttggatgtgtttacgggccttttggattgctagcattggcttccagtgatttatcagaacaaaccgcaatcttctttaaagttattcgtcgcggtaacggatatgcagttgtaatgtgcagcagcgagaagaggtcttcgttgagagacaacataaaaaaatcttcgcatggagcattcctagatattgatccaaggcatgagaagatctcattaagatgtttgatcgatcactcgattatagagagctacggagtaggaggaaaaactgtgataacatctagagtttatccaaaattggcaattggtgaagccgctaagctttatgtcttcaatgatggagaaaatggtgtgatcatgacgtccctggaagcttggagcatgagaaatgcccaaatcaattcaaacccaacttattagttaatcatataatatgataatctttggactgccctaaaacaaattcttatcttgtcatgtattgtggaatgtttaagatttatgcgtcgtttgtattcaagttattggtgtggtttatgctgtcgttccttgggtgaaataatgtaagtcttctcatgtttctt

SEQ ID NO: 79414 - protein, 550 aa, Arabidopsis thaliana
  peptide (1)..(550): Ceres Seq. ID no. 12651169
  misc_feature (21)..(499): Pfam Name: Glycosyl hydrolases family 32 Pfam Description: Glycosyl hydrolases family 32
  misc_feature (1)..(550): Homolog of NCBI NO: 18416711 NR Description: glycosyl hydrolase family 32; protein id: supported by cDNA: gi_16974574 [Arabidopsis thaliana] AT5g11920/F14F18_90 [Arabidopsis thaliana]
  misc_feature (1)..(550): Homolog of NCBI NO: 11264390 NR Description: fructosidase-like protein - Arabidopsis thaliana
  misc_feature (17)..(543): Homolog of NCBI NO: 13940209 NR Description: fructan 1-exohydrolase IIa [Cichorium intybus]
  misc_feature (17)..(543): Homolog of NCBI NO: 4127662 NR Description: fructosidase [Cichorium intybus]
  misc_feature (17)..(542): Homolog of NCBI NO: 13940211 NR Description: fructan 1-exohydrolase IIb [Cichorium intybus]
  misc_feature (17)..(547): Homolog of NCBI NO: 18405222 NR Description: glycosyl hydrolase family 32; protein id:
  misc_feature (17)..(544): Homolog of NCBI NO: 4127660 NR Description: invertase [Cichorium intybus]
  misc_feature (17)..(547): Homolog of NCBI NO: 6683112 NR Description: beta-fructofuranosidase [Arabidopsis thaliana]
  misc_feature (17)..(544): Homolog of NCBI NO: 11967654 NR Description: fructan 1-exohydrolase I [Cichorium intybus]
  misc_feature (17)..(544): Homolog of NCBI NO: 21322516 NR Description: exocellular acid invertase 2 [Beta vulgaris]
MADVMEQNLLQTAVLNRTSFHFQPQRNWLNDPNAPMYYKGFYHLFYQNNPLAPEFSRTRIIWGHSVSQDMVNWIQLEPALVPSESFDINSCWSGSATILPDGRPVILYTGLDVNNKQQVTVVAEPKDVSDPLLREWVKPKYNPVMVPPSNVPFNCFRDPTEAWKGQDGKWRVLIGAKEKDTEKGMAILYRSDDFVQWTKYPVPLLESEGTGMWECPDFFPVSITGKEGVDTSVNNASVRHVLKASFGGNDCYVIGKYSSETEDFSADYEFTNTSADLRYDHGTFYASKAFFDSVKNRRINWGWVIETDSKEDDFKKGWAGLMTLPREIWMDTSGKKLMQWPIEEINNLRTKSVSLDDCYEFKTGSTFEISGITAAQADVEVTFNLPFLENNPEILDADQVDDATLFDRDSSVGCVYGPFGLLALASSDLSEQTAIFFKVIRRGNGYAVVMCSSEKRSSLRDNIKKSSHGAFLDIDPRHEKISLRCLIDHSIIESYGVGGKTVITSRVYPKLAIGEAAKLYVFNDGENGVIMTSLEAWSMRNAQINSNPTY

SEQ ID NO: 79415 - protein, 546 aa, Arabidopsis thaliana
  peptide (1)..(546): Ceres Seq. ID no. 12651170
  misc_feature (17)..(495): Pfam Name: Glycosyl hydrolases family 32 Pfam Description: Glycosyl hydrolases family 32
  misc_feature (1)..(546): Homolog of NCBI NO: 18416711 NR Description: glycosyl hydrolase family 32; protein id: supported by cDNA: gi_16974574 [Arabidopsis thaliana] AT5g11920/F14F18_90 [Arabidopsis thaliana]
  misc_feature (1)..(546): Homolog of NCBI NO: 11264390 NR Description: fructosidase-like protein - Arabidopsis thaliana
  misc_feature (13)..(539): Homolog of NCBI NO: 13940209 NR Description: fructan 1-exohydrolase IIa [Cichorium intybus]
  misc_feature (13)..(539): Homolog of NCBI NO: 4127662 NR Description: fructosidase [Cichorium intybus]
  misc_feature (13)..(538): Homolog of NCBI NO: 13940211 NR Description: fructan 1-exohydrolase IIb [Cichorium intybus]
  misc_feature (13)..(543): Homolog of NCBI NO: 18405222 NR Description: glycosyl hydrolase family 32; protein id:
  misc_feature (13)..(540): Homolog of NCBI NO: 4127660 NR Description: invertase [Cichorium intybus]
  misc_feature (13)..(543): Homolog of NCBI NO: 6683112 NR Description: beta-fructofuranosidase [Arabidopsis thaliana]
  misc_feature (13)..(540): Homolog of NCBI NO: 11967654 NR Description: fructan 1-exohydrolase I [Cichorium intybus]
  misc_feature (13)..(540): Homolog of NCBI NO: 21322516 NR Description: exocellular acid invertase 2 [Beta vulgaris]
MEQNLLQTAVLNRTSFHFQPQRNWLNDPNAPMYYKGFYHLFYQNNPLAPEFSRTRIIWGHSVSQDMVNWIQLEPALVPSESFDINSCWSGSATILPDGRPVILYTGLDVNNKQQVTVVAEPKDVSDPLLREWVKPKYNPVMVPPSNVPFNCFRDPTEAWKGQDGKWRVLIGAKEKDTEKGMAILYRSDDFVQWTKYPVPLLESEGTGMWECPDFFPVSITGKEGVDTSVNNASVRHVLKASFGGNDCYVIGKYSSETEDFSADYEFTNTSADLRYDHGTFYASKAFFDSVKNRRINWGWVIETDSKEDDFKKGWAGLMTLPREIWMDTSGKKLMQWPIEEINNLRTKSVSLDDCYEFKTGSTFEISGITAAQADVEVTFNLPFLENNPEILDADQVDDATLFDRDSSVGCVYGPFGLLALASSDLSEQTAIFFKVIRRGNGYAVVMCSSEKRSSLRDNIKKSSHGAFLDIDPRHEKISLRCLIDHSIIESYGVGGKTVITSRVYPKLAIGEAAKLYVFNDGENGVIMTSLEAWSMRNAQINSNPTY

SEQ ID NO: 79416 - protein, 515 aa, Arabidopsis thaliana
  peptide (1)..(515): Ceres Seq. ID no. 12651171
  misc_feature (1)..(464): Pfam Name: Glycosyl hydrolases family 32 Pfam Description: Glycosyl hydrolases family 32
  misc_feature (1)..(515): Homolog of NCBI NO: 18416711 NR Description: glycosyl hydrolase family 32; protein id: supported by cDNA: gi_16974574 [Arabidopsis thaliana] AT5g11920/F14F18_90 [Arabidopsis thaliana]
  misc_feature (1)..(515): Homolog of NCBI NO: 11264390 NR Description: fructosidase-like protein - Arabidopsis thaliana
  misc_feature (1)..(508): Homolog of NCBI NO: 13940209 NR Description: fructan 1-exohydrolase IIa [Cichorium intybus]
  misc_feature (1)..(508): Homolog of NCBI NO: 4127662 NR Description: fructosidase [Cichorium intybus]
  misc_feature (1)..(507): Homolog of NCBI NO: 13940211 NR Description: fructan 1-exohydrolase IIb [Cichorium intybus]
  misc_feature (1)..(512): Homolog of NCBI NO: 18405222 NR Description: glycosyl hydrolase family 32; protein id:
  misc_feature (1)..(509): Homolog of NCBI NO: 4127660 NR Description: invertase [Cichorium intybus]
  misc_feature (1)..(512): Homolog of NCBI NO: 6683112 NR Description: beta-fructofuranosidase [Arabidopsis thaliana]
  misc_feature (1)..(509): Homolog of NCBI NO: 11967654 NR Description: fructan 1-exohydrolase I [Cichorium intybus]
  misc_feature (1)..(509): Homolog of NCBI NO: 21322516 NR Description: exocellular acid invertase 2 [Beta vulgaris]
MYYKGFYHLFYQNNPLAPEFSRTRIIWGHSVSQDMVNWIQLEPALVPSESFDINSCWSGSATILPDGRPVILYTGLDVNNKQQVTVVAEPKDVSDPLLREWVKPKYNPVMVPPSNVPFNCFRDPTEAWKGQDGKWRVLIGAKEKDTEKGMAILYRSDDFVQWTKYPVPLLESEGTGMWECPDFFPVSITGKEGVDTSVNNASVRHVLKASFGGNDCYVIGKYSSETEDFSADYEFTNTSADLRYDHGTFYASKAFFDSVKNRRINWGWVIETDSKEDDFKKGWAGLMTLPREIWMDTSGKKLMQWPIEEINNLRTKSVSLDDCYEFKTGSTFEISGITAAQADVEVTFNLPFLENNPEILDADQVDDATLFDRDSSVGCVYGPFGLLALASSDLSEQTAIFFKVIRRGNGYAVVMCSSEKRSSLRDNIKKSSHGAFLDIDPRHEKISLRCLIDHSIIESYGVGGKTVITSRVYPKLAIGEAAKLYVFNDGENGVIMTSLEAWSMRNAQINSNPTY

SEQ ID NO: 79417 - DNA, 1839 bp, Arabidopsis thaliana
  misc_feature (1)..(1839): Ceres Seq. ID no. 12651234
  misc_feature: MA Experiment ID: 20000267 Result: Up-regulated in Transcription
  misc_feature: MA Experiment 20000267 PARAMETER Experiment Name: At_Drought_P Parameter: Age (day) Value: 7
  misc_feature: MA Experiment 20000267 PARAMETER Experiment Name: At_Drought_P Parameter: Organism Value: A. thaliana
  misc_feature: MA Experiment 20000267 PARAMETER Experiment Name: At_Drought_P Parameter: Plant Line Value: WS
  misc_feature: MA Experiment 20000267 PARAMETER Experiment Name: At_Drought_P Parameter: Timepoint (hr) Value: 6
  misc_feature: MA Experiment 20000267 PARAMETER Experiment Name: At_Drought_P Parameter: Tissue Value: Whole Plant
  misc_feature: MA Experiment 20000267 PARAMETER Experiment Name: At_Drought_P Parameter: Treatment Value: Drought vs. No Drought
  misc_feature: MA Experiment ID: 20001761 Result: Down-regulated in Transcription
  misc_feature: MA Experiment 20001761 PARAMETER Experiment Name: At_50mM_NH4NO3_L-to-H_P Parameter: Timepoint (hr) Value: 4
  misc_feature: MA Experiment 20001761 PARAMETER Experiment Name: At_50mM_NH4NO3_L-to-H_P Parameter: Tissue Value: Siliques
  misc_feature: MA Experiment 20001761 PARAMETER Experiment Name: At_50mM_NH4NO3_L-to-H_P Parameter: Treatment Value: 50mM NH4NO3 vs 100mM Mannitol
  misc_feature: MA Experiment ID: 20001906 Result: Up-regulated in Transcription
  misc_feature: MA Experiment 20001906 PARAMETER Experiment Name: At_Drought_Reproduction_P Parameter: Age (day) Value: 35
  misc_feature: MA Experiment 20001906 PARAMETER Experiment Name: At_Drought_Reproduction_P Parameter: Organism Value: A. thaliana
  misc_feature: MA Experiment 20001906 PARAMETER Experiment Name: At_Drought_Reproduction_P Parameter: Plant Line Value: WS
  misc_feature: MA Experiment 20001906 PARAMETER Experiment Name: At_Drought_Reproduction_P Parameter: Timepoint (day) Value: 5
  misc_feature: MA Experiment 20001906 PARAMETER Experiment Name: At_Drought_Reproduction_P Parameter: Tissue Value: Siliques
  misc_feature: MA Experiment 20001906 PARAMETER Experiment Name: At_Drought_Reproduction_P Parameter: Treatment Value: Drought vs. No Drought
atgaatcttagtttttcttcttataatctcacggctactgccgtgtcctcttcttgtttcggaagcgacgaacttctggtttcaaggaggctgttttccctgagagatgttcagattcttgagctctttattgcctttttcgtgtttgcgacaatacattccttgcgccagaagaaacaccaagggatgcccgtttggccgttggttggcatgcttccttcgttgatatccgcggtacgaagcaacatatacgaatggctgtctgatgttcttatcagccaaaacgggacattccggtttagaggtccttggtttagcaccctcaactgcgttgttacctgcgacccaagaaacgttgagcatcttctcaagacccgtttctctatctacccaaagggttcttacttccgtgagaccatgcaagatctactcggagacgggattttcaacaccgatgacggaacgtggcaacgacaaaggaaagcagcaagtgtcgaattccattcggctaaattcagacaattaaccagtcaatcattgcacgaactcgtgcataatcgacttttgccggttctagaaacttccggaaagattgatcttcaggacattttgttaagactaacgttcgacaatgtatgcatgattgctttcggggtcgatccaggctgtcttagtccaaaactacccgaaattccttttgcaaaagccttcgaggacgcaacagaagcaacagttgtgagatttgtgatgcctaaattcgtgtggaagctcatgaggtctcttaatttaggaacggagaagaagctaaaggaatcaataaatggtgtggatgatttcgctgaagaagtaatccggacgaggaagaaagagatgtctctagagactgaaatcgcgaagagacctgatctcttgactatttttatgggtctacgagacgaaaatggacagaaattttcagataagttcttgcgtgatatttgtgtgaacttcatacttgctgggagagacacttcctctgtggctctaagctggtttttctggttaatcgagaagaatccggaagtggaggagaaaattatgatgggaatttgcaagattcttgagcagagggttgatcatggagatacaaagaagaacatggaatatgagcccgtcttcagaccagaagagatcaagaaaatggattatctacaagctgctttgtctgagactcttagattgtatccctctgttccagtcgatcacaaagaggtacttgaagacgatgtatttccagatgggacgaaattaaaaaaaggagaaaaggttatatatgcaatatacgcgatgggacgtatggaaacaatttgggggaaagactgtcgtgagttcaagccagaaaggtggttaagagacggcaggtacatgagtgagtcggcctataagttcacggccttcaatggtggtcctcggctatgtctaggcaaggattttgcgtattaccaaatgagatatgtagcggccgccattatttaccggtataaggttagggttgatgataagggtggtcataaggttgagccaaagatggctctaactatgtacatgaagcatggcttgaaggtgaatatggtcaagaggagtgtctctgagatagaccactactactgctgagtgcctgacataaagggtataaaattggtgtatatatagtggttcgtgttttgagatttatgaattgtaacaggtgattgttttttggtgattttgatttggtagttaagtgggttcatataataattgtaacttgcgatatattgtattctacaaaagagtccatatttttgtcatttctcttat

SEQ ID NO: 79418 - protein, 550 aa, Arabidopsis thaliana
  peptide (1)..(550): Ceres Seq. ID no. 12651235
  misc_feature (1)..(550): Homolog of NCBI NO: 11249681 NR Description: cytochrome P450-like protein - Arabidopsis
  misc_feature (63)..(550): Homolog of NCBI NO: 30682301 NR Description: cytochrome P450 family [Arabidopsis thaliana]
  misc_feature (1)..(549): Homolog of NCBI NO: 15237250 NR Description: cytochrome P450-like protein; protein id:
  misc_feature (7)..(545): Homolog of NCBI NO: 37535524 NR Description: putative cytochrome P450 protein [Oryza sativa
  misc_feature (25)..(540): Homolog of NCBI NO: 15221776 NR Description: cytochrome P450, putative; protein id: At1g24540.1
  misc_feature (34)..(544): Homolog of NCBI NO: 15229477 NR Description: cytochrome P450, putative; protein id:
  misc_feature (39)..(543): Homolog of NCBI NO: 15222515 NR Description: cytochrome P450, putative; protein id: supported by cDNA: 37538. [Arabidopsis thaliana]
  misc_feature (39)..(543): Homolog of NCBI NO: 21593258 NR Description: putative cytochrome P450 [Arabidopsis thaliana]
  misc_feature (27)..(544): Homolog of NCBI NO: 28393041 NR Description: putative cytochrome P450 [Arabidopsis thaliana]
  misc_feature (27)..(544): Homolog of NCBI NO: 15222187 NR Description: cytochrome P450, putative; protein id: At1g13150.1
MNLSFSSYNLTATAVSSSCFGSDELLVSRRLFSLRDVQILELFIAFFVFATIHSLRQKKHQGMPVWPLVGMLPSLISAVRSNIYEWLSDVLISQNGTFRFRGPWFSTLNCVVTCDPRNVEHLLKTRFSIYPKGSYFRETMQDLLGDGIFNTDDGTWQRQRKAASVEFHSAKFRQLTSQSLHELVHNRLLPVLETSGKIDLQDILLRLTFDNVCMIAFGVDPGCLSPKLPEIPFAKAFEDATEATVVRFVMPKFVWKLMRSLNLGTEKKLKESINGVDDFAEEVIRTRKKEMSLETEIAKRPDLLTIFMGLRDENGQKFSDKFLRDICVNFILAGRDTSSVALSWFFWLIEKNPEVEEKIMMGICKILEQRVDHGDTKKNMEYEPVFRPEEIKKMDYLQAALSETLRLYPSVPVDHKEVLEDDVFPDGTKLKKGEKVIYAIYAMGRMETIWGKDCREFKPERWLRDGRYMSESAYKFTAFNGGPRLCLGKDFAYYQMRYVAAAIIYRYKVRVDDKGGHKVEPKMALTMYMKHGLKVNMVKRSVSEIDHYYC

SEQ ID NO: 79419 - protein, 488 aa, Arabidopsis thaliana
  peptide (1)..(488): Ceres Seq. ID no. 12651236
  misc_feature (1)..(488): Homolog of NCBI NO: 11249681 NR Description: cytochrome P450-like protein - Arabidopsis
  misc_feature (1)..(488): Homolog of NCBI NO: 30682301 NR Description: cytochrome P450 family [Arabidopsis thaliana]
  misc_feature (1)..(487): Homolog of NCBI NO: 15237250 NR Description: cytochrome P450-like protein; protein id:
  misc_feature (1)..(483): Homolog of NCBI NO: 37535524 NR Description: putative cytochrome P450 protein [Oryza sativa
  misc_feature (1)..(478): Homolog of NCBI NO: 15221776 NR Description: cytochrome P450, putative; protein id: At1g24540.1
  misc_feature (1)..(482): Homolog of NCBI NO: 15229477 NR Description: cytochrome P450, putative; protein id:
  misc_feature (1)..(481): Homolog of NCBI NO: 15222515 NR Description: cytochrome P450, putative; protein id: supported by cDNA: 37538. [Arabidopsis thaliana]
  misc_feature (1)..(481): Homolog of NCBI NO: 21593258 NR Description: putative cytochrome P450 [Arabidopsis thaliana]
  misc_feature (1)..(482): Homolog of NCBI NO: 28393041 NR Description: putative cytochrome P450 [Arabidopsis thaliana]
  misc_feature (1)..(482): Homolog of NCBI NO: 15222187 NR Description: cytochrome P450, putative; protein id: At1g13150.1
MPVWPLVGMLPSLISAVRSNIYEWLSDVLISQNGTFRFRGPWFSTLNCVVTCDPRNVEHLLKTRFSIYPKGSYFRETMQDLLGDGIFNTDDGTWQRQRKAASVEFHSAKFRQLTSQSLHELVHNRLLPVLETSGKIDLQDILLRLTFDNVCMIAFGVDPGCLSPKLPEIPFAKAFEDATEATVVRFVMPKFVWKLMRSLNLGTEKKLKESINGVDDFAEEVIRTRKKEMSLETEIAKRPDLLTIFMGLRDENGQKFSDKFLRDICVNFILAGRDTSSVALSWFFWLIEKNPEVEEKIMMGICKILEQRVDHGDTKKNMEYEPVFRPEEIKKMDYLQAALSETLRLYPSVPVDHKEVLEDDVFPDGTKLKKGEKVIYAIYAMGRMETIWGKDCREFKPERWLRDGRYMSESAYKFTAFNGGPRLCLGKDFAYYQMRYVAAAIIYRYKVRVDDKGGHKVEPKMALTMYMKHGLKVNMVKRSVSEIDHYYC

SEQ ID NO: 79420 - protein, 480 aa, Arabidopsis thaliana
  peptide (1)..(480): Ceres Seq. ID no. 12651237
  misc_feature (1)..(480): Homolog of NCBI NO: 11249681 NR Description: cytochrome P450-like protein - Arabidopsis
  misc_feature (1)..(480): Homolog of NCBI NO: 30682301 NR Description: cytochrome P450 family [Arabidopsis thaliana]
  misc_feature (1)..(479): Homolog of NCBI NO: 15237250 NR Description: cytochrome P450-like protein; protein id:
  misc_feature (1)..(475): Homolog of NCBI NO: 37535524 NR Description: putative cytochrome P450 protein [Oryza sativa
  misc_feature (1)..(470): Homolog of NCBI NO: 15221776 NR Description: cytochrome P450, putative; protein id: At1g24540.1
  misc_feature (1)..(474): Homolog of NCBI NO: 15229477 NR Description: cytochrome P450, putative; protein id:
  misc_feature (1)..(473): Homolog of NCBI NO: 15222515 NR Description: cytochrome P450, putative; protein id: supported by cDNA: 37538. [Arabidopsis thaliana]
  misc_feature (1)..(473): Homolog of NCBI NO: 21593258 NR Description: putative cytochrome P450 [Arabidopsis thaliana]
  misc_feature (1)..(474): Homolog of NCBI NO: 28393041 NR Description: putative cytochrome P450 [Arabidopsis thaliana]
  misc_feature (1)..(474): Homolog of NCBI NO: 15222187 NR Description: cytochrome P450, putative; protein id: At1g13150.1
MLPSLISAVRSNIYEWLSDVLISQNGTFRFRGPWFSTLNCVVTCDPRNVEHLLKTRFSIYPKGSYFRETMQDLLGDGIFNTDDGTWQRQRKAASVEFHSAKFRQLTSQSLHELVHNRLLPVLETSGKIDLQDILLRLTFDNVCMIAFGVDPGCLSPKLPEIPFAKAFEDATEATVVRFVMPKFVWKLMRSLNLGTEKKLKESINGVDDFAEEVIRTRKKEMSLETEIAKRPDLLTIFMGLRDENGQKFSDKFLRDICVNFILAGRDTSSVALSWFFWLIEKNPEVEEKIMMGICKILEQRVDHGDTKKNMEYEPVFRPEEIKKMDYLQAALSETLRLYPSVPVDHKEVLEDDVFPDGTKLKKGEKVIYAIYAMGRMETIWGKDCREFKPERWLRDGRYMSESAYKFTAFNGGPRLCLGKDFAYYQMRYVAAAIIYRYKVRVDDKGGHKVEPKMALTMYMKHGLKVNMVKRSVSEIDHYYC

SEQ ID NO: 79421 - DNA, 3843 bp, Arabidopsis thaliana
  misc_feature (1)..(3843): Ceres Seq. ID no. 12651245
  misc_feature: MA Experiment ID: 20001247 Result: Down-regulated in Transcription
  misc_feature: MA Experiment 20001247 PARAMETER Experiment Name: At_Far-red-induction_P Parameter: Age (day) Value: 7
  misc_feature: MA Experiment 20001247 PARAMETER Experiment Name: At_Far-red-induction_P Parameter: Light Value: Far-red vs. White
  misc_feature: MA Experiment 20001247 PARAMETER Experiment Name: At_Far-red-induction_P Parameter: Organism Value: A. thaliana
  misc_feature: MA Experiment 20001247 PARAMETER Experiment Name: At_Far-red-induction_P Parameter: Plant Line Value: Columbia
  misc_feature: MA Experiment 20001247 PARAMETER Experiment Name: At_Far-red-induction_P Parameter: Timepoint (hr) Value: 1
  misc_feature: MA Experiment 20001247 PARAMETER Experiment Name: At_Far-red-induction_P Parameter: Tissue Value: Whole Plant
  misc_feature: MA Experiment ID: 20001451 Result: Down-regulated in Transcription
  misc_feature: MA Experiment 20001451 PARAMETER Experiment Name: At_Far-red-induction_P Parameter: Age (day) Value: 7
  misc_feature: MA Experiment 20001451 PARAMETER Experiment Name: At_Far-red-induction_P Parameter: Light Value: Far-red vs. White
  misc_feature: MA Experiment 20001451 PARAMETER Experiment Name: At_Far-red-induction_P Parameter: Organism Value: A. thaliana
  misc_feature: MA Experiment 20001451 PARAMETER Experiment Name: At_Far-red-induction_P Parameter: Plant Line Value: Columbia
  misc_feature: MA Experiment 20001451 PARAMETER Experiment Name: At_Far-red-induction_P Parameter: Timepoint (hr) Value: 24
  misc_feature: MA Experiment 20001451 PARAMETER Experiment Name: At_Far-red-induction_P Parameter: Tissue Value: Whole Plant
atggccttctcgagaatcgctcttctttgccaacgattctctagacaacaacaacaacgccaacttcttcacagaccactcactacgaagctagataacaccagattcctccatcccaatcaatccaagcttgcccaaaacctaatcgtgatcttcactagacaacctttttcacctgacgaccctgagctactgatactctctccagagctcaacaccaaggtagtcgaaaccgtcttgaatggattcaaaaggtggggtttggcttatctgttcttcaattgggcttctaaacaggaaggttacagaaacgatatgtatgcttacaatgccatggcttctatcctatcacgtgctcgacaaaatgcctcactgaaagctttggttgtagatgttctgaattctcgttgtttcatgtctcctggagctttcgggtttttcattcggtgtttaggtaatgctgggctagtggatgaagcaagttctgtttttgatcgagttagagagatgggtctttgtgttcctaatgcttatacttataactgtttgttagaagcaatttctaagtcgaattcgagctctgttgagttggttgaggcgaggttgaaggagatgagggattgcggttttcatttcgataaatttactcttacaccagttttgcaggtttattgcaacactggtaagtctgagagagcgttgagtgttttcaatgagattcttagtagaggttggcttgatgaacatatttcaacgattttggttgtttcattttgtaagtggggtcaggtggataaggctttcgagttgattgagatgcttgaagaacgagatattaggttgaactataagacatattgtgttttgatacatggattcgtaaaggagtcacggattgataaagcttttcagttgtttgagaaaatgcgtcggatgggtatgaacgctgatattgcattgtatgatgtgttgataggaggactttgcaagcataaagatcttgagatggcgctgagtttgtatttggagattaagaggtcaggaattccacctgatagaggaatacttgggaagctattatgttcattttccgaagaaagtgaattaagtcgaataacagaagtgatcattggagacatagacaaaaaatctgtgatgcttctttacaaatctttgtttgaggggtttattaggaatgatttggtgcatgaggcttacagttttattcagaatctcatgggaaattatgagtcggatggtgtgtctgagattgttaagcttcttaaggatcataataaagcaatcctcccagattcagattctcttagcattgtgattaattgcttagtcaaagctaacaaggtggatatggcagtgaccttgttacatgatattgtccagaatggccttattccaggtcctatgatgtacaacaacataatagaggggatgtgtaaagaaggaaggtcggaagaaagcttgaaactcttaggagaaatgaaggatgccggagttgaaccaagtcaattcacgcttaattgtatttatggttgcttggctgaacgatgcgattttgtaggagcattggacctgctgaaaaagatgcgtttttatggatttgagccatggataaagcatactacctttcttgtcaaaaaactttgcgagaatggaagggctgttgatgcttgcaagtaccttgatgatgtagctggagaaggtttccttggtcacatggttgcctctactgctgcgattgatggcctcataaaaaatgagggagtagatagaggtttagagttattccgagacatatgtgccaatggtcactgccctgatgtgattgcatatcatgtattgataaaggctctatgtaaagcgtgtcgaactatggaagctgatatcctatttaatgaaatggtatcaaaaggactaaaacctactgttgctacttataacagtatgatagatggatggtgcaaggaaggtgagattgaccggggcctgtcttgtatagtgaggatgtatgaggatgagaaaaaccctgatgttattacttacactagcttaatacatgggctatgcgctagcggaagacctagtgaagcaatctttcgttggaatgaaatgaagggaaaagattgctatccaaatagaattacttttatggcacttattcagggtctttgcaagtgtggctggtctggtgaggccttagtttattttcgtgagatggaagaaaaagaaatggagcctgattcagctgtttacttatcactcgtaagctcttttctgtcaagtgaaaacatcaatgctgggtttgggatattcagagaaatggttcataaaggaagatttccggtttcagtagataggaactatatgcttgctgttaatgttacaagcgacgttgactacgcttacaaattcttgtcaaaactatctgatcctccgaattacggatggaatttcgtaatacgaggtttctccaatagcagaaaccccgagaaatcgatcagcgtctatatccagatgttgaggttcgggttattacctgatcatatgacttatccgtttcttatgaagtcgagttctcgtctctcgaacagaaaacttggtgggtctttgcattgctccgtggttaaatctgggcttgagtgggatttgttcatatgtaatactcttattcatatgtatggttcgttccgagaccaagcttctgcgcgcaagttgttcgatgaaatgcctcataagaacttggttacttggaactctattttagatgcgtatgccaagagcggggatgttgtttcagcaagactggtgtttgatgaaatgagtgagagagatgttgtgacttggagttctatgatcgatggctatgtaaaaagaggtgaatataacaaagcgttggaaattttcgatcagatgatgagaatgggttcatcaaaggcaaatgaagtcactatggttagcgttatatgcgcttgtgctcacttgggtgcgctaaatcgaggaaagactgtacatcgctatatactcgatgtgcatttgccgttaacagttatattgcagacatctcttattgatatgtatgcgaaatgcggatcgataggagacgcttggagcgtgttttatagagcatctgttaaggaaacagatgccttgatgtggaatgctatcattggagggcttgcgagtcacgggttcattagagagtcgctccaactgtttcacaaaatgcgagaatcaaagattgacccggacgagataacattcttgtgcttgcttgctgcttgttcccatggcggattagtgaaagaagcgtggcatttcttcaagagtctcaaggaaagtggtgcggaaccaaagagcgagcattatgcttgtatggttgatgtgctttccagagctggtctagttaaagacgcacatgattttatatctgaaatgccgataaaaccgacgggttcaatgttgggtgctttgcttaacgggtgtataaatcacggaaacttggagcttgcggaaacagttggaaagaagcttatagagttgcaaccacataatgatggacgatatgtcgggctagcaaacgtttatgcgatcaacaagcagtttagggcagctcggtctatgagagaagcaatggagaagaaaggagtgaagaaaattgcagggcacagtatacttgatttggatggaacacgacatagattcatcgctcatgacaaaacacattttcactccgacaagatctatgcagtgttacagctgactggagcttggatgaatctcgatgttgactatgatgatcaagacaatcattgtttttgttcttga

SEQ ID NO: 79422 - protein, 1280 aa, Arabidopsis thaliana
  peptide (1)..(1280): Ceres Seq. ID no. 12651246
  misc_feature (510)..(544): Pfam Name: PPR repeat Pfam Description: PPR repeat
  misc_feature (825)..(1279): Homolog of NCBI NO: 37534772 NR Description: putative selenium-binding protein [Oryza sativa
  misc_feature (801)..(1253): Homolog of NCBI NO: 15240085 NR Description: selenium-binding protein-like; protein id:
  misc_feature (799)..(1253): Homolog of NCBI NO: 15239979 NR Description: selenium-binding protein-like; protein id:
  misc_feature (822)..(1257): Homolog of NCBI NO: 15229340 NR Description: putative protein; protein id: At3g62890.1
  misc_feature (640)..(1272): Homolog of NCBI NO: 15225445 NR Description: hypothetical protein; protein id: At2g13600.1
  misc_feature (688)..(1264): Homolog of NCBI NO: 15227199 NR Description: hypothetical protein; protein id: At2g22410.1, by cDNA: gi_18086348 [Arabidopsis thaliana]
  misc_feature (803)..(1257): Homolog of NCBI NO: 15227619 NR Description: hypothetical protein; protein id: At2g29760.1
  misc_feature (593)..(1257): Homolog of NCBI NO: 9279687 NR Description: gb|AAC35225.1~gene_id:MWI23.6~strong similarity
  misc_feature (593)..(1257): Homolog of NCBI NO: 15228829 NR Description: hypothetical protein; protein id: At3g22690.1
  misc_feature (802)..(1263): Homolog of NCBI NO: 15228028 NR Description: hypothetical protein; protein id: At2g42920.1
MAFSRIALLCQRFSRQQQQRQLLHRPLTTKLDNTRFLHPNQSKLAQNLIVIFTRQPFSPDDPELLILSPELNTKVVETVLNGFKRWGLAYLFFNWASKQEGYRNDMYAYNAMASILSRARQNASLKALVVDVLNSRCFMSPGAFGFFIRCLGNAGLVDEASSVFDRVREMGLCVPNAYTYNCLLEAISKSNSSSVELVEARLKEMRDCGFHFDKFTLTPVLQVYCNTGKSERALSVFNEILSRGWLDEHISTILVVSFCKWGQVDKAFELIEMLEERDIRLNYKTYCVLIHGFVKESRIDKAFQLFEKMRRMGMNADIALYDVLIGGLCKHKDLEMALSLYLEIKRSGIPPDRGILGKLLCSFSEESELSRITEVIIGDIDKKSVMLLYKSLFEGFIRNDLVHEAYSFIQNLMGNYESDGVSEIVKLLKDHNKAILPDSDSLSIVINCLVKANKVDMAVTLLHDIVQNGLIPGPMMYNNIIEGMCKEGRSEESLKLLGEMKDAGVEPSQFTLNCIYGCLAERCDFVGALDLLKKMRFYGFEPWIKHTTFLVKKLCENGRAVDACKYLDDVAGEGFLGHMVASTAAIDGLIKNEGVDRGLELFRDICANGHCPDVIAYHVLIKALCKACRTMEADILFNEMVSKGLKPTVATYNSMIDGWCKEGEIDRGLSCIVRMYEDEKNPDVITYTSLIHGLCASGRPSEAIFRWNEMKGKDCYPNRITFMALIQGLCKCGWSGEALVYFREMEEKEMEPDSAVYLSLVSSFLSSENINAGFGIFREMVHKGRFPVSVDRNYMLAVNVTSDVDYAYKFLSKLSDPPNYGWNFVIRGFSNSRNPEKSISVYIQMLRFGLLPDHMTYPFLMKSSSRLSNRKLGGSLHCSVVKSGLEWDLFICNTLIHMYGSFRDQASARKLFDEMPHKNLVTWNSILDAYAKSGDVVSARLVFDEMSERDVVTWSSMIDGYVKRGEYNKALEIFDQMMRMGSSKANEVTMVSVICACAHLGALNRGKTVHRYILDVHLPLTVILQTSLIDMYAKCGSIGDAWSVFYRASVKETDALMWNAIIGGLASHGFIRESLQLFHKMRESKIDPDEITFLCLLAACSHGGLVKEAWHFFKSLKESGAEPKSEHYACMVDVLSRAGLVKDAHDFISEMPIKPTGSMLGALLNGCINHGNLELAETVGKKLIELQPHNDGRYVGLANVYAINKQFRAARSMREAMEKKGVKKIAGHSILDLDGTRHRFIAHDKTHFHSDKIYAVLQLTGAWMNLDVDYDDQDNHCFCS

SEQ ID NO: 79423 - protein, 1175 aa, Arabidopsis thaliana
  peptide (1)..(1175): Ceres Seq. ID no. 12651247
  misc_feature (405)..(439): Pfam Name: PPR repeat Pfam Description: PPR repeat
  misc_feature (720)..(1174): Homolog of NCBI NO: 37534772 NR Description: putative selenium-binding protein [Oryza sativa
  misc_feature (696)..(1148): Homolog of NCBI NO: 15240085 NR Description: selenium-binding protein-like; protein id:
  misc_feature (694)..(1148): Homolog of NCBI NO: 15239979 NR Description: selenium-binding protein-like; protein id:
  misc_feature (717)..(1152): Homolog of NCBI NO: 15229340 NR Description: putative protein; protein id: At3g62890.1
  misc_feature (535)..(1167): Homolog of NCBI NO: 15225445 NR Description: hypothetical protein; protein id: At2g13600.1
  misc_feature (583)..(1159): Homolog of NCBI NO: 15227199 NR Description: hypothetical protein; protein id: At2g22410.1, by cDNA: gi_18086348 [Arabidopsis thaliana]
  misc_feature (698)..(1152): Homolog of NCBI NO: 15227619 NR Description: hypothetical protein; protein id: At2g29760.1
  misc_feature (488)..(1152): Homolog of NCBI NO: 9279687 NR Description: gb|AAC35225.1~gene_id:MWI23.6~strong similarity
  misc_feature (488)..(1152): Homolog of NCBI NO: 15228829 NR Description: hypothetical protein; protein id: At3g22690.1
  misc_feature (697)..(1158): Homolog of NCBI NO: 15228028 NR Description: hypothetical protein; protein id: At2g42920.1
MYAYNAMASILSRARQNASLKALVVDVLNSRCFMSPGAFGFFIRCLGNAGLVDEASSVFDRVREMGLCVPNAYTYNCLLEAISKSNSSSVELVEARLKEMRDCGFHFDKFTLTPVLQVYCNTGKSERALSVFNEILSRGWLDEHISTILVVSFCKWGQVDKAFELIEMLEERDIRLNYKTYCVLIHGFVKESRIDKAFQLFEKMRRMGMNADIALYDVLIGGLCKHKDLEMALSLYLEIKRSGIPPDRGILGKLLCSFSEESELSRITEVIIGDIDKKSVMLLYKSLFEGFIRNDLVHEAYSFIQNLMGNYESDGVSEIVKLLKDHNKAILPDSDSLSIVINCLVKANKVDMAVTLLHDIVQNGLIPGPMMYNNIIEGMCKEGRSEESLKLLGEMKDAGVEPSQFTLNCIYGCLAERCDFVGALDLLKKMRFYGFEPWIKHTTFLVKKLCENGRAVDACKYLDDVAGEGFLGHMVASTAAIDGLIKNEGVDRGLELFRDICANGHCPDVIAYHVLIKALCKACRTMEADILFNEMVSKGLKPTVATYNSMIDGWCKEGEIDRGLSCIVRMYEDEKNPDVITYTSLIHGLCASGRPSEAIFRWNEMKGKDCYPNRITFMALIQGLCKCGWSGEALVYFREMEEKEMEPDSAVYLSLVSSFLSSENINAGFGIFREMVHKGRFPVSVDRNYMLAVNVTSDVDYAYKFLSKLSDPPNYGWNFVIRGFSNSRNPEKSISVYIQMLRFGLLPDHMTYPFLMKSSSRLSNRKLGGSLHCSVVKSGLEWDLFICNTLIHMYGSFRDQASARKLFDEMPHKNLVTWNSILDAYAKSGDVVSARLVFDEMSERDVVTWSSMIDGYVKRGEYNKALEIFDQMMRMGSSKANEVTMVSVICACAHLGALNRGKTVHRYILDVHLPLTVILQTSLIDMYAKCGSIGDAWSVFYRASVKETDALMWNAIIGGLASHGFIRESLQLFHKMRESKIDPDEITFLCLLAACSHGGLVKEAWHFFKSLKESGAEPKSEHYACMVDVLSRAGLVKDAHDFISEMPIKPTGSMLGALLNGCINHGNLELAETVGKKLIELQPHNDGRYVGLANVYAINKQFRAARSMREAMEKKGVKKIAGHSILDLDGTRHRFIAHDKTHFHSDKIYAVLQLTGAWMNLDVDYDDQDNHCFCS

SEQ ID NO: 79424 - protein, 1169 aa, Arabidopsis thaliana
  peptide (1)..(1169): Ceres Seq. ID no. 12651248
  misc_feature (399)..(433): Pfam Name: PPR repeat Pfam Description: PPR repeat
  misc_feature (714)..(1168): Homolog of NCBI NO: 37534772 NR Description: putative selenium-binding protein [Oryza sativa
  misc_feature (690)..(1142): Homolog of NCBI NO: 15240085 NR Description: selenium-binding protein-like; protein id:
  misc_feature (688)..(1142): Homolog of NCBI NO: 15239979 NR Description: selenium-binding protein-like; protein id:
  misc_feature (711)..(1146): Homolog of NCBI NO: 15229340 NR Description: putative protein; protein id: At3g62890.1
  misc_feature (529)..(1161): Homolog of NCBI NO: 15225445 NR Description: hypothetical protein; protein id: At2g13600.1
  misc_feature (577)..(1153): Homolog of NCBI NO: 15227199 NR Description: hypothetical protein; protein id: At2g22410.1, by cDNA: gi_18086348 [Arabidopsis thaliana]
  misc_feature (692)..(1146): Homolog of NCBI NO: 15227619 NR Description: hypothetical protein; protein id: At2g29760.1
  misc_feature (482)..(1146): Homolog of NCBI NO: 9279687 NR Description: gb|AAC35225.1~gene_id:MWI23.6~strong similarity
  misc_feature (482)..(1146): Homolog of NCBI NO: 15228829 NR Description: hypothetical protein; protein id: At3g22690.1
  misc_feature (691)..(1152): Homolog of NCBI NO: 15228028 NR Description: hypothetical protein; protein id: At2g42920.1
MASILSRARQNASLKALVVDVLNSRCFMSPGAFGFFIRCLGNAGLVDEASSVFDRVREMGLCVPNAYTYNCLLEAISKSNSSSVELVEARLKEMRDCGFHFDKFTLTPVLQVYCNTGKSERALSVFNEILSRGWLDEHISTILVVSFCKWGQVDKAFELIEMLEERDIRLNYKTYCVLIHGFVKESRIDKAFQLFEKMRRMGMNADIALYDVLIGGLCKHKDLEMALSLYLEIKRSGIPPDRGILGKLLCSFSEESELSRITEVIIGDIDKKSVMLLYKSLFEGFIRNDLVHEAYSFIQNLMGNYESDGVSEIVKLLKDHNKAILPDSDSLSIVINCLVKANKVDMAVTLLHDIVQNGLIPGPMMYNNIIEGMCKEGRSEESLKLLGEMKDAGVEPSQFTLNCIYGCLAERCDFVGALDLLKKMRFYGFEPWIKHTTFLVKKLCENGRAVDACKYLDDVAGEGFLGHMVASTAAIDGLIKNEGVDRGLELFRDICANGHCPDVIAYHVLIKALCKACRTMEADILFNEMVSKGLKPTVATYNSMIDGWCKEGEIDRGLSCIVRMYEDEKNPDVITYTSLIHGLCASGRPSEAIFRWNEMKGKDCYPNRITFMALIQGLCKCGWSGEALVYFREMEEKEMEPDSAVYLSLVSSFLSSENINAGFGIFREMVHKGRFPVSVDRNYMLAVNVTSDVDYAYKFLSKLSDPPNYGWNFVIRGFSNSRNPEKSISVYIQMLRFGLLPDHMTYPFLMKSSSRLSNRKLGGSLHCSVVKSGLEWDLFICNTLIHMYGSFRDQASARKLFDEMPHKNLVTWNSILDAYAKSGDVVSARLVFDEMSERDVVTWSSMIDGYVKRGEYNKALEIFDQMMRMGSSKANEVTMVSVICACAHLGALNRGKTVHRYILDVHLPLTVILQTSLIDMYAKCGSIGDAWSVFYRASVKETDALMWNAIIGGLASHGFIRESLQLFHKMRESKIDPDEITFLCLLAACSHGGLVKEAWHFFKSLKESGAEPKSEHYACMVDVLSRAGLVKDAHDFISEMPIKPTGSMLGALLNGCINHGNLELAETVGKKLIELQPHNDGRYVGLANVYAINKQFRAARSMREAMEKKGVKKIAGHSILDLDGTRHRFIAHDKTHFHSDKIYAVLQLTGAWMNLDVDYDDQDNHCFCS

SEQ ID NO: 79425 - DNA, 1383 bp, Arabidopsis thaliana
  misc_feature (1)..(1383): Ceres Seq. ID no. 12651257
  misc_feature: MA Experiment ID: 20000185 Result: Down-regulated in Transcription
  misc_feature: MA Experiment 20000185 PARAMETER Experiment Name: At_Roots__P Parameter: Age (day) Value: 7 vs. 21
  misc_feature: MA Experiment 20000185 PARAMETER Experiment Name: At_Roots__P Parameter: Organism Value: A. thaliana
  misc_feature: MA Experiment 20000185 PARAMETER Experiment Name: At_Roots__P Parameter: Tissue Value: Roots vs. Whole Plant
  misc_feature: MA Experiment ID: 20001247 Result: Down-regulated in Transcription
  misc_feature: MA Experiment 20001247 PARAMETER Experiment Name: At_Far-red-induction_P Parameter: Age (day) Value: 7
  misc_feature: MA Experiment 20001247 PARAMETER Experiment Name: At_Far-red-induction_P Parameter: Light Value: Far-red vs. White
  misc_feature: MA Experiment 20001247 PARAMETER Experiment Name: At_Far-red-induction_P Parameter: Organism Value: A. thaliana
  misc_feature: MA Experiment 20001247 PARAMETER Experiment Name: At_Far-red-induction_P Parameter: Plant Line Value: Columbia
  misc_feature: MA Experiment 20001247 PARAMETER Experiment Name: At_Far-red-induction_P Parameter: Timepoint (hr) Value: 1
  misc_feature: MA Experiment 20001247 PARAMETER Experiment Name: At_Far-red-induction_P Parameter: Tissue Value: Whole Plant
  misc_feature: MA Experiment ID: 20001555 Result: Up-regulated in Transcription
  misc_feature: MA Experiment 20001555 PARAMETER Experiment Name: At_Drought_Soil_Dry_P Parameter: Age (day) Value: 24
  misc_feature: MA Experiment 20001555 PARAMETER Experiment Name: At_Drought_Soil_Dry_P Parameter: Organism Value: A. thaliana
  misc_feature: MA Experiment 20001555 PARAMETER Experiment Name: At_Drought_Soil_Dry_P Parameter: Plant Line Value: WS
  misc_feature: MA Experiment 20001555 PARAMETER Experiment Name: At_Drought_Soil_Dry_P Parameter: Post Timepoint (hr) Value: None
  misc_feature: MA Experiment 20001555 PARAMETER Experiment Name: At_Drought_Soil_Dry_P Parameter: Post-Treatment Value: None
  misc_feature: MA Experiment 20001555 PARAMETER Experiment Name: At_Drought_Soil_Dry_P Parameter: Timepoint (day) Value: 10
  misc_feature: MA Experiment 20001555 PARAMETER Experiment Name: At_Drought_Soil_Dry_P Parameter: Treatment Value: Drought vs. No Drought
  misc_feature: MA Experiment ID: 20001556 Result: Up-regulated in Transcription
  misc_feature: MA Experiment 20001556 PARAMETER Experiment Name: At_Drought_Soil_Dry_P Parameter: Age (day) Value: 26
  misc_feature: MA Experiment 20001556 PARAMETER Experiment Name: At_Drought_Soil_Dry_P Parameter: Organism Value: A. thaliana
  misc_feature: MA Experiment 20001556 PARAMETER Experiment Name: At_Drought_Soil_Dry_P Parameter: Plant Line Value: WS
  misc_feature: MA Experiment 20001556 PARAMETER Experiment Name: At_Drought_Soil_Dry_P Parameter: Post Timepoint (hr) Value: None
  misc_feature: MA Experiment 20001556 PARAMETER Experiment Name: At_Drought_Soil_Dry_P Parameter: Post-Treatment Value: None
  misc_feature: MA Experiment 20001556 PARAMETER Experiment Name: At_Drought_Soil_Dry_P Parameter: Timepoint (day) Value: 12
  misc_feature: MA Experiment 20001556 PARAMETER Experiment Name: At_Drought_Soil_Dry_P Parameter: Treatment Value: Drought vs. No Drought
  misc_feature: MA Experiment ID: 20001559 Result: Up-regulated in Transcription
  misc_feature: MA Experiment 20001559 PARAMETER Experiment Name: At_Drought_Soil_Dry_P Parameter: Age (day) Value: 28
  misc_feature: MA Experiment 20001559 PARAMETER Experiment Name: At_Drought_Soil_Dry_P Parameter: Organism Value: A. thaliana
  misc_feature: MA Experiment 20001559 PARAMETER Experiment Name: At_Drought_Soil_Dry_P Parameter: Plant Line Value: WS
  misc_feature: MA Experiment 20001559 PARAMETER Experiment Name: At_Drought_Soil_Dry_P Parameter: Post Timepoint (hr) Value: 29
  misc_feature: MA Experiment 20001559 PARAMETER Experiment Name: At_Drought_Soil_Dry_P Parameter: Post-Treatment Value: Re-Water vs. No Drought
  misc_feature: MA Experiment 20001559 PARAMETER Experiment Name: At_Drought_Soil_Dry_P Parameter: Timepoint (day) Value: 14
  misc_feature: MA Experiment 20001559 PARAMETER Experiment Name: At_Drought_Soil_Dry_P Parameter: Treatment Value: Drought vs. No Drought
acagtaacgagatcgacaaggaaaaaaaatgtacgaaaataatctcttaacgctctcttcatgcaccatgaatctcaatttcgctttctccccattccttgtctctcagagacaaccattctcttcccacaagcgtaatcttcacactctcgttgctgtttctgctaattccgacaacctcgccggtgaagataacggcggaatttcggcggcaaataaaggttctgggactacagcgagaggaaggagattactcaaggttagagaagagaagcgaaaacgcgactacgatcgtcttcacgattacccatcttgggccaagtacttgtttctttccttttcttttgcactccaggtgtttgtgtttttgcctaagtcacgagaaagtgtgaacctttttttggtgaatgataaatgcagggtactggaaagtgcgtgtaaagatgatgaagagcttcgagctgttcttggtgatagcataggaaatcctgagctcatgagaaagaaggttgaagaaagagttaggaagaagggaaaagatttccagaaacagaagactggttctgtgctttctttcaaagttaacttcagagatttcaatcctgtagattccttcatatggtttgagctctatggaacgccttcagatcgagatgttgatctcattggaagtgttatacaggcatggtatgttatggggcgattgggcgctttcaatacatccaacttgcagctagcaaacacatccctagaatatgatcctctctatgacgcagagaagggcttcaaagtgatgccttcatcgtttcatgacattagcgatgtcgaatttcaagacaactggggtcgtgtgtgggttgatcttggtacttccgatatcttcgcccttgatgtgcttctcaactgtttgacagttatgagttcagagtacttgggcattcaacaagtagtatttggtggtaaacgaatgggagattgggaagagggaatgacaaatcctgattttgggtataagtacttcaagatctgaatcttctacaaaacagttttgttaaatataggcttcttttttgtgctcttaagaacaaatagctaaacagtgtggaagaaatgataacctagatcaatacaacaaccgaaatggctctttacacaccaagttagcttgaaacgagagacagtaccgtatccatacgcaaggcaaaggttacggacccgagcagtggccatacgcaatacgcgagggttagttagtcttccatagactctattggttagcttggtagagttaggctttagtactgttaaactccacattggaaccaaatccacatccaaaaagtatcacgatgaaacttcttgaaatgttaagttgagttcatg

SEQ ID NO: 79426 - protein, 333 aa, Arabidopsis thaliana
  peptide (1)..(333): Ceres Seq. ID no. 12651258
  misc_feature (1)..(333): Homolog of NCBI NO: 22326661 NR Description: putative protein; protein id: At5g08400.1, by cDNA: gi_18086462 [Arabidopsis thaliana] unknown protein [Arabidopsis thaliana]
  misc_feature (131)..(333): Homolog of NCBI NO: 10178282 NR Description: putative protein [Arabidopsis thaliana]
  misc_feature (14)..(100): Homolog of NCBI NO: 10178282 NR Description: putative protein [Arabidopsis thaliana]
  misc_feature (140)..(333): Homolog of NCBI NO: 15233566 NR Description: putative protein; protein id: At4g29400.1
  misc_feature (140)..(302): Homolog of NCBI NO: 34914062 NR Description: B1144D11.25 [Oryza sativa (japonica
  misc_feature (184)..(328): Homolog of NCBI NO: 23126484 NR Description: hypothetical protein [Nostoc punctiforme]
  misc_feature (184)..(325): Homolog of NCBI NO: 16329966 NR Description: unknown protein [Synechocystis sp. PCC 6803]
  misc_feature (184)..(328): Homolog of NCBI NO: 23041048 NR Description: hypothetical protein [Trichodesmium erythraeum
  misc_feature (184)..(318): Homolog of NCBI NO: 33240475 NR Description: Uncharacterized protein [Prochlorococcus marinus marinus str. CCMP1375] >gi|33238003|gb|AAQ00070.1|
  misc_feature (185)..(317): Homolog of NCBI NO: 33861224 NR Description: conserved hypothetical protein [Prochlorococcus subsp. pastoris str. CCMP1378] >gi|33639956|emb|CAE19126.1| hypothetical protein [Prochlorococcus marinus subsp. pastoris
MYENNLLTLSSCTMNLNFAFSPFLVSQRQPFSSHKRNLHTLVAVSANSDNLAGEDNGGISAANKGSGTTARGRRLLKVREEKRKRDYDRLHDYPSWAKYLFLSFSFALQVFVFLPKSRESVNLFLVNDKCRVLESACKDDEELRAVLGDSIGNPELMRKKVEERVRKKGKDFQKQKTGSVLSFKVNFRDFNPVDSFIWFELYGTPSDRDVDLIGSVIQAWYVMGRLGAFNTSNLQLANTSLEYDPLYDAEKGFKVMPSSFHDISDVEFQDNWGRVWVDLGTSDIFALDVLLNCLTVMSSEYLGIQQVVFGGKRMGDWEEGMTNPDFGYKYFKI

SEQ ID NO: 79427 - protein, 320 aa, Arabidopsis thaliana
  peptide (1)..(320): Ceres Seq. ID no. 12651259
  misc_feature (1)..(320): Homolog of NCBI NO: 22326661 NR Description: putative protein; protein id: At5g08400.1, by cDNA: gi_18086462 [Arabidopsis thaliana] unknown protein [Arabidopsis thaliana]
  misc_feature (118)..(320): Homolog of NCBI NO: 10178282 NR Description: putative protein [Arabidopsis thaliana]
  misc_feature (1)..(87): Homolog of NCBI NO: 10178282 NR Description: putative protein [Arabidopsis thaliana]
  misc_feature (127)..(320): Homolog of NCBI NO: 15233566 NR Description: putative protein; protein id: At4g29400.1
  misc_feature (127)..(289): Homolog of NCBI NO: 34914062 NR Description: B1144D11.25 [Oryza sativa (japonica
  misc_feature (171)..(315): Homolog of NCBI NO: 23126484 NR Description: hypothetical protein [Nostoc punctiforme]
  misc_feature (171)..(312): Homolog of NCBI NO: 16329966 NR Description: unknown protein [Synechocystis sp. PCC 6803]
  misc_feature (171)..(315): Homolog of NCBI NO: 23041048 NR Description: hypothetical protein [Trichodesmium erythraeum
  misc_feature (171)..(305): Homolog of NCBI NO: 33240475 NR Description: Uncharacterized protein [Prochlorococcus marinus marinus str. CCMP1375] >gi|33238003|gb|AAQ00070.1|
  misc_feature (172)..(304): Homolog of NCBI NO: 33861224 NR Description: conserved hypothetical protein [Prochlorococcus subsp. pastoris str. CCMP1378] >gi|33639956|emb|CAE19126.1| hypothetical protein [Prochlorococcus marinus subsp. pastoris
MNLNFAFSPFLVSQRQPFSSHKRNLHTLVAVSANSDNLAGEDNGGISAANKGSGTTARGRRLLKVREEKRKRDYDRLHDYPSWAKYLFLSFSFALQVFVFLPKSRESVNLFLVNDKCRVLESACKDDEELRAVLGDSIGNPELMRKKVEERVRKKGKDFQKQKTGSVLSFKVNFRDFNPVDSFIWFELYGTPSDRDVDLIGSVIQAWYVMGRLGAFNTSNLQLANTSLEYDPLYDAEKGFKVMPSSFHDISDVEFQDNWGRVWVDLGTSDIFALDVLLNCLTVMSSEYLGIQQVVFGGKRMGDWEEGMTNPDFGYKYFKI

SEQ ID NO: 79428 - protein, 177 aa, Arabidopsis thaliana
  peptide (1)..(177): Ceres Seq. ID no. 12651260
  misc_feature (1)..(177): Homolog of NCBI NO: 22326661 NR Description: putative protein; protein id: At5g08400.1, by cDNA: gi_18086462 [Arabidopsis thaliana] unknown protein [Arabidopsis thaliana]
  misc_feature (1)..(177): Homolog of NCBI NO: 10178282 NR Description: putative protein [Arabidopsis thaliana]
  misc_feature (1)..(177): Homolog of NCBI NO: 15233566 NR Description: putative protein; protein id: At4g29400.1
  misc_feature (1)..(146): Homolog of NCBI NO: 34914062 NR Description: B1144D11.25 [Oryza sativa (japonica
  misc_feature (28)..(172): Homolog of NCBI NO: 23126484 NR Description: hypothetical protein [Nostoc punctiforme]
  misc_feature (28)..(169): Homolog of NCBI NO: 16329966 NR Description: unknown protein [Synechocystis sp. PCC 6803]
  misc_feature (28)..(172): Homolog of NCBI NO: 23041048 NR Description: hypothetical protein [Trichodesmium erythraeum
  misc_feature (28)..(162): Homolog of NCBI NO: 33240475 NR Description: Uncharacterized protein [Prochlorococcus marinus marinus str. CCMP1375] >gi|33238003|gb|AAQ00070.1|
  misc_feature (29)..(161): Homolog of NCBI NO: 33861224 NR Description: conserved hypothetical protein [Prochlorococcus subsp. pastoris str. CCMP1378] >gi|33639956|emb|CAE19126.1| hypothetical protein [Prochlorococcus marinus subsp. pastoris
  misc_feature (29)..(161): Homolog of NCBI NO: 33863059 NR Description: conserved hypothetical protein [Prochlorococcus str. MIT 9313] >gi|33634976|emb|CAE20962.1| conserved
MRKKVEERVRKKGKDFQKQKTGSVLSFKVNFRDFNPVDSFIWFELYGTPSDRDVDLIGSVIQAWYVMGRLGAFNTSNLQLANTSLEYDPLYDAEKGFKVMPSSFHDISDVEFQDNWGRVWVDLGTSDIFALDVLLNCLTVMSSEYLGIQQVVFGGKRMGDWEEGMTNPDFGYKYFKI

SEQ ID NO: 79429 - DNA, 1998 bp, Arabidopsis thaliana
  misc_feature (1)..(1998): Ceres Seq. ID no. 12651269
  misc_feature: MA Experiment ID: 20000184 Result: Down-regulated in Transcription
  misc_feature: MA Experiment 20000184 PARAMETER Experiment Name: At_Shoots__P Parameter: Age (day) Value: 7
  misc_feature: MA Experiment 20000184 PARAMETER Experiment Name: At_Shoots__P Parameter: Tissue Value: Shoots vs. Whole Plant
aatctcagcttgaatcacactgacgaaggcatcttcctgcgattatggcgtcgccggcaggtgaaacagcagcggttgttgagggcggagatgggcagcagcaacgacaagctggtgggtttgggcagacaattaccggaatcataagaatcgccgtcttctgttactttgcttctaagttcttttctcccaaacaaaaacctgcggatccttccaagcctactcatctcatgtccaatctatttcagaggggcgagcccatagatatgtggttttatctttcggagcatgagaaattcaatgacttcggcaatgaaggtgcgcttatttggcatgagacaaacataccttatgctgtgtggaaaccagagagcactaggaccttgtcaatgacgtactatccttccgaggcactgaagaataatggaagtctgtatgctcatgtcttctttgctctatctggttatcctatagatcttagtgatcctgaataccagcctctcaactgctttggcaggactcaccctgttgcaacttacttaccaaagcgaaaagcagataagaagaagagtctgttgggaaatcccaaagactctgatgaatcccatgtggaagttgaggaggttgatggtaaggactcggatctcaaggatgagggccctgtggaatgggtatcctactggaaaccaaatgtcacaattaacctagtcgatgactttactcgctatccacagcatggtgtaccaccaaacatttatccttacttactggtggaacctagtacaataaactactaccctacagttttcttcaatgagttttggttgctaagggacaagttgattttaatcaatgagacggtctcagagctgccacttaatctggaagtaagccccataagcatgacaaagtggcagctgtttcagcagattgatcagtctttccagattcaccgtagctatggaagcatgcttgatggtgaatctgacgaactaaagagggtgtttttggaaggaaatccctatctgttgggcgtcactatgtttgtttcgatgcttcattctgtattcgacttccttgcattcaaaaatgatatccagttttggaacaagaacaaatctatggaaggactgtctgcgaagtctgtcgtactaaactttatctgtcagtttatcatcttcctctacctgcttgacaacgacacttcatggatgatactggctagctctggagttggtgtctgcatcgagttctggaaaattgggaaagccatgcgcattgaggttgatcgaagtgggatgattccaagattgaggttccacgaccgtgaatcctatgcaagcaacaagaccaaggagtatgacgacattgccatcaaattcttatcctatgtgctcctccttcttgttgtgggtttctccatatattcacttgcctatgaacgccacaagagctggtactcatggatcctatcttcactaacgagctgcgtctacatgtttggtttcataatgatgtgtcctcaattgttcatcaactataagctgaagtcagtagcacatttaccatggaggcaaatgacatataagttcctcaacacaatcatcgacgatctctttgcttttgtcatcaaaatgccaatgttgcatcgcctttctgtcttccgagatgatgtgatattcttaatatacttgtaccagagatgggtttatcctgtggacaaaacacgtgtcaacgagtttggttttggaggtgaggatgagtctgtggatacaaagaagatctctgaccaagaagatgacaagaaaacaaactaattagctttgtgcttttgtttttccctaacaattttgagtttttttgggtctgctttagtaagttttgttaatgctacttatatccaaaagtaatttcgttttagggtaatataaaaaaaaaagtgttaaagaatatcacttagttataattttgttttgtttatatgtaactttagttctc

SEQ ID NO: 79430 - protein, 590 aa, Arabidopsis thaliana
  peptide (1)..(590): Ceres Seq. ID no. 12651270
  misc_feature (27)..(574): Pfam Name: Cleft lip and palate transmembrane protein 1 (CLPTM1) Pfam Description: Cleft lip and palate transmembrane protein 1
  misc_feature (1)..(590): Homolog of NCBI NO: 22327014 NR Description: Expressed protein; protein id: At5g23575.1, by cDNA: gi_17381231 [Arabidopsis thaliana] AT5g08500/MAH20_6 [Arabidopsis thaliana]
  misc_feature (1)..(590): Homolog of NCBI NO: 8809702 NR Description: gb|AAC97420.1~gene_id:MQM1.16~strong similarity
  misc_feature (1)..(573): Homolog of NCBI NO: 38346578 NR Description: OSJNBa0064D20.9 [Oryza sativa (japonica
  misc_feature (28)..(572): Homolog of NCBI NO: 4502897 NR Description: cleft lip and palate associated transmembrane protein 1 [Homo sapiens] >gi|4063033|gb|AAC98151.1| associated
  misc_feature (28)..(572): Homolog of NCBI NO: 13436080 NR Description: cleft lip and palate associated transmembrane
  misc_feature (28)..(572): Homolog of NCBI NO: 32880151 NR Description: cleft lip and palate associated transmembrane
  misc_feature (28)..(574): Homolog of NCBI NO: 27676422 NR Description: similar to cleft lip and palate associated
  misc_feature (28)..(574): Homolog of NCBI NO: 18381157 NR Description: Similar to cleft lip and palate associated
  misc_feature (30)..(573): Homolog of NCBI NO: 39586797 NR Description: Hypothetical protein CBG10971 [Caenorhabditis
  misc_feature (1)..(573): Homolog of NCBI NO: 17550864 NR Description: Putative endoplasmic reticulum membrane protein member, with at least 5 transmembrane domains, of eukaryotic [Caenorhabditis elegans] >gi|14573912|gb|AAK68233.1|AC006615_7
MASPAGETAAVVEGGDGQQQRQAGGFGQTITGIIRIAVFCYFASKFFSPKQKPADPSKPTHLMSNLFQRGEPIDMWFYLSEHEKFNDFGNEGALIWHETNIPYAVWKPESTRTLSMTYYPSEALKNNGSLYAHVFFALSGYPIDLSDPEYQPLNCFGRTHPVATYLPKRKADKKKSLLGNPKDSDESHVEVEEVDGKDSDLKDEGPVEWVSYWKPNVTINLVDDFTRYPQHGVPPNIYPYLLVEPSTINYYPTVFFNEFWLLRDKLILINETVSELPLNLEVSPISMTKWQLFQQIDQSFQIHRSYGSMLDGESDELKRVFLEGNPYLLGVTMFVSMLHSVFDFLAFKNDIQFWNKNKSMEGLSAKSVVLNFICQFIIFLYLLDNDTSWMILASSGVGVCIEFWKIGKAMRIEVDRSGMIPRLRFHDRESYASNKTKEYDDIAIKFLSYVLLLLVVGFSIYSLAYERHKSWYSWILSSLTSCVYMFGFIMMCPQLFINYKLKSVAHLPWRQMTYKFLNTIIDDLFAFVIKMPMLHRLSVFRDDVIFLIYLYQRWVYPVDKTRVNEFGFGGEDESVDTKKISDQEDDKKTN

SEQ ID NO: 79431 - protein, 528 aa, Arabidopsis thaliana
  peptide (1)..(528): Ceres Seq. ID no. 12651271
  misc_feature (1)..(512): Pfam Name: Cleft lip and palate transmembrane protein 1 (CLPTM1) Pfam Description: Cleft lip and palate transmembrane protein 1
  misc_feature (1)..(528): Homolog of NCBI NO: 22327014 NR Description: Expressed protein; protein id: At5g23575.1, by cDNA: gi_17381231 [Arabidopsis thaliana] AT5g08500/MAH20_6 [Arabidopsis thaliana]
  misc_feature (1)..(528): Homolog of NCBI NO: 8809702 NR Description: gb|AAC97420.1~gene_id:MQM1.16~strong similarity
  misc_feature (1)..(511): Homolog of NCBI NO: 38346578 NR Description: OSJNBa0064D20.9 [Oryza sativa (japonica
  misc_feature (1)..(510): Homolog of NCBI NO: 4502897 NR Description: cleft lip and palate associated transmembrane protein 1 [Homo sapiens] >gi|4063033|gb|AAC98151.1| associated
  misc_feature (1)..(510): Homolog of NCBI NO: 13436080 NR Description: cleft lip and palate associated transmembrane
  misc_feature (1)..(510): Homolog of NCBI NO: 32880151 NR Description: cleft lip and palate associated transmembrane
  misc_feature (1)..(512): Homolog of NCBI NO: 27676422 NR Description: similar to cleft lip and palate associated
  misc_feature (1)..(512): Homolog of NCBI NO: 18381157 NR Description: Similar to cleft lip and palate associated
  misc_feature (1)..(511): Homolog of NCBI NO: 39586797 NR Description: Hypothetical protein CBG10971 [Caenorhabditis
  misc_feature (1)..(511): Homolog of NCBI NO: 17550864 NR Description: Putative endoplasmic reticulum membrane protein member, with at least 5 transmembrane domains, of eukaryotic [Caenorhabditis elegans] >gi|14573912|gb|AAK68233.1|AC006615_7
MSNLFQRGEPIDMWFYLSEHEKFNDFGNEGALIWHETNIPYAVWKPESTRTLSMTYYPSEALKNNGSLYAHVFFALSGYPIDLSDPEYQPLNCFGRTHPVATYLPKRKADKKKSLLGNPKDSDESHVEVEEVDGKDSDLKDEGPVEWVSYWKPNVTINLVDDFTRYPQHGVPPNIYPYLLVEPSTINYYPTVFFNEFWLLRDKLILINETVSELPLNLEVSPISMTKWQLFQQIDQSFQIHRSYGSMLDGESDELKRVFLEGNPYLLGVTMFVSMLHSVFDFLAFKNDIQFWNKNKSMEGLSAKSVVLNFICQFIIFLYLLDNDTSWMILASSGVGVCIEFWKIGKAMRIEVDRSGMIPRLRFHDRESYASNKTKEYDDIAIKFLSYVLLLLVVGFSIYSLAYERHKSWYSWILSSLTSCVYMFGFIMMCPQLFINYKLKSVAHLPWRQMTYKFLNTIIDDLFAFVIKMPMLHRLSVFRDDVIFLIYLYQRWVYPVDKTRVNEFGFGGEDESVDTKKISDQEDDKKTN

SEQ ID NO: 79432 - protein, 516 aa, Arabidopsis thaliana
  peptide (1)..(516): Ceres Seq. ID no. 12651272
  misc_feature (1)..(500): Pfam Name: Cleft lip and palate transmembrane protein 1 (CLPTM1) Pfam Description: Cleft lip and palate transmembrane protein 1
  misc_feature (1)..(516): Homolog of NCBI NO: 22327014 NR Description: Expressed protein; protein id: At5g23575.1, by cDNA: gi_17381231 [Arabidopsis thaliana] AT5g08500/MAH20_6 [Arabidopsis thaliana]
  misc_feature (1)..(516): Homolog of NCBI NO: 8809702 NR Description: gb|AAC97420.1~gene_id:MQM1.16~strong similarity
  misc_feature (1)..(499): Homolog of NCBI NO: 38346578 NR Description: OSJNBa0064D20.9 [Oryza sativa (japonica
  misc_feature (1)..(498): Homolog of NCBI NO: 4502897 NR Description: cleft lip and palate associated transmembrane protein 1 [Homo sapiens] >gi|4063033|gb|AAC98151.1| associated
  misc_feature (1)..(498): Homolog of NCBI NO: 13436080 NR Description: cleft lip and palate associated transmembrane
  misc_feature (1)..(498): Homolog of NCBI NO: 32880151 NR Description: cleft lip and palate associated transmembrane
  misc_feature (1)..(500): Homolog of NCBI NO: 27676422 NR Description: similar to cleft lip and palate associated
  misc_feature (1)..(500): Homolog of NCBI NO: 18381157 NR Description: Similar to cleft lip and palate associated
  misc_feature (1)..(499): Homolog of NCBI NO: 39586797 NR Description: Hypothetical protein CBG10971 [Caenorhabditis
  misc_feature (1)..(499): Homolog of NCBI NO: 17550864 NR Description: Putative endoplasmic reticulum membrane protein member, with at least 5 transmembrane domains, of eukaryotic [Caenorhabditis elegans] >gi|14573912|gb|AAK68233.1|AC006615_7
MWFYLSEHEKFNDFGNEGALIWHETNIPYAVWKPESTRTLSMTYYPSEALKNNGSLYAHVFFALSGYPIDLSDPEYQPLNCFGRTHPVATYLPKRKADKKKSLLGNPKDSDESHVEVEEVDGKDSDLKDEGPVEWVSYWKPNVTINLVDDFTRYPQHGVPPNIYPYLLVEPSTINYYPTVFFNEFWLLRDKLILINETVSELPLNLEVSPISMTKWQLFQQIDQSFQIHRSYGSMLDGESDELKRVFLEGNPYLLGVTMFVSMLHSVFDFLAFKNDIQFWNKNKSMEGLSAKSVVLNFICQFIIFLYLLDNDTSWMILASSGVGVCIEFWKIGKAMRIEVDRSGMIPRLRFHDRESYASNKTKEYDDIAIKFLSYVLLLLVVGFSIYSLAYERHKSWYSWILSSLTSCVYMFGFIMMCPQLFINYKLKSVAHLPWRQMTYKFLNTIIDDLFAFVIKMPMLHRLSVFRDDVIFLIYLYQRWVYPVDKTRVNEFGFGGEDESVDTKKISDQEDDKKTN

SEQ ID NO: 79433 - DNA, 1567 bp, Arabidopsis thaliana
  misc_feature (1)..(1567): Ceres Seq. ID no. 12651277
  misc_feature: MA Experiment ID: 20000314 Result: Down-regulated in Transcription
  misc_feature: MA Experiment 20000314 PARAMETER Experiment Name: At_14day_Shoots-Roots_Sub_P Parameter: Age (day) Value: 14
  misc_feature: MA Experiment 20000314 PARAMETER Experiment Name: At_14day_Shoots-Roots_Sub_P Parameter: Organism Value: A. thaliana
  misc_feature: MA Experiment 20000314 PARAMETER Experiment Name: At_14day_Shoots-Roots_Sub_P Parameter: Plant Line Value: WS
  misc_feature: MA Experiment 20000314 PARAMETER Experiment Name: At_14day_Shoots-Roots_Sub_P Parameter: Tissue Value: Roots vs. Whole Plant
  misc_feature: MA Experiment ID: 20000355 Result: Down-regulated in Transcription
  misc_feature: MA Experiment 20000355 PARAMETER Experiment Name: At_Siliques_Sub_P Parameter: Age (day) Value: 21
  misc_feature: MA Experiment 20000355 PARAMETER Experiment Name: At_Siliques_Sub_P Parameter: Organism Value: A. thaliana
  misc_feature: MA Experiment 20000355 PARAMETER Experiment Name: At_Siliques_Sub_P Parameter: Plant Line Value: WS
  misc_feature: MA Experiment 20000355 PARAMETER Experiment Name: At_Siliques_Sub_P Parameter: Tissue Value: Less Than 5mm Siliques vs. Whole Plant
attcctctttctctctctctccttcaagttgctgcaatcccttgaaaacccaataaacccccaattttccatttctcataaagttcacatttttccttcttcttcttctgccaattctctgattccctcgtttcaatctccgttttgctttgcctatcagataaatttcttcttgctttcctttctatctcataacgataagttgaattaatctttgcgtcttagttcatcagtagagagagtagggttttttccgcttatttttagggaatttcattttgttggaggtgagaatctctattcgagtccccaagattctctttatatccctagtttagttgtatggttgggttttgattggaatatcaaggggtagtttttagctaggttcactgatacttggaagatctgagttctttgggattctgttaagtttgtggagatctaaaagacacgaaatttgtagaaatctggttgatatcccagacttttagagggattagggtagattctatagaatttgaggcgggtttgattggaattatgacggtggaggaagttagtgatggttctgtgtggagtagggaggatgatattgcctttgagagagctctagccaataataccgatgaatcagaggaacggtgggagaagattgctgcagacgttccaggcaaaagtgttgaacagattaaagaacattacgagcttttagttgaagatgttactaggattgaatcaggatgtgtgcctcttcctgcctatgggtctcctgaaggatcgaatggccatgctggtgatgaaggagcaagtagtaagaaaggaggtaacagtcatgcgggagagtctaaccaagcaggtaaatcaaagtccgatcaagaacgacgaaagggtatcgcgtggacagaagatgagcacaggttatttcttcttggtttggataagtacgggaaaggtgattggcgtagcatttctcgcaactttgtagtaacaagaacaccgacccaagttgcgagccatgctcaaaagtatttcattcgtctaaattcaatgaacaaagacagaaggcgatcaagcattcacgacatcactagtgttggcaacgcagatgtctcaacgccacaaggaccaatcactggtcagaacaacagcaataacaacaacaacaacaacaacaacaacagttctcctgctgttgctggaggaggaaacaaatcagccaagcaagccgtctctcaagcaccacctggacctcctatgtatggaacacccgccataggtcagccagcagttggaacaccagtgaacctcccagctccacctcacatggcttatggagttcatgcggctccagtccctggctcagtggttcctggtgcagcaatgaacattggtcaaatgccgtacaccatgccgcgtacaccaacggctcataggtaactcgaaagcacctttgctgtcatagtgcactttgtttttaggtgtaagaaagaagatgtgtaaaggatttagtgaatattcaagcttgttccttgagtgagttttttttattacttagtttgtgggg

SEQ ID NO: 79434 - protein, 298 aa, Arabidopsis thaliana
  peptide (1)..(298): Ceres Seq. ID no. 12651278
  misc_feature (117)..(164): Pfam Name: Myb-like DNA-binding domain Pfam Description: Myb-like DNA-binding domain
  misc_feature (1)..(298): Homolog of NCBI NO: 15241652 NR Description: putative protein; protein id: At5g08520.1, by cDNA: gi_18175699, supported by cDNA: gi_20465998 [Arabidopsis
  misc_feature (4)..(286): Homolog of NCBI NO: 15237801 NR Description: putative protein; protein id: At5g23650.1
  misc_feature (32)..(282): Homolog of NCBI NO: 34914460 NR Description: putative syringolide-induced protein 1-3-1B
MTVEEVSDGSVWSREDDIAFERALANNTDESEERWEKIAADVPGKSVEQIKEHYELLVEDVTRIESGCVPLPAYGSPEGSNGHAGDEGASSKKGGNSHAGESNQAGKSKSDQERRKGIAWTEDEHRLFLLGLDKYGKGDWRSISRNFVVTRTPTQVASHAQKYFIRLNSMNKDRRRSSIHDITSVGNADVSTPQGPITGQNNSNNNNNNNNNNSSPAVAGGGNKSAKQAVSQAPPGPPMYGTPAIGQPAVGTPVNLPAPPHMAYGVHAAPVPGSVVPGAAMNIGQMPYTMPRTPTAHR

SEQ ID NO: 79435 - DNA, 1971 bp, Arabidopsis thaliana
  misc_feature (1)..(1971): Ceres Seq. ID no. 12651294
  misc_feature: MA Experiment ID: 20000173 Result: Down-regulated in Transcription
  misc_feature: MA Experiment 20000173 PARAMETER Experiment Name: At_42deg_Heat_P Parameter: Age (day) Value: 14
  misc_feature: MA Experiment 20000173 PARAMETER Experiment Name: At_42deg_Heat_P Parameter: Organism Value: A. thaliana
  misc_feature: MA Experiment 20000173 PARAMETER Experiment Name: At_42deg_Heat_P Parameter: Plant Line Value: WS
  misc_feature: MA Experiment 20000173 PARAMETER Experiment Name: At_42deg_Heat_P Parameter: Temperature (deg C) Value: 42 vs. 22
  misc_feature: MA Experiment 20000173 PARAMETER Experiment Name: At_42deg_Heat_P Parameter: Timepoint (hr) Value: 6
  misc_feature: MA Experiment 20000173 PARAMETER Experiment Name: At_42deg_Heat_P Parameter: Tissue Value: Aerial
  misc_feature: MA Experiment ID: 20000184 Result: Down-regulated in Transcription
  misc_feature: MA Experiment 20000184 PARAMETER Experiment Name: At_Shoots__P Parameter: Age (day) Value: 7
  misc_feature: MA Experiment 20000184 PARAMETER Experiment Name: At_Shoots__P Parameter: Tissue Value: Shoots vs. Whole Plant
  misc_feature: MA Experiment ID: 20000265 Result: Down-regulated in Transcription
  misc_feature: MA Experiment 20000265 PARAMETER Experiment Name: At_Open_Flower_P Parameter: Age (day) Value: 21
  misc_feature: MA Experiment 20000265 PARAMETER Experiment Name: At_Open_Flower_P Parameter: Plant Line Value: WS
  misc_feature: MA Experiment 20000265 PARAMETER Experiment Name: At_Open_Flower_P Parameter: Tissue Value: Closed Flower vs. Whole Plant
  misc_feature: MA Experiment ID: 20000438 Result: Down-regulated in Transcription
  misc_feature: MA Experiment 20000438 PARAMETER Experiment Name: At_Shoots__P Parameter: Age (day) Value: 14
  misc_feature: MA Experiment 20000438 PARAMETER Experiment Name: At_Shoots__P Parameter: Tissue Value: Shoots vs. Whole Plant
  misc_feature: MA Experiment ID: 20001905 Result: Up-regulated in Transcription
  misc_feature: MA Experiment 20001905 PARAMETER Experiment Name: At_Drought_Reproduction_P Parameter: Age (day) Value: 40
  misc_feature: MA Experiment 20001905 PARAMETER Experiment Name: At_Drought_Reproduction_P Parameter: Organism Value: A. thaliana
  misc_feature: MA Experiment 20001905 PARAMETER Experiment Name: At_Drought_Reproduction_P Parameter: Plant Line Value: WS
  misc_feature: MA Experiment 20001905 PARAMETER Experiment Name: At_Drought_Reproduction_P Parameter: Timepoint (day) Value: 10
  misc_feature: MA Experiment 20001905 PARAMETER Experiment Name: At_Drought_Reproduction_P Parameter: Tissue Value: Rosettes
  misc_feature: MA Experiment 20001905 PARAMETER Experiment Name: At_Drought_Reproduction_P Parameter: Treatment Value: Drought vs. No Drought
atggggagtttttgctccaagagccttggaatcaattttggcagcgagtattctggttctagtgtggctgatgatggtcgagaacctgattttggccactcacaaccaaatgggcaaaccagtttgattgttcctggtatgaggcagcttatggttaaagacgtcaaggaacaaaatcaattaaaagatgttttctctttccgcgaaagggaagctgaagataatttctatgatggaattccgacgtatactatggctccatcacagaaaattcggtctgcaaaatcaactcaaaccgctgtttcaaaggttacagaggcaagtaagcttttaggcaaagcggggttaggtagagcaaaagatgttttggatacccttggaagtagcatgacagatcttagtagcggtggatttacttctggagttgcaactaaaggcaatgaacttgggatcttagcttttgaagtagcaaacacaattgtcaaaagctcaaatctcattgaatccctttctaagaggaacatcgagcatttaaaaggaactatcctttattctgagggtgttcaaaacctagtctcgaatgatttcgatgaactactcagacttgttgcagctgataagaggcaggagctgcaagttttctcgggggaagtggttcggtttggaaaccgatccaaagattttcagtggcataatttacagcgctatttcgataggatcagcaaagaattaacccctcaaaggcagttaaaggaagacgcggtgttggttgttgaccaactgatggttctagtgcagtatactgctgaactataccaagaactccaagtattgtatcgattggagaaagactatgagcaaaagcgtcgagaagaagagaactcagctaatagcagtaagggtgatggccttgcaatcttaaaaacggaacttaaagcccagagaaaggtagtgaaaagcttaaagaaaaagtcgttgtggtccagaggttttgaagaggtgatggagaaactagtagacattgtacatttcttgttgctagagattcataatatcttcggtggtgccgatgatcaaccatcgaagaaaggagctgcagaatatgataaaagattgggacctgctggtcttgctttacattatgcaaatataattgtgcagattgacacacttgtcgctcgtgcaagctctataacttcaaatgcaagggattctctttaccaaagcttaccacctggtataaaattggctcttcgttccaagattaaatctttcaatgtcgataaggagctttcggttacacaaattaaggatgagatggagaggacactgcattggcttgtccctgttgcaggcaatacaacaaaagcgcatcatggttttggctgggttggagagtgggcaaatacagggactgatttcactagtaagcctagtggtggagatatactacgtattgaaacactctatcacgctagtaaagaaaagacagagatctacattcttggacagataatttggttacaacatttggttacaaaagctaagagcgacgctcgaggaggtcctagactttcttctatcaagtctccattggatactacgaaccagcaattgatatctgaaccactcagtgtcccaatagtaacagatgaggagcaaaagatgttacaagaggcaagcaagagaaagagaactccatgtgttagcaagagtcaggattttgattctgagtactcgcgggcaagaaagtgtgaccctttgagcaaaagcagtgagtattttcgtggagtgagaagaagcaaatcagctgcagtaaagcggtattcttcgggttttccgcttcttgactttgctattgacaaggaaaaagtgttggatgtgatcgatcgggttgatgtgccaagagattataaagcattgttaaaagaagagcataaaagaaagggtatggaagaagctgtaatgtga

SEQ ID NO: 79436 - protein, 656 aa, Arabidopsis thaliana
  peptide (1)..(656): Ceres Seq. ID no. 12651295
  misc_feature (371)..(456): Pfam Name: Protein of unknown function (DUF668) Pfam Description: Protein of unknown function (DUF668)
  misc_feature (1)..(636): Homolog of NCBI NO: 15218580 NR Description: hypothetical protein; protein id: At1g34320.1
  misc_feature (262)..(636): Homolog of NCBI NO: 25403424 NR Description: protein F23M19.3 [imported] - Arabidopsis >gi|5091616|gb|AAD39604.1|AC007454_3 F23M19.3 [Arabidopsis
  misc_feature (1)..(253): Homolog of NCBI NO: 25403424 NR Description: protein F23M19.3 [imported] - Arabidopsis >gi|5091616|gb|AAD39604.1|AC007454_3 F23M19.3 [Arabidopsis
  misc_feature (102)..(633): Homolog of NCBI NO: 18397646 NR Description: unknown protein; protein id: At1g30755.1, by cDNA: gi_20466801 [Arabidopsis thaliana]
  misc_feature (112)..(538): Homolog of NCBI NO: 38345368 NR Description: OSJNBa0088K19.7 [Oryza sativa (japonica
  misc_feature (113)..(633): Homolog of NCBI NO: 34908726 NR Description: P0491F11.23 [Oryza sativa (japonica
  misc_feature (102)..(456): Homolog of NCBI NO: 25513510 NR Description: T5I8.21 protein - Arabidopsis thaliana
  misc_feature (71)..(208): Homolog of NCBI NO: 34908726 NR Description: P0491F11.23 [Oryza sativa (japonica
  misc_feature (149)..(399): Homolog of NCBI NO: 15228977 NR Description: hypothetical protein; protein id: At3g23160.1
  misc_feature (372)..(511): Homolog of NCBI NO: 15228977 NR Description: hypothetical protein; protein id: At3g23160.1
MGSFCSKSLGINFGSEYSGSSVADDGREPDFGHSQPNGQTSLIVPGMRQLMVKDVKEQNQLKDVFSFREREAEDNFYDGIPTYTMAPSQKIRSAKSTQTAVSKVTEASKLLGKAGLGRAKDVLDTLGSSMTDLSSGGFTSGVATKGNELGILAFEVANTIVKSSNLIESLSKRNIEHLKGTILYSEGVQNLVSNDFDELLRLVAADKRQELQVFSGEVVRFGNRSKDFQWHNLQRYFDRISKELTPQRQLKEDAVLVVDQLMVLVQYTAELYQELQVLYRLEKDYEQKRREEENSANSSKGDGLAILKTELKAQRKVVKSLKKKSLWSRGFEEVMEKLVDIVHFLLLEIHNIFGGADDQPSKKGAAEYDKRLGPAGLALHYANIIVQIDTLVARASSITSNARDSLYQSLPPGIKLALRSKIKSFNVDKELSVTQIKDEMERTLHWLVPVAGNTTKAHHGFGWVGEWANTGTDFTSKPSGGDILRIETLYHASKEKTEIYILGQIIWLQHLVTKAKSDARGGPRLSSIKSPLDTTNQQLISEPLSVPIVTDEEQKMLQEASKRKRTPCVSKSQDFDSEYSRARKCDPLSKSSEYFRGVRRSKSAAVKRYSSGFPLLDFAIDKEKVLDVIDRVDVPRDYKALLKEEHKRKGMEEAVM

SEQ ID NO: 79437 - protein, 610 aa, Arabidopsis thaliana
  peptide (1)..(610): Ceres Seq. ID no. 12651296
  misc_feature (325)..(410): Pfam Name: Protein of unknown function (DUF668) Pfam Description: Protein of unknown function (DUF668)
  misc_feature (1)..(590): Homolog of NCBI NO: 15218580 NR Description: hypothetical protein; protein id: At1g34320.1
  misc_feature (216)..(590): Homolog of NCBI NO: 25403424 NR Description: protein F23M19.3 [imported] - Arabidopsis >gi|5091616|gb|AAD39604.1|AC007454_3 F23M19.3 [Arabidopsis
  misc_feature (1)..(207): Homolog of NCBI NO: 25403424 NR Description: protein F23M19.3 [imported] - Arabidopsis >gi|5091616|gb|AAD39604.1|AC007454_3 F23M19.3 [Arabidopsis
  misc_feature (56)..(587): Homolog of NCBI NO: 18397646 NR Description: unknown protein; protein id: At1g30755.1, by cDNA: gi_20466801 [Arabidopsis thaliana]
  misc_feature (66)..(492): Homolog of NCBI NO: 38345368 NR Description: OSJNBa0088K19.7 [Oryza sativa (japonica
  misc_feature (67)..(587): Homolog of NCBI NO: 34908726 NR Description: P0491F11.23 [Oryza sativa (japonica
  misc_feature (56)..(410): Homolog of NCBI NO: 25513510 NR Description: T5I8.21 protein - Arabidopsis thaliana
  misc_feature (25)..(162): Homolog of NCBI NO: 34908726 NR Description: P0491F11.23 [Oryza sativa (japonica
  misc_feature (103)..(353): Homolog of NCBI NO: 15228977 NR Description: hypothetical protein; protein id: At3g23160.1
  misc_feature (326)..(465): Homolog of NCBI NO: 15228977 NR Description: hypothetical protein; protein id: At3g23160.1
MRQLMVKDVKEQNQLKDVFSFREREAEDNFYDGIPTYTMAPSQKIRSAKSTQTAVSKVTEASKLLGKAGLGRAKDVLDTLGSSMTDLSSGGFTSGVATKGNELGILAFEVANTIVKSSNLIESLSKRNIEHLKGTILYSEGVQNLVSNDFDELLRLVAADKRQELQVFSGEVVRFGNRSKDFQWHNLQRYFDRISKELTPQRQLKEDAVLVVDQLMVLVQYTAELYQELQVLYRLEKDYEQKRREEENSANSSKGDGLAILKTELKAQRKVVKSLKKKSLWSRGFEEVMEKLVDIVHFLLLEIHNIFGGADDQPSKKGAAEYDKRLGPAGLALHYANIIVQIDTLVARASSITSNARDSLYQSLPPGIKLALRSKIKSFNVDKELSVTQIKDEMERTLHWLVPVAGNTTKAHHGFGWVGEWANTGTDFTSKPSGGDILRIETLYHASKEKTEIYILGQIIWLQHLVTKAKSDARGGPRLSSIKSPLDTTNQQLISEPLSVPIVTDEEQKMLQEASKRKRTPCVSKSQDFDSEYSRARKCDPLSKSSEYFRGVRRSKSAAVKRYSSGFPLLDFAIDKEKVLDVIDRVDVPRDYKALLKEEHKRKGMEEAVM

SEQ ID NO: 79438 - protein, 606 aa, Arabidopsis thaliana
  peptide (1)..(606): Ceres Seq. ID no. 12651297
  misc_feature (321)..(406): Pfam Name: Protein of unknown function (DUF668) Pfam Description: Protein of unknown function (DUF668)
  misc_feature (1)..(586): Homolog of NCBI NO: 15218580 NR Description: hypothetical protein; protein id: At1g34320.1
  misc_feature (212)..(586): Homolog of NCBI NO: 25403424 NR Description: protein F23M19.3 [imported] - Arabidopsis >gi|5091616|gb|AAD39604.1|AC007454_3 F23M19.3 [Arabidopsis
  misc_feature (1)..(203): Homolog of NCBI NO: 25403424 NR Description: protein F23M19.3 [imported] - Arabidopsis >gi|5091616|gb|AAD39604.1|AC007454_3 F23M19.3 [Arabidopsis
  misc_feature (52)..(583): Homolog of NCBI NO: 18397646 NR Description: unknown protein; protein id: At1g30755.1, by cDNA: gi_20466801 [Arabidopsis thaliana]
  misc_feature (62)..(488): Homolog of NCBI NO: 38345368 NR Description: OSJNBa0088K19.7 [Oryza sativa (japonica
  misc_feature (63)..(583): Homolog of NCBI NO: 34908726 NR Description: P0491F11.23 [Oryza sativa (japonica
  misc_feature (52)..(406): Homolog of NCBI NO: 25513510 NR Description: T5I8.21 protein - Arabidopsis thaliana
  misc_feature (21)..(158): Homolog of NCBI NO: 34908726 NR Description: P0491F11.23 [Oryza sativa (japonica
  misc_feature (99)..(349): Homolog of NCBI NO: 15228977 NR Description: hypothetical protein; protein id: At3g23160.1
  misc_feature (322)..(461): Homolog of NCBI NO: 15228977 NR Description: hypothetical protein; protein id: At3g23160.1
MVKDVKEQNQLKDVFSFREREAEDNFYDGIPTYTMAPSQKIRSAKSTQTAVSKVTEASKLLGKAGLGRAKDVLDTLGSSMTDLSSGGFTSGVATKGNELGILAFEVANTIVKSSNLIESLSKRNIEHLKGTILYSEGVQNLVSNDFDELLRLVAADKRQELQVFSGEVVRFGNRSKDFQWHNLQRYFDRISKELTPQRQLKEDAVLVVDQLMVLVQYTAELYQELQVLYRLEKDYEQKRREEENSANSSKGDGLAILKTELKAQRKVVKSLKKKSLWSRGFEEVMEKLVDIVHFLLLEIHNIFGGADDQPSKKGAAEYDKRLGPAGLALHYANIIVQIDTLVARASSITSNARDSLYQSLPPGIKLALRSKIKSFNVDKELSVTQIKDEMERTLHWLVPVAGNTTKAHHGFGWVGEWANTGTDFTSKPSGGDILRIETLYHASKEKTEIYILGQIIWLQHLVTKAKSDARGGPRLSSIKSPLDTTNQQLISEPLSVPIVTDEEQKMLQEASKRKRTPCVSKSQDFDSEYSRARKCDPLSKSSEYFRGVRRSKSAAVKRYSSGFPLLDFAIDKEKVLDVIDRVDVPRDYKALLKEEHKRKGMEEAVM

SEQ ID NO: 79439 - DNA, 1014 bp, Arabidopsis thaliana
  misc_feature (1)..(1014): Ceres Seq. ID no. 12651337
  misc_feature: MA Experiment ID: 20000179 Result: Down-regulated in Transcription
  misc_feature: MA Experiment 20000179 PARAMETER Experiment Name: At_Germinating_Seeds_P Parameter: Age (hr) Value: 6 vs. 0
  misc_feature: MA Experiment 20000179 PARAMETER Experiment Name: At_Germinating_Seeds_P Parameter: Tissue Value: Germinating Seeds
  misc_feature: MA Experiment ID: 20000182 Result: Up-regulated in Transcription
  misc_feature: MA Experiment 20000182 PARAMETER Experiment Name: At_2mM_SA_P Parameter: Age (day) Value: 14
  misc_feature: MA Experiment 20000182 PARAMETER Experiment Name: At_2mM_SA_P Parameter: Organism Value: A. thaliana
  misc_feature: MA Experiment 20000182 PARAMETER Experiment Name: At_2mM_SA_P Parameter: Plant Line Value: WS
  misc_feature: MA Experiment 20000182 PARAMETER Experiment Name: At_2mM_SA_P Parameter: Timepoint (hr) Value: 6
  misc_feature: MA Experiment 20000182 PARAMETER Experiment Name: At_2mM_SA_P Parameter: Tissue Value: Aerial
  misc_feature: MA Experiment 20000182 PARAMETER Experiment Name: At_2mM_SA_P Parameter: Treatment Value: 2mM SA vs. No Treatment
  misc_feature: MA Experiment ID: 20000437 Result: Up-regulated in Transcription
  misc_feature: MA Experiment 20000437 PARAMETER Experiment Name: At_Drought_P Parameter: Age (day) Value: 8
  misc_feature: MA Experiment 20000437 PARAMETER Experiment Name: At_Drought_P Parameter: Organism Value: A. thaliana
  misc_feature: MA Experiment 20000437 PARAMETER Experiment Name: At_Drought_P Parameter: Plant Line Value: WS
  misc_feature: MA Experiment 20000437 PARAMETER Experiment Name: At_Drought_P Parameter: Timepoint (hr) Value: 24
  misc_feature: MA Experiment 20000437 PARAMETER Experiment Name: At_Drought_P Parameter: Tissue Value: Whole Plant
  misc_feature: MA Experiment 20000437 PARAMETER Experiment Name: At_Drought_P Parameter: Treatment Value: Drought vs. No Drought
  misc_feature: MA Experiment ID: 20000456 Result: Up-regulated in Transcription
  misc_feature: MA Experiment 20000456 PARAMETER Experiment Name: At_100uM_BA_P Parameter: Age (day) Value: 14
  misc_feature: MA Experiment 20000456 PARAMETER Experiment Name: At_100uM_BA_P Parameter: Organism Value: A. thaliana
  misc_feature: MA Experiment 20000456 PARAMETER Experiment Name: At_100uM_BA_P Parameter: Plant Line Value: WS
  misc_feature: MA Experiment 20000456 PARAMETER Experiment Name: At_100uM_BA_P Parameter: Timepoint (hr) Value: 6
  misc_feature: MA Experiment 20000456 PARAMETER Experiment Name: At_100uM_BA_P Parameter: Tissue Value: Aerial
  misc_feature: MA Experiment 20000456 PARAMETER Experiment Name: At_100uM_BA_P Parameter: Treatment Value: 100uM BA vs. No Treatment
  misc_feature: MA Experiment ID: 20000527 Result: Down-regulated in Transcription
  misc_feature: MA Experiment 20000527 PARAMETER Experiment Name: At_10percent_PEG_P Parameter: Age (day) Value: 20
  misc_feature: MA Experiment 20000527 PARAMETER Experiment Name: At_10percent_PEG_P Parameter: Organism Value: A. thaliana
  misc_feature: MA Experiment 20000527 PARAMETER Experiment Name: At_10percent_PEG_P Parameter: Plant Line Value: WS
  misc_feature: MA Experiment 20000527 PARAMETER Experiment Name: At_10percent_PEG_P Parameter: Timepoint (day) Value: 20
  misc_feature: MA Experiment 20000527 PARAMETER Experiment Name: At_10percent_PEG_P Parameter: Tissue Value: Whole Plant
  misc_feature: MA Experiment 20000527 PARAMETER Experiment Name: At_10percent_PEG_P Parameter: Treatment Value: 10percent PEG vs. No Treatment
  misc_feature: MA Experiment ID: 20001451 Result: Up-regulated in Transcription
  misc_feature: MA Experiment 20001451 PARAMETER Experiment Name: At_Far-red-induction_P Parameter: Age (day) Value: 7
  misc_feature: MA Experiment 20001451 PARAMETER Experiment Name: At_Far-red-induction_P Parameter: Light Value: Far-red vs. White
  misc_feature: MA Experiment 20001451 PARAMETER Experiment Name: At_Far-red-induction_P Parameter: Organism Value: A. thaliana
  misc_feature: MA Experiment 20001451 PARAMETER Experiment Name: At_Far-red-induction_P Parameter: Plant Line Value: Columbia
  misc_feature: MA Experiment 20001451 PARAMETER Experiment Name: At_Far-red-induction_P Parameter: Timepoint (hr) Value: 24
  misc_feature: MA Experiment 20001451 PARAMETER Experiment Name: At_Far-red-induction_P Parameter: Tissue Value: Whole Plant
  misc_feature: MA Experiment ID: 20001557 Result: Up-regulated in Transcription
  misc_feature: MA Experiment 20001557 PARAMETER Experiment Name: At_Drought_Soil_Dry_P Parameter: Age (day) Value: 27
  misc_feature: MA Experiment 20001557 PARAMETER Experiment Name: At_Drought_Soil_Dry_P Parameter: Organism Value: A. thaliana
  misc_feature: MA Experiment 20001557 PARAMETER Experiment Name: At_Drought_Soil_Dry_P Parameter: Plant Line Value: WS
  misc_feature: MA Experiment 20001557 PARAMETER Experiment Name: At_Drought_Soil_Dry_P Parameter: Post Timepoint (hr) Value: 3
  misc_feature: MA Experiment 20001557 PARAMETER Experiment Name: At_Drought_Soil_Dry_P Parameter: Post-Treatment Value: Re-Water vs. No Drought
  misc_feature: MA Experiment 20001557 PARAMETER Experiment Name: At_Drought_Soil_Dry_P Parameter: Timepoint (day) Value: 13
  misc_feature: MA Experiment 20001557 PARAMETER Experiment Name: At_Drought_Soil_Dry_P Parameter: Treatment Value: Drought vs. No Drought
atgggcttcaaaccatttcttgaaggtggcatcgccgcaatcatcgccggagctctgactcacccattagacctcatcaaagtccgtatgcagcttcaaggcgaacattctttctcgctcgaccaaaaccctaaccctaatcttagccttgatcataatcttcccgtgaaaccttaccgacccgttttcgctcttgactctctcatcggcagcatttccttattacccttacacattcacgcgccgtcttcttccacgcgctccgtcatgacccctttcgccgtaggggcacacattgtcaaaaccgaaggacccgccgctctcttctccggcgtctccgccaccatcctccgtcagatgctttactctgccacccgtatgggtatatacgactttcttaaacgaaggtggactgatcaactcaccggtaacttcccattggtaaccaagatcacagctggactcatcgcaggagccgttggatcagtcgtcgggaatcctgctgacgtggcgatggtgagaatgcaagccgacggaagcttgccgttaaaccgtcgcagaaactacaagagcgtcgtggacgcgatcgacaggatcgcaaggcaagaaggcgtttcaagtttatggcgtggctcatggctaaccgtgaaccgtgccatgatcgtgacagcttctcagctcgctacgtatgatcacgtcaaagaaatcttggtagctggtggccgtggaacgccgggagggataggaacgcatgtagcggcgagttttgcggcggggatcgtcgcggcggtggcgtcgaatcccatcgacgttgtgaagacgaggatgatgaatgcggataaggagatttacggtggaccgttggattgtgcggtgaagatggtggcagaggaaggaccaatggctttgtacaaagggcttgttccgacggcgacgaggcaaggaccgttcacgatgatcttgttccttaccttggaacaagttcgtggtctgttaaaagacgttaaattttga

SEQ ID NO: 79440 - protein, 337 aa, Arabidopsis thaliana
  peptide (1)..(337): Ceres Seq. ID no. 12651338
  misc_feature (1)..(337): Homolog of NCBI NO: 15242423 NR Description: mitochondrial carrier protein family; protein id:
  misc_feature (85)..(334): Homolog of NCBI NO: 15233884 NR Description: mitochondrial carrier protein family; protein id: supported by cDNA: 119476., supported by cDNA: gi_14596142
  misc_feature (95)..(337): Homolog of NCBI NO: 21554157 NR Description: putative mitochondrial dicarboxylate carrier
  misc_feature (1)..(56): Homolog of NCBI NO: 21554157 NR Description: putative mitochondrial dicarboxylate carrier
  misc_feature (1)..(35): Homolog of NCBI NO: 15233884 NR Description: mitochondrial carrier protein family; protein id: supported by cDNA: 119476., supported by cDNA: gi_14596142
  misc_feature (95)..(337): Homolog of NCBI NO: 15227225 NR Description: mitochondrial carrier protein family; protein id: supported by cDNA: 20723., supported by cDNA: gi_13877658, by cDNA: gi_13878154 [Arabidopsis thaliana]
  misc_feature (1)..(56): Homolog of NCBI NO: 15227225 NR Description: mitochondrial carrier protein family; protein id: supported by cDNA: 20723., supported by cDNA: gi_13877658, by cDNA: gi_13878154 [Arabidopsis thaliana]
  misc_feature (95)..(337): Homolog of NCBI NO: 13878155 NR Description: putative mitochondrial dicarboxylate carrier
  misc_feature (1)..(56): Homolog of NCBI NO: 13878155 NR Description: putative mitochondrial dicarboxylate carrier
  misc_feature (77)..(333): Homolog of NCBI NO: 21312994 NR Description: solute carrier family 25 (mitochondrial carrier;
MGFKPFLEGGIAAIIAGALTHPLDLIKVRMQLQGEHSFSLDQNPNPNLSLDHNLPVKPYRPVFALDSLIGSISLLPLHIHAPSSSTRSVMTPFAVGAHIVKTEGPAALFSGVSATILRQMLYSATRMGIYDFLKRRWTDQLTGNFPLVTKITAGLIAGAVGSVVGNPADVAMVRMQADGSLPLNRRRNYKSVVDAIDRIARQEGVSSLWRGSWLTVNRAMIVTASQLATYDHVKEILVAGGRGTPGGIGTHVAASFAAGIVAAVASNPIDVVKTRMMNADKEIYGGPLDCAVKMVAEEGPMALYKGLVPTATRQGPFTMILFLTLEQVRGLLKDVKF

SEQ ID NO: 79441 - protein, 308 aa, Arabidopsis thaliana
  peptide (1)..(308): Ceres Seq. ID no. 12651339
  misc_feature (1)..(308): Homolog of NCBI NO: 15242423 NR Description: mitochondrial carrier protein family; protein id:
  misc_feature (56)..(305): Homolog of NCBI NO: 15233884 NR Description: mitochondrial carrier protein family; protein id: supported by cDNA: 119476., supported by cDNA: gi_14596142
  misc_feature (66)..(308): Homolog of NCBI NO: 21554157 NR Description: putative mitochondrial dicarboxylate carrier
  misc_feature (1)..(27): Homolog of NCBI NO: 21554157 NR Description: putative mitochondrial dicarboxylate carrier
  misc_feature (66)..(308): Homolog of NCBI NO: 15227225 NR Description: mitochondrial carrier protein family; protein id: supported by cDNA: 20723., supported by cDNA: gi_13877658, by cDNA: gi_13878154 [Arabidopsis thaliana]
  misc_feature (1)..(27): Homolog of NCBI NO: 15227225 NR Description: mitochondrial carrier protein family; protein id: supported by cDNA: 20723., supported by cDNA: gi_13877658, by cDNA: gi_13878154 [Arabidopsis thaliana]
  misc_feature (66)..(308): Homolog of NCBI NO: 13878155 NR Description: putative mitochondrial dicarboxylate carrier
  misc_feature (1)..(27): Homolog of NCBI NO: 13878155 NR Description: putative mitochondrial dicarboxylate carrier
  misc_feature (48)..(304): Homolog of NCBI NO: 21312994 NR Description: solute carrier family 25 (mitochondrial carrier;
  misc_feature (48)..(304): Homolog of NCBI NO: 1580888 NR Description: 2-oxoglutarate carrier protein
MQLQGEHSFSLDQNPNPNLSLDHNLPVKPYRPVFALDSLIGSISLLPLHIHAPSSSTRSVMTPFAVGAHIVKTEGPAALFSGVSATILRQMLYSATRMGIYDFLKRRWTDQLTGNFPLVTKITAGLIAGAVGSVVGNPADVAMVRMQADGSLPLNRRRNYKSVVDAIDRIARQEGVSSLWRGSWLTVNRAMIVTASQLATYDHVKEILVAGGRGTPGGIGTHVAASFAAGIVAAVASNPIDVVKTRMMNADKEIYGGPLDCAVKMVAEEGPMALYKGLVPTATRQGPFTMILFLTLEQVRGLLKDVKF

SEQ ID NO: 79442 - protein, 248 aa, Arabidopsis thaliana
  peptide (1)..(248): Ceres Seq. ID no. 12651340
  misc_feature (1)..(248): Homolog of NCBI NO: 15242423 NR Description: mitochondrial carrier protein family; protein id:
  misc_feature (1)..(245): Homolog of NCBI NO: 15233884 NR Description: mitochondrial carrier protein family; protein id: supported by cDNA: 119476., supported by cDNA: gi_14596142
  misc_feature (6)..(248): Homolog of NCBI NO: 21554157 NR Description: putative mitochondrial dicarboxylate carrier
  misc_feature (6)..(248): Homolog of NCBI NO: 15227225 NR Description: mitochondrial carrier protein family; protein id: supported by cDNA: 20723., supported by cDNA: gi_13877658, by cDNA: gi_13878154 [Arabidopsis thaliana]
  misc_feature (6)..(248): Homolog of NCBI NO: 13878155 NR Description: putative mitochondrial dicarboxylate carrier
  misc_feature (1)..(244): Homolog of NCBI NO: 21312994 NR Description: solute carrier family 25 (mitochondrial carrier;
  misc_feature (1)..(244): Homolog of NCBI NO: 1580888 NR Description: 2-oxoglutarate carrier protein
  misc_feature (1)..(240): Homolog of NCBI NO: 19173788 NR Description: solute carrier family 25 (mitochondrial carrier; transporter), member 10 [Rattus norvegicus]
  misc_feature (1)..(244): Homolog of NCBI NO: 27807211 NR Description: solute carrier family 25 (mitochondrial carrier;
  misc_feature (10)..(242): Homolog of NCBI NO: 24637836 NR Description: brain mitochondrial carrier protein
MTPFAVGAHIVKTEGPAALFSGVSATILRQMLYSATRMGIYDFLKRRWTDQLTGNFPLVTKITAGLIAGAVGSVVGNPADVAMVRMQADGSLPLNRRRNYKSVVDAIDRIARQEGVSSLWRGSWLTVNRAMIVTASQLATYDHVKEILVAGGRGTPGGIGTHVAASFAAGIVAAVASNPIDVVKTRMMNADKEIYGGPLDCAVKMVAEEGPMALYKGLVPTATRQGPFTMILFLTLEQVRGLLKDVKF

SEQ ID NO: 79443 - DNA, 1230 bp, Arabidopsis thaliana
  misc_feature (1)..(1230): Ceres Seq. ID no. 12651372
  misc_feature: MA Experiment ID: 20000171 Result: Down-regulated in Transcription
  misc_feature: MA Experiment 20000171 PARAMETER Experiment Name: At_42deg_Heat_P Parameter: Age (day) Value: 14
  misc_feature: MA Experiment 20000171 PARAMETER Experiment Name: At_42deg_Heat_P Parameter: Organism Value: A. thaliana
  misc_feature: MA Experiment 20000171 PARAMETER Experiment Name: At_42deg_Heat_P Parameter: Plant Line Value: WS
  misc_feature: MA Experiment 20000171 PARAMETER Experiment Name: At_42deg_Heat_P Parameter: Temperature (deg C) Value: 42 vs. 22
  misc_feature: MA Experiment 20000171 PARAMETER Experiment Name: At_42deg_Heat_P Parameter: Timepoint (hr) Value: 1
  misc_feature: MA Experiment 20000171 PARAMETER Experiment Name: At_42deg_Heat_P Parameter: Tissue Value: Aerial
  misc_feature: MA Experiment ID: 20000182 Result: Up-regulated in Transcription
  misc_feature: MA Experiment 20000182 PARAMETER Experiment Name: At_2mM_SA_P Parameter: Age (day) Value: 14
  misc_feature: MA Experiment 20000182 PARAMETER Experiment Name: At_2mM_SA_P Parameter: Organism Value: A. thaliana
  misc_feature: MA Experiment 20000182 PARAMETER Experiment Name: At_2mM_SA_P Parameter: Plant Line Value: WS
  misc_feature: MA Experiment 20000182 PARAMETER Experiment Name: At_2mM_SA_P Parameter: Timepoint (hr) Value: 6
  misc_feature: MA Experiment 20000182 PARAMETER Experiment Name: At_2mM_SA_P Parameter: Tissue Value: Aerial
  misc_feature: MA Experiment 20000182 PARAMETER Experiment Name: At_2mM_SA_P Parameter: Treatment Value: 2mM SA vs. No Treatment
  misc_feature: MA Experiment ID: 20000184 Result: Down-regulated in Transcription
  misc_feature: MA Experiment 20000184 PARAMETER Experiment Name: At_Shoots__P Parameter: Age (day) Value: 7
  misc_feature: MA Experiment 20000184 PARAMETER Experiment Name: At_Shoots__P Parameter: Tissue Value: Shoots vs. Whole Plant
  misc_feature: MA Experiment ID: 20000234 Result: Down-regulated in Transcription
  misc_feature: MA Experiment 20000234 PARAMETER Experiment Name: At_Siliques_P Parameter: Age (day) Value: 21
  misc_feature: MA Experiment 20000234 PARAMETER Experiment Name: At_Siliques_P Parameter: Organism Value: A. thaliana
  misc_feature: MA Experiment 20000234 PARAMETER Experiment Name: At_Siliques_P Parameter: Plant Line Value: WS
  misc_feature: MA Experiment 20000234 PARAMETER Experiment Name: At_Siliques_P Parameter: Tissue Value: Less Than 5mm Siliques vs. Whole Plant
  misc_feature: MA Experiment ID: 20000265 Result: Down-regulated in Transcription
  misc_feature: MA Experiment 20000265 PARAMETER Experiment Name: At_Open_Flower_P Parameter: Age (day) Value: 21
  misc_feature: MA Experiment 20000265 PARAMETER Experiment Name: At_Open_Flower_P Parameter: Plant Line Value: WS
  misc_feature: MA Experiment 20000265 PARAMETER Experiment Name: At_Open_Flower_P Parameter: Tissue Value: Closed Flower vs. Whole Plant
  misc_feature: MA Experiment ID: 20000269 Result: Up-regulated in Transcription
  misc_feature: MA Experiment 20000269 PARAMETER Experiment Name: At_1mM_KNO3_L-vs-H_Roots_P Parameter: Age (day) Value: 7,10,12
  misc_feature: MA Experiment 20000269 PARAMETER Experiment Name: At_1mM_KNO3_L-vs-H_Roots_P Parameter: Organism Value: A. thaliana
  misc_feature: MA Experiment 20000269 PARAMETER Experiment Name: At_1mM_KNO3_L-vs-H_Roots_P Parameter: Plant Line Value: WS
  misc_feature: MA Experiment 20000269 PARAMETER Experiment Name: At_1mM_KNO3_L-vs-H_Roots_P Parameter: Timepoint (day) Value: 7,10,12
  misc_feature: MA Experiment 20000269 PARAMETER Experiment Name: At_1mM_KNO3_L-vs-H_Roots_P Parameter: Tissue Value: Roots
  misc_feature: MA Experiment 20000269 PARAMETER Experiment Name: At_1mM_KNO3_L-vs-H_Roots_P Parameter: Treatment Value: 1mM KNO3 vs. 50mM KNO3
  misc_feature: MA Experiment ID: 20000438 Result: Down-regulated in Transcription
  misc_feature: MA Experiment 20000438 PARAMETER Experiment Name: At_Shoots__P Parameter: Age (day) Value: 14
  misc_feature: MA Experiment 20000438 PARAMETER Experiment Name: At_Shoots__P Parameter: Tissue Value: Shoots vs. Whole Plant
  misc_feature: MA Experiment ID: 20000460 Result: Up-regulated in Transcription
  misc_feature: MA Experiment 20000460 PARAMETER Experiment Name: At_10percent_PEG_P Parameter: Age (day) Value: 12
  misc_feature: MA Experiment 20000460 PARAMETER Experiment Name: At_10percent_PEG_P Parameter: Organism Value: A. thaliana
  misc_feature: MA Experiment 20000460 PARAMETER Experiment Name: At_10percent_PEG_P Parameter: Plant Line Value: WS
  misc_feature: MA Experiment 20000460 PARAMETER Experiment Name: At_10percent_PEG_P Parameter: Timepoint (day) Value: 12
  misc_feature: MA Experiment 20000460 PARAMETER Experiment Name: At_10percent_PEG_P Parameter: Tissue Value: Whole Plant
  misc_feature: MA Experiment 20000460 PARAMETER Experiment Name: At_10percent_PEG_P Parameter: Treatment Value: 10percent PEG vs. No Treatment
  misc_feature: MA Experiment ID: 20000495 Result: Down-regulated in Transcription
  misc_feature: MA Experiment 20000495 PARAMETER Experiment Name: At_Guard_Cells_P Parameter: Harvest Date Value: 8/2/2002
  misc_feature: MA Experiment 20000495 PARAMETER Experiment Name: At_Guard_Cells_P Parameter: Organism Value: A. thaliana
  misc_feature: MA Experiment 20000495 PARAMETER Experiment Name: At_Guard_Cells_P Parameter: Tissue Value: Guard Cells vs. Leaves
  misc_feature: MA Experiment ID: 20000496 Result: Down-regulated in Transcription
  misc_feature: MA Experiment 20000496 PARAMETER Experiment Name: At_Guard_Cells_P Parameter: Harvest Date Value: 7/19/2002
  misc_feature: MA Experiment 20000496 PARAMETER Experiment Name: At_Guard_Cells_P Parameter: Organism Value: Canola
  misc_feature: MA Experiment 20000496 PARAMETER Experiment Name: At_Guard_Cells_P Parameter: Tissue Value: Guard Cells vs. Leaves
  misc_feature: MA Experiment ID: 20000573 Result: Down-regulated in Transcription
  misc_feature: MA Experiment 20000573 PARAMETER Experiment Name: At_100uM_ABA_Mutants__P Parameter: Organism Value: A. thaliana
  misc_feature: MA Experiment 20000573 PARAMETER Experiment Name: At_100uM_ABA_Mutants__P Parameter: Plant Line Value: CS22 vs. Ler wt
  misc_feature: MA Experiment 20000573 PARAMETER Experiment Name: At_100uM_ABA_Mutants__P Parameter: Timepoint (hr) Value: N/A
  misc_feature: MA Experiment 20000573 PARAMETER Experiment Name: At_100uM_ABA_Mutants__P Parameter: Tissue Value: Whole Plant
  misc_feature: MA Experiment 20000573 PARAMETER Experiment Name: At_100uM_ABA_Mutants__P Parameter: Treatment Value: None
  misc_feature: MA Experiment ID: 20001557 Result: Up-regulated in Transcription
  misc_feature: MA Experiment 20001557 PARAMETER Experiment Name: At_Drought_Soil_Dry_P Parameter: Age (day) Value: 27
  misc_feature: MA Experiment 20001557 PARAMETER Experiment Name: At_Drought_Soil_Dry_P Parameter: Organism Value: A. thaliana
  misc_feature: MA Experiment 20001557 PARAMETER Experiment Name: At_Drought_Soil_Dry_P Parameter: Plant Line Value: WS
  misc_feature: MA Experiment 20001557 PARAMETER Experiment Name: At_Drought_Soil_Dry_P Parameter: Post Timepoint (hr) Value: 3
  misc_feature: MA Experiment 20001557 PARAMETER Experiment Name: At_Drought_Soil_Dry_P Parameter: Post-Treatment Value: Re-Water vs. No Drought
  misc_feature: MA Experiment 20001557 PARAMETER Experiment Name: At_Drought_Soil_Dry_P Parameter: Timepoint (day) Value: 13
  misc_feature: MA Experiment 20001557 PARAMETER Experiment Name: At_Drought_Soil_Dry_P Parameter: Treatment Value: Drought vs. No Drought
atgaggagcgatgatctttacatcaccaccgtcccttgtttcttcaaatgtccaatttcacttgatgtgatgaaatctccggtgagtctctccaccggcgttacatacgaccgagttagcatccaacgttggctcgatgatggtaacaatacttgtcccgcgacgatgcagattcttcagaacaaagaattcgtacctaacctaactcttcaccgtctcattgatcactggtccgactccatcaaccgtcgagccgattctgagtctccggaatccgatactccgacgcgagacgaaattaacgctgcgattgagagattccggatcgagaatgatgctcgttcgaagattctccggttcgcgagagaatctgatgagaacagagagtttctcgccgggaaagatgatttcgtagcgatgcttgtggatctcattagcgattccagaaacttctctgattctcaattgctactcgttggagaagcggtgaagattctgagcatgattcgtcggaaaatcttcgatcggagacggttatcgaatctgatcttaacgaacggtggtgattgcttgacttccttcttcctattgattaaacgcgggaatccaaaattgaagatcgattgctccgccgtgcttgagtttatcgccgtcgacgcagagtcaaagcttataatcgccaagggagaaggattggtcaccgagattattaaattgataagctcagattccgactcaagcttaatcgaagcgaatttatctttattaatcgcgattgcgtcttcaaaacgcgtgaaactcgcattaatcagagaaaagctagtcacgaaactcacgagtttgttaacagatccaactacgagcgtttcagtgacggaaaaatgcttaaagcttctcgaagctatttcgtcttgtaaagaaggtcgatcggagatttgtgatggtgtgtgcgtggagacggtggtgaataagctgatgaaagtgtcgacggcggcgactgaacacgccgttacggttttgtggagcgtctgttatcttttcaaggaaaagaaggcgcaagatgccgttattagaattaacggcgttacgaagatactgttacttttacagagtaattgctcgcttaccgttaggcatatgctaacggatcttcttaaggtgttcaaggtgaactcaagatcttgcctttcggtatacgaaaccaaaacgacacatattatgccgttttga

SEQ ID NO: 79444 - protein, 409 aa, Arabidopsis thaliana
  peptide (1)..(409): Ceres Seq. ID no. 12651373
  misc_feature (10)..(85): Pfam Name: U-box domain Pfam Description: U-box domain
  misc_feature (1)..(409): Homolog of NCBI NO: 15242515 NR Description: putative protein; protein id: At5g09800.1
  misc_feature (1)..(409): Homolog of NCBI NO: 15237755 NR Description: putative protein; protein id: At5g64660.1 thaliana] >gi|10178069|dbj|BAB11433.1|
  misc_feature (5)..(409): Homolog of NCBI NO: 15230166 NR Description: hypothetical protein; protein id: At3g18710.1 thaliana] >gi|9293894|dbj|BAB01797.1| gene_id:MVE11.7~unknown
  misc_feature (5)..(409): Homolog of NCBI NO: 26451013 NR Description: unknown protein [Arabidopsis thaliana]
  misc_feature (2)..(409): Homolog of NCBI NO: 13539578 NR Description: photoperiod responsive protein [Solanum tuberosum
  misc_feature (11)..(409): Homolog of NCBI NO: 38605834 NR Description: OSJNBb0108J11.6 [Oryza sativa (japonica
  misc_feature (4)..(391): Homolog of NCBI NO: 14582200 NR Description: immediate-early fungal elicitor protein CMPG1
  misc_feature (11)..(391): Homolog of NCBI NO: 30013683 NR Description: Avr9/Cf-9 rapidly elicited protein 74 [Nicotiana
  misc_feature (11)..(387): Homolog of NCBI NO: 25408431 NR Description: hypothetical protein At2g35930 [imported] - thaliana >gi|4510376|gb|AAD21464.1| unknown protein [Arabidopsis
  misc_feature (11)..(387): Homolog of NCBI NO: 30686609 NR Description: expressed protein [Arabidopsis thaliana]
MRSDDLYITTVPCFFKCPISLDVMKSPVSLSTGVTYDRVSIQRWLDDGNNTCPATMQILQNKEFVPNLTLHRLIDHWSDSINRRADSESPESDTPTRDEINAAIERFRIENDARSKILRFARESDENREFLAGKDDFVAMLVDLISDSRNFSDSQLLLVGEAVKILSMIRRKIFDRRRLSNLILTNGGDCLTSFFLLIKRGNPKLKIDCSAVLEFIAVDAESKLIIAKGEGLVTEIIKLISSDSDSSLIEANLSLLIAIASSKRVKLALIREKLVTKLTSLLTDPTTSVSVTEKCLKLLEAISSCKEGRSEICDGVCVETVVNKLMKVSTAATEHAVTVLWSVCYLFKEKKAQDAVIRINGVTKILLLLQSNCSLTVRHMLTDLLKVFKVNSRSCLSVYETKTTHIMPF

SEQ ID NO: 79445 - protein, 386 aa, Arabidopsis thaliana
  peptide (1)..(386): Ceres Seq. ID no. 12651374
  misc_feature (1)..(62): Pfam Name: U-box domain Pfam Description: U-box domain
  misc_feature (1)..(386): Homolog of NCBI NO: 15242515 NR Description: putative protein; protein id: At5g09800.1
  misc_feature (1)..(386): Homolog of NCBI NO: 15237755 NR Description: putative protein; protein id: At5g64660.1 thaliana] >gi|10178069|dbj|BAB11433.1|
  misc_feature (1)..(386): Homolog of NCBI NO: 15230166 NR Description: hypothetical protein; protein id: At3g18710.1 thaliana] >gi|9293894|dbj|BAB01797.1| gene_id:MVE11.7~unknown
  misc_feature (1)..(386): Homolog of NCBI NO: 26451013 NR Description: unknown protein [Arabidopsis thaliana]
  misc_feature (1)..(386): Homolog of NCBI NO: 13539578 NR Description: photoperiod responsive protein [Solanum tuberosum
  misc_feature (1)..(386): Homolog of NCBI NO: 38605834 NR Description: OSJNBb0108J11.6 [Oryza sativa (japonica
  misc_feature (1)..(368): Homolog of NCBI NO: 14582200 NR Description: immediate-early fungal elicitor protein CMPG1
  misc_feature (1)..(368): Homolog of NCBI NO: 30013683 NR Description: Avr9/Cf-9 rapidly elicited protein 74 [Nicotiana
  misc_feature (1)..(364): Homolog of NCBI NO: 25408431 NR Description: hypothetical protein At2g35930 [imported] - thaliana >gi|4510376|gb|AAD21464.1| unknown protein [Arabidopsis
  misc_feature (1)..(364): Homolog of NCBI NO: 30686609 NR Description: expressed protein [Arabidopsis thaliana]
MKSPVSLSTGVTYDRVSIQRWLDDGNNTCPATMQILQNKEFVPNLTLHRLIDHWSDSINRRADSESPESDTPTRDEINAAIERFRIENDARSKILRFARESDENREFLAGKDDFVAMLVDLISDSRNFSDSQLLLVGEAVKILSMIRRKIFDRRRLSNLILTNGGDCLTSFFLLIKRGNPKLKIDCSAVLEFIAVDAESKLIIAKGEGLVTEIIKLISSDSDSSLIEANLSLLIAIASSKRVKLALIREKLVTKLTSLLTDPTTSVSVTEKCLKLLEAISSCKEGRSEICDGVCVETVVNKLMKVSTAATEHAVTVLWSVCYLFKEKKAQDAVIRINGVTKILLLLQSNCSLTVRHMLTDLLKVFKVNSRSCLSVYETKTTHIMPF

SEQ ID NO: 79446 - protein, 354 aa, Arabidopsis thaliana
  peptide (1)..(354): Ceres Seq. ID no. 12651375
  misc_feature (1)..(354): Homolog of NCBI NO: 15242515 NR Description: putative protein; protein id: At5g09800.1
  misc_feature (1)..(354): Homolog of NCBI NO: 15237755 NR Description: putative protein; protein id: At5g64660.1 thaliana] >gi|10178069|dbj|BAB11433.1|
  misc_feature (1)..(354): Homolog of NCBI NO: 15230166 NR Description: hypothetical protein; protein id: At3g18710.1 thaliana] >gi|9293894|dbj|BAB01797.1| gene_id:MVE11.7~unknown
  misc_feature (1)..(354): Homolog of NCBI NO: 26451013 NR Description: unknown protein [Arabidopsis thaliana]
  misc_feature (1)..(354): Homolog of NCBI NO: 13539578 NR Description: photoperiod responsive protein [Solanum tuberosum
  misc_feature (1)..(354): Homolog of NCBI NO: 38605834 NR Description: OSJNBb0108J11.6 [Oryza sativa (japonica
  misc_feature (1)..(336): Homolog of NCBI NO: 14582200 NR Description: immediate-early fungal elicitor protein CMPG1
  misc_feature (1)..(336): Homolog of NCBI NO: 30013683 NR Description: Avr9/Cf-9 rapidly elicited protein 74 [Nicotiana
  misc_feature (1)..(332): Homolog of NCBI NO: 25408431 NR Description: hypothetical protein At2g35930 [imported] - thaliana >gi|4510376|gb|AAD21464.1| unknown protein [Arabidopsis
  misc_feature (1)..(332): Homolog of NCBI NO: 30686609 NR Description: expressed protein [Arabidopsis thaliana]
MQILQNKEFVPNLTLHRLIDHWSDSINRRADSESPESDTPTRDEINAAIERFRIENDARSKILRFARESDENREFLAGKDDFVAMLVDLISDSRNFSDSQLLLVGEAVKILSMIRRKIFDRRRLSNLILTNGGDCLTSFFLLIKRGNPKLKIDCSAVLEFIAVDAESKLIIAKGEGLVTEIIKLISSDSDSSLIEANLSLLIAIASSKRVKLALIREKLVTKLTSLLTDPTTSVSVTEKCLKLLEAISSCKEGRSEICDGVCVETVVNKLMKVSTAATEHAVTVLWSVCYLFKEKKAQDAVIRINGVTKILLLLQSNCSLTVRHMLTDLLKVFKVNSRSCLSVYETKTTHIMPF

SEQ ID NO: 79447 - DNA, 1956 bp, Arabidopsis thaliana
  misc_feature (1)..(1956): Ceres Seq. ID no. 12651380
  misc_feature: MA Experiment ID: 20000171 Result: Down-regulated in Transcription
  misc_feature: MA Experiment 20000171 PARAMETER Experiment Name: At_42deg_Heat_P Parameter: Age (day) Value: 14
  misc_feature: MA Experiment 20000171 PARAMETER Experiment Name: At_42deg_Heat_P Parameter: Organism Value: A. thaliana
  misc_feature: MA Experiment 20000171 PARAMETER Experiment Name: At_42deg_Heat_P Parameter: Plant Line Value: WS
  misc_feature: MA Experiment 20000171 PARAMETER Experiment Name: At_42deg_Heat_P Parameter: Temperature (deg C) Value: 42 vs. 22
  misc_feature: MA Experiment 20000171 PARAMETER Experiment Name: At_42deg_Heat_P Parameter: Timepoint (hr) Value: 1
  misc_feature: MA Experiment 20000171 PARAMETER Experiment Name: At_42deg_Heat_P Parameter: Tissue Value: Aerial
  misc_feature: MA Experiment ID: 20000173 Result: Down-regulated in Transcription
  misc_feature: MA Experiment 20000173 PARAMETER Experiment Name: At_42deg_Heat_P Parameter: Age (day) Value: 14
  misc_feature: MA Experiment 20000173 PARAMETER Experiment Name: At_42deg_Heat_P Parameter: Organism Value: A. thaliana
  misc_feature: MA Experiment 20000173 PARAMETER Experiment Name: At_42deg_Heat_P Parameter: Plant Line Value: WS
  misc_feature: MA Experiment 20000173 PARAMETER Experiment Name: At_42deg_Heat_P Parameter: Temperature (deg C) Value: 42 vs. 22
  misc_feature: MA Experiment 20000173 PARAMETER Experiment Name: At_42deg_Heat_P Parameter: Timepoint (hr) Value: 6
  misc_feature: MA Experiment 20000173 PARAMETER Experiment Name: At_42deg_Heat_P Parameter: Tissue Value: Aerial
  misc_feature: MA Experiment ID: 20000184 Result: Down-regulated in Transcription
  misc_feature: MA Experiment 20000184 PARAMETER Experiment Name: At_Shoots__P Parameter: Age (day) Value: 7
  misc_feature: MA Experiment 20000184 PARAMETER Experiment Name: At_Shoots__P Parameter: Tissue Value: Shoots vs. Whole Plant
  misc_feature: MA Experiment ID: 20000235 Result: Up-regulated in Transcription
  misc_feature: MA Experiment 20000235 PARAMETER Experiment Name: At_Siliques_P Parameter: Age (day) Value: 21
  misc_feature: MA Experiment 20000235 PARAMETER Experiment Name: At_Siliques_P Parameter: Organism Value: A. thaliana
  misc_feature: MA Experiment 20000235 PARAMETER Experiment Name: At_Siliques_P Parameter: Plant Line Value: WS
  misc_feature: MA Experiment 20000235 PARAMETER Experiment Name: At_Siliques_P Parameter: Tissue Value: 5-10mm Siliques vs. Whole Plant
  misc_feature: MA Experiment ID: 20000794 Result: Up-regulated in Transcription
  misc_feature: MA Experiment 20000794 PARAMETER Experiment Name: At_Petals_P Parameter: Age (day) Value: 23-25 days
  misc_feature: MA Experiment 20000794 PARAMETER Experiment Name: At_Petals_P Parameter: Plant Line Value: WS
  misc_feature: MA Experiment 20000794 PARAMETER Experiment Name: At_Petals_P Parameter: Tissue Value: Petals vs. Whole plant
  misc_feature: MA Experiment ID: 20001905 Result: Down-regulated in Transcription
  misc_feature: MA Experiment 20001905 PARAMETER Experiment Name: At_Drought_Reproduction_P Parameter: Age (day) Value: 40
  misc_feature: MA Experiment 20001905 PARAMETER Experiment Name: At_Drought_Reproduction_P Parameter: Organism Value: A. thaliana
  misc_feature: MA Experiment 20001905 PARAMETER Experiment Name: At_Drought_Reproduction_P Parameter: Plant Line Value: WS
  misc_feature: MA Experiment 20001905 PARAMETER Experiment Name: At_Drought_Reproduction_P Parameter: Timepoint (day) Value: 10
  misc_feature: MA Experiment 20001905 PARAMETER Experiment Name: At_Drought_Reproduction_P Parameter: Tissue Value: Rosettes
  misc_feature: MA Experiment 20001905 PARAMETER Experiment Name: At_Drought_Reproduction_P Parameter: Treatment Value: Drought vs. No Drought
aaaaaaagtaaacgccattattgaaagaaaaacactcacatctctctctctctctctctagagctgttcatctccccaaccacaacaaaccaacttgcttagctttgctctgtccagggcaaagagcatcatccctcaataaagcaattcccattttcttcttttacttttgtcctaaaactgttaattgattctgtctgaatattatttttattaacggaccaaacaaaaaaaaacttgcagaagaatgaaagaaaaagcaataaccctccaaaccaaattctaaagcctcaaatttggaatattccctttcttcttcattcccttttttttttttaatttgccatttactcattattgatcttatgtgagacgacctcctctgtttctttcttcctcgtaacagtaaagggtcttcctttttaatctgaatttaccaatctgattcttctgttttttgttttttttatttgtctatcttttaaactatttgaaatctaaactttgtttggttcttcacgatttttaatctccgatgaatcaaattcatcaaaagattcatcttttagatctggttacgtaattcgatttgctctgttttttgtttttcgttttgaattctttattaagtaaccaaatttggggaagaaggaggagtgtgggtgataatggatttggatgatttccgatcggttatggataacgcaggtgttgatgtttggacatttatcgatacggcgattcttgttgcgtctcttgactatggtcaagaactgaaacgtcggagagataacatcgtcgagcgtctctacgctacgtcgatggctaacaagtgtagaaactgcgattttggcggcggtggtaacgttacggaggcggcgattggtagggttaataatgggagggttcacgaggagacggaggaggaagatgaagaaggagtaacagcagcagcagaagaagaagttagagagaaatctgttaatgttgaagacgatgacgatttcgatccctttgctggtttgtttgatgatgagcagaagagtattgttgaaatcaaggagaaacttgaagatcctgatctgtctgaagaatctttggttgagttgcttcagaatctggaagatatggatataacattccaagctcttcaggaaactgatattgggaggcatgtgaatcgagttcggaagcatccttcgaacaatgttcgaagattagctaaacagcttgtcaaaaaatggaaggaaacagtagatgaatgggtcaaatttaaccagcctggtgatcttgaacctccaagtttgatagccgatgaggattcaccggtgcagaaagctcttcataatggtagtcgccaacaggtccctgatttcggatattcaccggttcctcagaatgggtattccagttcaagcaagaacagtaacattactgagccagaaagaaaaccaagacctgttgctcctcaacctaggagagaatctccttctccagcaaaaccttctcgcccttctccttctcaacaaaccattccgagggacaaagagcataaagaagttgatttcgacacggccaggaaaaggctacaacaaaactacagacaagccgagaatgcaaaaaagcaaaggactatacaggtgatggacattcatgacattcctaaacctaagaaaggtggatttttcccaagaaaaggcgggagttctcaaggtggtagacactggtaaattgagaaagatgagagttaagtgaggaagagaaaaaaagacagagaacaaagctctgtttctgagacacaagaagacagtgaattctaaaaatgtttcaagaatttggaattaagttggtgggtacacttgttttctattttgttgttactactacgtatatttttttctgataaagaacataatttttcttggattttattaaataatagattcgaaaaaaatc

SEQ ID NO: 79448 - protein, 353 aa, Arabidopsis thaliana
  peptide (1)..(353): Ceres Seq. ID no. 12651381
  misc_feature (1)..(353): Homolog of NCBI NO: 18416107 NR Description: putative protein; protein id: At5g09850.1,
  misc_feature (1)..(353): Homolog of NCBI NO: 9758963 NR Description: gb|AAF19567.1~gene_id:MYH9.6~similar to unknown
  misc_feature (52)..(353): Homolog of NCBI NO: 16648730 NR Description: AT5g09850/MYH9_6 [Arabidopsis thaliana]
  misc_feature (3)..(327): Homolog of NCBI NO: 34904746 NR Description: contains ESTs
  misc_feature (301)..(353): Homolog of NCBI NO: 34904746 NR Description: contains ESTs
  misc_feature (3)..(334): Homolog of NCBI NO: 9759255 NR Description: contains similarity to unknown
  misc_feature (127)..(249): Homolog of NCBI NO: 15228385 NR Description: hypothetical protein; protein id: At3g10820.1 thaliana] >gi|6630548|gb|AAF19567.1|AC011708_10 hypothetical
  misc_feature (253)..(336): Homolog of NCBI NO: 15228385 NR Description: hypothetical protein; protein id: At3g10820.1 thaliana] >gi|6630548|gb|AAF19567.1|AC011708_10 hypothetical
  misc_feature (140)..(215): Homolog of NCBI NO: 37532806 NR Description: putative transcription elongation factor [Oryza
  misc_feature (294)..(327): Homolog of NCBI NO: 37532806 NR Description: putative transcription elongation factor [Oryza
MDLDDFRSVMDNAGVDVWTFIDTAILVASLDYGQELKRRRDNIVERLYATSMANKCRNCDFGGGGNVTEAAIGRVNNGRVHEETEEEDEEGVTAAAEEEVREKSVNVEDDDDFDPFAGLFDDEQKSIVEIKEKLEDPDLSEESLVELLQNLEDMDITFQALQETDIGRHVNRVRKHPSNNVRRLAKQLVKKWKETVDEWVKFNQPGDLEPPSLIADEDSPVQKALHNGSRQQVPDFGYSPVPQNGYSSSSKNSNITEPERKPRPVAPQPRRESPSPAKPSRPSPSQQTIPRDKEHKEVDFDTARKRLQQNYRQAENAKKQRTIQVMDIHDIPKPKKGGFFPRKGGSSQGGRHW

SEQ ID NO: 79449 - protein, 344 aa, Arabidopsis thaliana
  peptide (1)..(344): Ceres Seq. ID no. 12651382
  misc_feature (1)..(344): Homolog of NCBI NO: 18416107 NR Description: putative protein; protein id: At5g09850.1,
  misc_feature (1)..(344): Homolog of NCBI NO: 9758963 NR Description: gb|AAF19567.1~gene_id:MYH9.6~similar to unknown
  misc_feature (43)..(344): Homolog of NCBI NO: 16648730 NR Description: AT5g09850/MYH9_6 [Arabidopsis thaliana]
  misc_feature (1)..(318): Homolog of NCBI NO: 34904746 NR Description: contains ESTs
  misc_feature (292)..(344): Homolog of NCBI NO: 34904746 NR Description: contains ESTs
  misc_feature (1)..(325): Homolog of NCBI NO: 9759255 NR Description: contains similarity to unknown
  misc_feature (118)..(240): Homolog of NCBI NO: 15228385 NR Description: hypothetical protein; protein id: At3g10820.1 thaliana] >gi|6630548|gb|AAF19567.1|AC011708_10 hypothetical
  misc_feature (244)..(327): Homolog of NCBI NO: 15228385 NR Description: hypothetical protein; protein id: At3g10820.1 thaliana] >gi|6630548|gb|AAF19567.1|AC011708_10 hypothetical
  misc_feature (131)..(206): Homolog of NCBI NO: 37532806 NR Description: putative transcription elongation factor [Oryza
  misc_feature (285)..(318): Homolog of NCBI NO: 37532806 NR Description: putative transcription elongation factor [Oryza
MDNAGVDVWTFIDTAILVASLDYGQELKRRRDNIVERLYATSMANKCRNCDFGGGGNVTEAAIGRVNNGRVHEETEEEDEEGVTAAAEEEVREKSVNVEDDDDFDPFAGLFDDEQKSIVEIKEKLEDPDLSEESLVELLQNLEDMDITFQALQETDIGRHVNRVRKHPSNNVRRLAKQLVKKWKETVDEWVKFNQPGDLEPPSLIADEDSPVQKALHNGSRQQVPDFGYSPVPQNGYSSSSKNSNITEPERKPRPVAPQPRRESPSPAKPSRPSPSQQTIPRDKEHKEVDFDTARKRLQQNYRQAENAKKQRTIQVMDIHDIPKPKKGGFFPRKGGSSQGGRHW

SEQ ID NO: 79450 - protein, 302 aa, Arabidopsis thaliana
  peptide (1)..(302): Ceres Seq. ID no. 12651383
  misc_feature (1)..(302): Homolog of NCBI NO: 18416107 NR Description: putative protein; protein id: At5g09850.1,
  misc_feature (1)..(302): Homolog of NCBI NO: 9758963 NR Description: gb|AAF19567.1~gene_id:MYH9.6~similar to unknown
  misc_feature (1)..(302): Homolog of NCBI NO: 16648730 NR Description: AT5g09850/MYH9_6 [Arabidopsis thaliana]
  misc_feature (1)..(276): Homolog of NCBI NO: 34904746 NR Description: contains ESTs
  misc_feature (250)..(302): Homolog of NCBI NO: 34904746 NR Description: contains ESTs
  misc_feature (1)..(283): Homolog of NCBI NO: 9759255 NR Description: contains similarity to unknown
  misc_feature (76)..(198): Homolog of NCBI NO: 15228385 NR Description: hypothetical protein; protein id: At3g10820.1 thaliana] >gi|6630548|gb|AAF19567.1|AC011708_10 hypothetical
  misc_feature (202)..(285): Homolog of NCBI NO: 15228385 NR Description: hypothetical protein; protein id: At3g10820.1 thaliana] >gi|6630548|gb|AAF19567.1|AC011708_10 hypothetical
  misc_feature (89)..(164): Homolog of NCBI NO: 37532806 NR Description: putative transcription elongation factor [Oryza
  misc_feature (243)..(276): Homolog of NCBI NO: 37532806 NR Description: putative transcription elongation factor [Oryza
MANKCRNCDFGGGGNVTEAAIGRVNNGRVHEETEEEDEEGVTAAAEEEVREKSVNVEDDDDFDPFAGLFDDEQKSIVEIKEKLEDPDLSEESLVELLQNLEDMDITFQALQETDIGRHVNRVRKHPSNNVRRLAKQLVKKWKETVDEWVKFNQPGDLEPPSLIADEDSPVQKALHNGSRQQVPDFGYSPVPQNGYSSSSKNSNITEPERKPRPVAPQPRRESPSPAKPSRPSPSQQTIPRDKEHKEVDFDTARKRLQQNYRQAENAKKQRTIQVMDIHDIPKPKKGGFFPRKGGSSQGGRHW

SEQ ID NO: 79451 - DNA, 2037 bp, Arabidopsis thaliana
  misc_feature (1)..(2037): Ceres Seq. ID no. 12651400
  misc_feature: MA Experiment ID: 20000327 Result: Up-regulated in Transcription
  misc_feature: MA Experiment 20000327 PARAMETER Experiment Name: At_42deg_Heat_Sub_P Parameter: Age (day) Value: 14
  misc_feature: MA Experiment 20000327 PARAMETER Experiment Name: At_42deg_Heat_Sub_P Parameter: Organism Value: A. thaliana
  misc_feature: MA Experiment 20000327 PARAMETER Experiment Name: At_42deg_Heat_Sub_P Parameter: Plant Line Value: WS
  misc_feature: MA Experiment 20000327 PARAMETER Experiment Name: At_42deg_Heat_Sub_P Parameter: Temperature (deg C) Value: 42 vs. 22
  misc_feature: MA Experiment 20000327 PARAMETER Experiment Name: At_42deg_Heat_Sub_P Parameter: Timepoint (hr) Value: 1
  misc_feature: MA Experiment 20000327 PARAMETER Experiment Name: At_42deg_Heat_Sub_P Parameter: Tissue Value: Aerial
  misc_feature: MA Experiment ID: 20000328 Result: Up-regulated in Transcription
  misc_feature: MA Experiment 20000328 PARAMETER Experiment Name: At_42deg_Heat_Sub_P Parameter: Age (day) Value: 14
  misc_feature: MA Experiment 20000328 PARAMETER Experiment Name: At_42deg_Heat_Sub_P Parameter: Organism Value: A. thaliana
  misc_feature: MA Experiment 20000328 PARAMETER Experiment Name: At_42deg_Heat_Sub_P Parameter: Plant Line Value: WS
  misc_feature: MA Experiment 20000328 PARAMETER Experiment Name: At_42deg_Heat_Sub_P Parameter: Temperature (deg C) Value: 42 vs. 22
  misc_feature: MA Experiment 20000328 PARAMETER Experiment Name: At_42deg_Heat_Sub_P Parameter: Timepoint (hr) Value: 6
  misc_feature: MA Experiment 20000328 PARAMETER Experiment Name: At_42deg_Heat_Sub_P Parameter: Tissue Value: Aerial
  misc_feature: MA Experiment ID: 20000347 Result: Up-regulated in Transcription
  misc_feature: MA Experiment 20000347 PARAMETER Experiment Name: At_2mM_SA_Sub_P Parameter: Age (day) Value: 14
  misc_feature: MA Experiment 20000347 PARAMETER Experiment Name: At_2mM_SA_Sub_P Parameter: Organism Value: A. thaliana
  misc_feature: MA Experiment 20000347 PARAMETER Experiment Name: At_2mM_SA_Sub_P Parameter: Plant Line Value: WS
  misc_feature: MA Experiment 20000347 PARAMETER Experiment Name: At_2mM_SA_Sub_P Parameter: Timepoint (hr) Value: 6
  misc_feature: MA Experiment 20000347 PARAMETER Experiment Name: At_2mM_SA_Sub_P Parameter: Tissue Value: Aerial
  misc_feature: MA Experiment 20000347 PARAMETER Experiment Name: At_2mM_SA_Sub_P Parameter: Treatment Value: 2mM SA vs. No Treatment
  misc_feature: MA Experiment ID: 20000352 Result: Up-regulated in Transcription
  misc_feature: MA Experiment 20000352 PARAMETER Experiment Name: At_Drought_Sub_P Parameter: Age (day) Value: 7
  misc_feature: MA Experiment 20000352 PARAMETER Experiment Name: At_Drought_Sub_P Parameter: Organism Value: A. thaliana
  misc_feature: MA Experiment 20000352 PARAMETER Experiment Name: At_Drought_Sub_P Parameter: Plant Line Value: WS
  misc_feature: MA Experiment 20000352 PARAMETER Experiment Name: At_Drought_Sub_P Parameter: Timepoint (hr) Value: 6
  misc_feature: MA Experiment 20000352 PARAMETER Experiment Name: At_Drought_Sub_P Parameter: Tissue Value: Whole Plant
  misc_feature: MA Experiment 20000352 PARAMETER Experiment Name: At_Drought_Sub_P Parameter: Treatment Value: Drought vs. No Drought
  misc_feature: MA Experiment ID: 20001807 Result: Down-regulated in Transcription
  misc_feature: MA Experiment 20001807 PARAMETER Experiment Name: At_50mM_NH4NO3_L-to-H_Sub_P Parameter: Timepoint (hr) Value: 6
  misc_feature: MA Experiment 20001807 PARAMETER Experiment Name: At_50mM_NH4NO3_L-to-H_Sub_P Parameter: Tissue Value: Leaf
  misc_feature: MA Experiment 20001807 PARAMETER Experiment Name: At_50mM_NH4NO3_L-to-H_Sub_P Parameter: Treatment Value: 50mM NH4NO3 vs 100mM Mannitol
atggtattaacgacgaatctctatagcttaaaccttcgttcgaccttcttcttcactaatactattacttgccctacacttttcaccttcaaactctcctctgtttctaaccctagacgagtattccccaatattagagctcacgtttccgcagccagctccaattcagagctcgaatctctcttatctaccgatcggaagctgatcagtaagcaatcaaacaatggtgcgtcttcgatttcgtcgggagtgagacttgagaacattagtaagagctatgaaggcattacggtgctaaaggatgtgacttgggaagtgaagaaaggagaaaaagtagggttaatcggcgtcaacggtgcagggaagacgacacagctcaggatcataacgggtcaagaagaacctgattcaggaaacgtgatttgggccaaacccaatttgaaagttgctttcttgagtcaagagttcgaggtttcaatggggaagacagtgaaggaagagttcatgtgtacgtttaaggaagagatggaaatagcgaggaagcttgagaacttgcagaaggcgattgaagaagctgttgatgatttagaactaatgggaaagttactagacgaattcgatttgttgcagagacgagctcaagaggttgatttggattctatccatgctaaaatcagtaagctgatgtcggaattagggtttgtgtcggaggatgctgataggcttgtggcttcttttagcagtggatggcaaatgagaatgtcacttgggaagattttgcttcagaatccagatttactgcttttggatgagccaacgaatcatttggatcttgatactattgagtggcttgaaggttacttgattaagcaagatgtgcctatggtcataatatcacatgacagggcgtttcttgatcagttgtgtactaaaattgtggaaaccgaaatgggagtttcgaggactttcgatggtaattactctcagtatgtaatttcaaaggcagagttggttgaagctcagtatgctgcttgggagaagcaacagaaagagattgaagcaacaaaggatttgattagtaggctaagtgctggagcaaattctggtcgagcttcttcagcagaaaagaaactggagaagcttcaggaagaggagctaatagagaagccatttcagcggaaacaaatgaaaatccggtttccggaatgtggattaagtggaagatctgtagtcactgttaagaatcttgtatttggttttgatgataagatgttatttaacaaggcgaatctagctatagaaagaggagagaaagtcgctataattggtccaaacgggtgcggaaagagtacattgctgaaacttattatgggtttggagaagcctatgagaggtgaggtgatacttggggagcacaatgtattgccaaactacttcgagcagaatcaggcagaggctcaagatttggataaaacggtgattgagacagttgttgaagctgctgtagattggagaattgatgatataaaagctcttcttggtcggtgcaacttcaaagctgacatgttggatagaaaggtctctcttttgagtggtggtgagaaggcacgccttgctttctgcaaattcatggtgaaaccatccactctacttgtgttggacgaacccaccaatcacttagacataccttcaaaagaaatgcttgaggaagctataaatgagtacaaaggcacggtcatcacagtctcacacgatagatacttcattaaacagattgttaacagagttattgaagtcagagatggtggtttaatggactatgcaggagactacaattatttcctggagaagaatgttgaagctagagcaagggagctggagagggaagcagaattggaagaaaaagctccaaaagtgaaagcaaagtcaaagatgtcaaaggctgagagagaagcacggaagaagcaaaagatgaaagcgtttcaagcttccaaaaagaagtcaaagtccagcaaaaatgccaagagatggaattaa

SEQ ID NO: 79452 - protein, 678 aa, Arabidopsis thaliana
  peptide (1)..(678): Ceres Seq. ID no. 12651401
  misc_feature (109)..(318): Pfam Name: ABC transporter Pfam Description: ABC transporter
  misc_feature (1)..(678): Homolog of NCBI NO: 15238261 NR Description: ABC transporter family protein; protein id:
  misc_feature (1)..(678): Homolog of NCBI NO: 15912315 NR Description: AT5g64840/MXK3_6 [Arabidopsis thaliana]
  misc_feature (84)..(651): Homolog of NCBI NO: 17231675 NR Description: ATP-binding protein of ABC transporter [Nostoc
  misc_feature (84)..(670): Homolog of NCBI NO: 23039563 NR Description: hypothetical protein [Trichodesmium erythraeum
  misc_feature (84)..(647): Homolog of NCBI NO: 23123983 NR Description: hypothetical protein [Nostoc punctiforme]
  misc_feature (84)..(657): Homolog of NCBI NO: 16330402 NR Description: ABC transporter [Synechocystis sp. PCC 6803]
  misc_feature (84)..(667): Homolog of NCBI NO: 37519667 NR Description: ABC transporter ATP-binding protein [Gloeobacter
  misc_feature (84)..(659): Homolog of NCBI NO: 23055291 NR Description: hypothetical protein [Geobacter metallireducens]
  misc_feature (84)..(657): Homolog of NCBI NO: 20807041 NR Description: ATPase components of ABC transporters with ATPase domains [Thermoanaerobacter tengcongensis] ATPase components of ABC transporters with duplicated ATPase
  misc_feature (84)..(657): Homolog of NCBI NO: 27468566 NR Description: vga protein [Staphylococcus epidermidis ATCC >gi|27316113|gb|AAO05247.1|AE016749_193 vga protein
MVLTTNLYSLNLRSTFFFTNTITCPTLFTFKLSSVSNPRRVFPNIRAHVSAASSNSELESLLSTDRKLISKQSNNGASSISSGVRLENISKSYEGITVLKDVTWEVKKGEKVGLIGVNGAGKTTQLRIITGQEEPDSGNVIWAKPNLKVAFLSQEFEVSMGKTVKEEFMCTFKEEMEIARKLENLQKAIEEAVDDLELMGKLLDEFDLLQRRAQEVDLDSIHAKISKLMSELGFVSEDADRLVASFSSGWQMRMSLGKILLQNPDLLLLDEPTNHLDLDTIEWLEGYLIKQDVPMVIISHDRAFLDQLCTKIVETEMGVSRTFDGNYSQYVISKAELVEAQYAAWEKQQKEIEATKDLISRLSAGANSGRASSAEKKLEKLQEEELIEKPFQRKQMKIRFPECGLSGRSVVTVKNLVFGFDDKMLFNKANLAIERGEKVAIIGPNGCGKSTLLKLIMGLEKPMRGEVILGEHNVLPNYFEQNQAEAQDLDKTVIETVVEAAVDWRIDDIKALLGRCNFKADMLDRKVSLLSGGEKARLAFCKFMVKPSTLLVLDEPTNHLDIPSKEMLEEAINEYKGTVITVSHDRYFIKQIVNRVIEVRDGGLMDYAGDYNYFLEKNVEARARELEREAELEEKAPKVKAKSKMSKAEREARKKQKMKAFQASKKKSKSSKNAKRWN

SEQ ID NO: 79453 - protein, 519 aa, Arabidopsis thaliana
  peptide (1)..(519): Ceres Seq. ID no. 12651402
  misc_feature (1)..(159): Pfam Name: ABC transporter Pfam Description: ABC transporter
  misc_feature (1)..(519): Homolog of NCBI NO: 15238261 NR Description: ABC transporter family protein; protein id:
  misc_feature (1)..(519): Homolog of NCBI NO: 15912315 NR Description: AT5g64840/MXK3_6 [Arabidopsis thaliana]
  misc_feature (1)..(492): Homolog of NCBI NO: 17231675 NR Description: ATP-binding protein of ABC transporter [Nostoc
  misc_feature (1)..(511): Homolog of NCBI NO: 23039563 NR Description: hypothetical protein [Trichodesmium erythraeum
  misc_feature (1)..(488): Homolog of NCBI NO: 23123983 NR Description: hypothetical protein [Nostoc punctiforme]
  misc_feature (1)..(498): Homolog of NCBI NO: 16330402 NR Description: ABC transporter [Synechocystis sp. PCC 6803]
  misc_feature (1)..(508): Homolog of NCBI NO: 37519667 NR Description: ABC transporter ATP-binding protein [Gloeobacter
  misc_feature (1)..(500): Homolog of NCBI NO: 23055291 NR Description: hypothetical protein [Geobacter metallireducens]
  misc_feature (1)..(498): Homolog of NCBI NO: 20807041 NR Description: ATPase components of ABC transporters with ATPase domains [Thermoanaerobacter tengcongensis] ATPase components of ABC transporters with duplicated ATPase
  misc_feature (1)..(498): Homolog of NCBI NO: 27468566 NR Description: vga protein [Staphylococcus epidermidis ATCC >gi|27316113|gb|AAO05247.1|AE016749_193 vga protein
MGKTVKEEFMCTFKEEMEIARKLENLQKAIEEAVDDLELMGKLLDEFDLLQRRAQEVDLDSIHAKISKLMSELGFVSEDADRLVASFSSGWQMRMSLGKILLQNPDLLLLDEPTNHLDLDTIEWLEGYLIKQDVPMVIISHDRAFLDQLCTKIVETEMGVSRTFDGNYSQYVISKAELVEAQYAAWEKQQKEIEATKDLISRLSAGANSGRASSAEKKLEKLQEEELIEKPFQRKQMKIRFPECGLSGRSVVTVKNLVFGFDDKMLFNKANLAIERGEKVAIIGPNGCGKSTLLKLIMGLEKPMRGEVILGEHNVLPNYFEQNQAEAQDLDKTVIETVVEAAVDWRIDDIKALLGRCNFKADMLDRKVSLLSGGEKARLAFCKFMVKPSTLLVLDEPTNHLDIPSKEMLEEAINEYKGTVITVSHDRYFIKQIVNRVIEVRDGGLMDYAGDYNYFLEKNVEARARELEREAELEEKAPKVKAKSKMSKAEREARKKQKMKAFQASKKKSKSSKNAKRWN

SEQ ID NO: 79454 - protein, 510 aa, Arabidopsis thaliana
  peptide (1)..(510): Ceres Seq. ID no. 12651403
  misc_feature (1)..(150): Pfam Name: ABC transporter Pfam Description: ABC transporter
  misc_feature (1)..(510): Homolog of NCBI NO: 15238261 NR Description: ABC transporter family protein; protein id:
  misc_feature (1)..(510): Homolog of NCBI NO: 15912315 NR Description: AT5g64840/MXK3_6 [Arabidopsis thaliana]
  misc_feature (1)..(483): Homolog of NCBI NO: 17231675 NR Description: ATP-binding protein of ABC transporter [Nostoc
  misc_feature (1)..(502): Homolog of NCBI NO: 23039563 NR Description: hypothetical protein [Trichodesmium erythraeum
  misc_feature (1)..(479): Homolog of NCBI NO: 23123983 NR Description: hypothetical protein [Nostoc punctiforme]
  misc_feature (1)..(489): Homolog of NCBI NO: 16330402 NR Description: ABC transporter [Synechocystis sp. PCC 6803]
  misc_feature (1)..(499): Homolog of NCBI NO: 37519667 NR Description: ABC transporter ATP-binding protein [Gloeobacter
  misc_feature (1)..(491): Homolog of NCBI NO: 23055291 NR Description: hypothetical protein [Geobacter metallireducens]
  misc_feature (1)..(489): Homolog of NCBI NO: 20807041 NR Description: ATPase components of ABC transporters with ATPase domains [Thermoanaerobacter tengcongensis] ATPase components of ABC transporters with duplicated ATPase
  misc_feature (1)..(489): Homolog of NCBI NO: 27468566 NR Description: vga protein [Staphylococcus epidermidis ATCC >gi|27316113|gb|AAO05247.1|AE016749_193 vga protein
MCTFKEEMEIARKLENLQKAIEEAVDDLELMGKLLDEFDLLQRRAQEVDLDSIHAKISKLMSELGFVSEDADRLVASFSSGWQMRMSLGKILLQNPDLLLLDEPTNHLDLDTIEWLEGYLIKQDVPMVIISHDRAFLDQLCTKIVETEMGVSRTFDGNYSQYVISKAELVEAQYAAWEKQQKEIEATKDLISRLSAGANSGRASSAEKKLEKLQEEELIEKPFQRKQMKIRFPECGLSGRSVVTVKNLVFGFDDKMLFNKANLAIERGEKVAIIGPNGCGKSTLLKLIMGLEKPMRGEVILGEHNVLPNYFEQNQAEAQDLDKTVIETVVEAAVDWRIDDIKALLGRCNFKADMLDRKVSLLSGGEKARLAFCKFMVKPSTLLVLDEPTNHLDIPSKEMLEEAINEYKGTVITVSHDRYFIKQIVNRVIEVRDGGLMDYAGDYNYFLEKNVEARARELEREAELEEKAPKVKAKSKMSKAEREARKKQKMKAFQASKKKSKSSKNAKRWN

SEQ ID NO: 79455 - DNA, 2158 bp, Arabidopsis thaliana
  misc_feature (1)..(2158): Ceres Seq. ID no. 12651404
  misc_feature: MA Experiment ID: 20000179 Result: Down-regulated in Transcription
  misc_feature: MA Experiment 20000179 PARAMETER Experiment Name: At_Germinating_Seeds_P Parameter: Age (hr) Value: 6 vs. 0
  misc_feature: MA Experiment 20000179 PARAMETER Experiment Name: At_Germinating_Seeds_P Parameter: Tissue Value: Germinating Seeds
  misc_feature: MA Experiment ID: 20000180 Result: Down-regulated in Transcription
  misc_feature: MA Experiment 20000180 PARAMETER Experiment Name: At_Germinating_Seeds_P Parameter: Age (hr) Value: 24 vs. 0
  misc_feature: MA Experiment 20000180 PARAMETER Experiment Name: At_Germinating_Seeds_P Parameter: Tissue Value: Germinating Seeds
  misc_feature: MA Experiment ID: 20000286 Result: Up-regulated in Transcription
  misc_feature: MA Experiment 20000286 PARAMETER Experiment Name: At_Open_Flower_P Parameter: Age (day) Value: 21
  misc_feature: MA Experiment 20000286 PARAMETER Experiment Name: At_Open_Flower_P Parameter: Plant Line Value: WS
  misc_feature: MA Experiment 20000286 PARAMETER Experiment Name: At_Open_Flower_P Parameter: Tissue Value: Half Open vs. Whole Plant
  misc_feature: MA Experiment ID: 20000438 Result: Up-regulated in Transcription
  misc_feature: MA Experiment 20000438 PARAMETER Experiment Name: At_Shoots__P Parameter: Age (day) Value: 14
  misc_feature: MA Experiment 20000438 PARAMETER Experiment Name: At_Shoots__P Parameter: Tissue Value: Shoots vs. Whole Plant
  misc_feature: MA Experiment ID: 20001247 Result: Up-regulated in Transcription
  misc_feature: MA Experiment 20001247 PARAMETER Experiment Name: At_Far-red-induction_P Parameter: Age (day) Value: 7
  misc_feature: MA Experiment 20001247 PARAMETER Experiment Name: At_Far-red-induction_P Parameter: Light Value: Far-red vs. White
  misc_feature: MA Experiment 20001247 PARAMETER Experiment Name: At_Far-red-induction_P Parameter: Organism Value: A. thaliana
  misc_feature: MA Experiment 20001247 PARAMETER Experiment Name: At_Far-red-induction_P Parameter: Plant Line Value: Columbia
  misc_feature: MA Experiment 20001247 PARAMETER Experiment Name: At_Far-red-induction_P Parameter: Timepoint (hr) Value: 1
  misc_feature: MA Experiment 20001247 PARAMETER Experiment Name: At_Far-red-induction_P Parameter: Tissue Value: Whole Plant
  misc_feature: MA Experiment ID: 20001248 Result: Up-regulated in Transcription
  misc_feature: MA Experiment 20001248 PARAMETER Experiment Name: At_Far-red-induction_P Parameter: Age (day) Value: 7
  misc_feature: MA Experiment 20001248 PARAMETER Experiment Name: At_Far-red-induction_P Parameter: Light Value: Far-red vs. White
  misc_feature: MA Experiment 20001248 PARAMETER Experiment Name: At_Far-red-induction_P Parameter: Organism Value: A. thaliana
  misc_feature: MA Experiment 20001248 PARAMETER Experiment Name: At_Far-red-induction_P Parameter: Plant Line Value: Columbia
  misc_feature: MA Experiment 20001248 PARAMETER Experiment Name: At_Far-red-induction_P Parameter: Timepoint (hr) Value: 4
  misc_feature: MA Experiment 20001248 PARAMETER Experiment Name: At_Far-red-induction_P Parameter: Tissue Value: Whole Plant
  misc_feature: MA Experiment ID: 20001450 Result: Up-regulated in Transcription
  misc_feature: MA Experiment 20001450 PARAMETER Experiment Name: At_Far-red-induction_P Parameter: Age (day) Value: 7
  misc_feature: MA Experiment 20001450 PARAMETER Experiment Name: At_Far-red-induction_P Parameter: Light Value: Far-red vs. White
  misc_feature: MA Experiment 20001450 PARAMETER Experiment Name: At_Far-red-induction_P Parameter: Organism Value: A. thaliana
  misc_feature: MA Experiment 20001450 PARAMETER Experiment Name: At_Far-red-induction_P Parameter: Plant Line Value: Columbia
  misc_feature: MA Experiment 20001450 PARAMETER Experiment Name: At_Far-red-induction_P Parameter: Timepoint (hr) Value: 8
  misc_feature: MA Experiment 20001450 PARAMETER Experiment Name: At_Far-red-induction_P Parameter: Tissue Value: Whole Plant
atttcaaaaccgacgtctttcttcccatgcattgcgcatttaattaacgctgccaaaacatacatgtggatatatatatagtttttttatatatagatgtacctttaccttcaacttctccattgttcttctccaagtacttctctcttcaaccaaaaaaaaagagtactttccttctcataggatttttttgctttctcttgaaaaaccttttgttattgttattggttcgtacgttgttcattatttgacaagaaacaagattacaaaaaaaaaaagtacatcaacccaaaataatggagttgatgaatttggcttcaaaagaaacaagctattggatgattgcactgcctgccggttttggatcccaaaacctacatgatgtttccaccctaggctatctattccttgccgtcgtttttctctctatagtcacgtgggctctcgccggaggcggtggtgtcgcttggaagaacggccgtaaccggttgggtcgtgtcgcgatccctggtcctcgtggcataccagtattcggcagtcttttcactctcagccgaggcttggctcatcggacgttagcagccatggcttggagccgagccaacactgagattatggcttttagccttggttcaacgccggttatcgtggcttctgaaccaaacatagctcgtgagattctgatgtcgcctcacttcgcggaccggccggttaagcagtctgctaagagcctcatgttcagccgagccataggtttcgccccaaacgggacttactggcgcatgttaagaaggatcgcatcgactcacctatttgctcctcggcgtatcttagcacacgaagctgggcgccagctagactgcgctgaaatggtgaaagctgtgtcagtggagcaaaacggcgctggatcagtcgttttaaggaaacacttacaactagccgccttgaacaacatcatgggaagtgtttttgggagaagatacgatcctctggctcagaaagaggatcttgatgagcttacatcaatggttagggaagggttcgagcttttgggtgcttttaattggtctgattatcttccatggctcggttatttctacgactcaattcgtttaaaccaacgttgctcagatctcgtccctcgaattagaaccctcgtcaagaaaatcatcgacgaacatcgagttagtaactctgagaagaaaagagacattggagattttgttgatgtcttattgtctttagacggtgatgagaaacttcaagaagatgacatgatcgccgttttatgggagatgatttttcgagggacagatacaacggcgttattaacggagtggaccatggccgagctagtactgaaccctaacgtgcaaaccaagttacgagacgagattttaactgctgtgggcgacggcgccgacggagacgtggcagatgctgacctggcaaaactcccgtacctaaacgcagtggtgaaggaaactctaaggctgcatcctcctggaccactgctttcatgggctcgtctttccacgtcagacgtccagctcagcaatggcatggtgattccaaagggaactacagcgatggtcaacatgtgggctataacccacgaccagactgtatggtccgacccgctaaagtttgacccggagagattcactgggaatgctgacatggatattcgtggtggggatctaaggcttgcaccgtttggagccggtaggagagtgtgtccggggaagaacatggggctagctactgtgactcggtgggtggctgagttggtacgacggttcgagtggggtcaggatcagaccgagccagttgatcttggtgaggtcttgaagctttcttgtgagatggagcatccgttacgtgccgttgtaacggaaatattttaagtcaaaaaagggctaagtagggttttgatttttgtcaacgttttggttacttataatttttaatttaacgtttttttgttgtcgagaggtatgaattgcagaatgcttgccgttttagtattttatcgagagtttttttttctttcaattggtgacatagtgatttggtttgatatgtagtatcaatgtaccattatcttgtgggtctaaaatctaaatggagtaatgagtaagagatatcaattttggtc

SEQ ID NO: 79456 - protein, 536 aa, Arabidopsis thaliana
  peptide (1)..(536): Ceres Seq. ID no. 12651405
  misc_feature (70)..(528): Pfam Name: Cytochrome P450 Pfam Description: Cytochrome P450
  misc_feature (1)..(536): Homolog of NCBI NO: 15238033 NR Description: cytochrome p450 family; protein id: At5g09970.1 thaliana] >gi|9758975|dbj|BAB09418.1| cytochrome P450 thaliana] >gi|22531126|gb|AAM97067.1| cytochrome P450
  misc_feature (10)..(533): Homolog of NCBI NO: 37534160 NR Description: putative cytochrome 450 [Oryza sativa (japonica group)] >gi|21671915|gb|AAM74277.1| Putative cytochrome 450
  misc_feature (10)..(533): Homolog of NCBI NO: 30962524 NR Description: cytochrome P450 78A11 [Oryza sativa (japonica
  misc_feature (19)..(535): Homolog of NCBI NO: 5921925 NR Description: Cytochrome P450 78A4 >gi|7430620|pir||T08114
  misc_feature (12)..(530): Homolog of NCBI NO: 1352187 NR Description: Cytochrome P450 78A1 (CYPLXXVIII)
  misc_feature (38)..(530): Homolog of NCBI NO: 15228624 NR Description: cytochrome p450 (CYP78A9); protein id: supported by cDNA: 29661., supported by cDNA: gi_17065343, by cDNA: gi_6633988 [Arabidopsis thaliana]
  misc_feature (38)..(530): Homolog of NCBI NO: 21592543 NR Description: cytochrome p450 (CYP78A9) [Arabidopsis thaliana]
  misc_feature (31)..(530): Homolog of NCBI NO: 15226422 NR Description: putative cytochrome P450; protein id: At2g46660.1
  misc_feature (4)..(528): Homolog of NCBI NO: 6715638 NR Description: T25K16.18 [Arabidopsis thaliana]
  misc_feature (12)..(528): Homolog of NCBI NO: 15223341 NR Description: cytochrome P450, putative; protein id:
MELMNLASKETSYWMIALPAGFGSQNLHDVSTLGYLFLAVVFLSIVTWALAGGGGVAWKNGRNRLGRVAIPGPRGIPVFGSLFTLSRGLAHRTLAAMAWSRANTEIMAFSLGSTPVIVASEPNIAREILMSPHFADRPVKQSAKSLMFSRAIGFAPNGTYWRMLRRIASTHLFAPRRILAHEAGRQLDCAEMVKAVSVEQNGAGSVVLRKHLQLAALNNIMGSVFGRRYDPLAQKEDLDELTSMVREGFELLGAFNWSDYLPWLGYFYDSIRLNQRCSDLVPRIRTLVKKIIDEHRVSNSEKKRDIGDFVDVLLSLDGDEKLQEDDMIAVLWEMIFRGTDTTALLTEWTMAELVLNPNVQTKLRDEILTAVGDGADGDVADADLAKLPYLNAVVKETLRLHPPGPLLSWARLSTSDVQLSNGMVIPKGTTAMVNMWAITHDQTVWSDPLKFDPERFTGNADMDIRGGDLRLAPFGAGRRVCPGKNMGLATVTRWVAELVRRFEWGQDQTEPVDLGEVLKLSCEMEHPLRAVVTEIF

SEQ ID NO: 79457 - protein, 533 aa, Arabidopsis thaliana
  peptide (1)..(533): Ceres Seq. ID no. 12651406
  misc_feature (67)..(525): Pfam Name: Cytochrome P450 Pfam Description: Cytochrome P450
  misc_feature (1)..(533): Homolog of NCBI NO: 15238033 NR Description: cytochrome p450 family; protein id: At5g09970.1 thaliana] >gi|9758975|dbj|BAB09418.1| cytochrome P450 thaliana] >gi|22531126|gb|AAM97067.1| cytochrome P450
  misc_feature (7)..(530): Homolog of NCBI NO: 37534160 NR Description: putative cytochrome 450 [Oryza sativa (japonica group)] >gi|21671915|gb|AAM74277.1| Putative cytochrome 450
  misc_feature (7)..(530): Homolog of NCBI NO: 30962524 NR Description: cytochrome P450 78A11 [Oryza sativa (japonica
  misc_feature (16)..(532): Homolog of NCBI NO: 5921925 NR Description: Cytochrome P450 78A4 >gi|7430620|pir||T08114
  misc_feature (9)..(527): Homolog of NCBI NO: 1352187 NR Description: Cytochrome P450 78A1 (CYPLXXVIII)
  misc_feature (35)..(527): Homolog of NCBI NO: 15228624 NR Description: cytochrome p450 (CYP78A9); protein id: supported by cDNA: 29661., supported by cDNA: gi_17065343, by cDNA: gi_6633988 [Arabidopsis thaliana]
  misc_feature (35)..(527): Homolog of NCBI NO: 21592543 NR Description: cytochrome p450 (CYP78A9) [Arabidopsis thaliana]
  misc_feature (28)..(527): Homolog of NCBI NO: 15226422 NR Description: putative cytochrome P450; protein id: At2g46660.1
  misc_feature (1)..(525): Homolog of NCBI NO: 6715638 NR Description: T25K16.18 [Arabidopsis thaliana]
  misc_feature (9)..(525): Homolog of NCBI NO: 15223341 NR Description: cytochrome P450, putative; protein id:
MNLASKETSYWMIALPAGFGSQNLHDVSTLGYLFLAVVFLSIVTWALAGGGGVAWKNGRNRLGRVAIPGPRGIPVFGSLFTLSRGLAHRTLAAMAWSRANTEIMAFSLGSTPVIVASEPNIAREILMSPHFADRPVKQSAKSLMFSRAIGFAPNGTYWRMLRRIASTHLFAPRRILAHEAGRQLDCAEMVKAVSVEQNGAGSVVLRKHLQLAALNNIMGSVFGRRYDPLAQKEDLDELTSMVREGFELLGAFNWSDYLPWLGYFYDSIRLNQRCSDLVPRIRTLVKKIIDEHRVSNSEKKRDIGDFVDVLLSLDGDEKLQEDDMIAVLWEMIFRGTDTTALLTEWTMAELVLNPNVQTKLRDEILTAVGDGADGDVADADLAKLPYLNAVVKETLRLHPPGPLLSWARLSTSDVQLSNGMVIPKGTTAMVNMWAITHDQTVWSDPLKFDPERFTGNADMDIRGGDLRLAPFGAGRRVCPGKNMGLATVTRWVAELVRRFEWGQDQTEPVDLGEVLKLSCEMEHPLRAVVTEIF

SEQ ID NO: 79458 - protein, 522 aa, Arabidopsis thaliana
  peptide (1)..(522): Ceres Seq. ID no. 12651407
  misc_feature (56)..(514): Pfam Name: Cytochrome P450 Pfam Description: Cytochrome P450
  misc_feature (1)..(522): Homolog of NCBI NO: 15238033 NR Description: cytochrome p450 family; protein id: At5g09970.1 thaliana] >gi|9758975|dbj|BAB09418.1| cytochrome P450 thaliana] >gi|22531126|gb|AAM97067.1| cytochrome P450
  misc_feature (1)..(519): Homolog of NCBI NO: 37534160 NR Description: putative cytochrome 450 [Oryza sativa (japonica group)] >gi|21671915|gb|AAM74277.1| Putative cytochrome 450
  misc_feature (1)..(519): Homolog of NCBI NO: 30962524 NR Description: cytochrome P450 78A11 [Oryza sativa (japonica
  misc_feature (5)..(521): Homolog of NCBI NO: 5921925 NR Description: Cytochrome P450 78A4 >gi|7430620|pir||T08114
  misc_feature (1)..(516): Homolog of NCBI NO: 1352187 NR Description: Cytochrome P450 78A1 (CYPLXXVIII)
  misc_feature (24)..(516): Homolog of NCBI NO: 15228624 NR Description: cytochrome p450 (CYP78A9); protein id: supported by cDNA: 29661., supported by cDNA: gi_17065343, by cDNA: gi_6633988 [Arabidopsis thaliana]
  misc_feature (24)..(516): Homolog of NCBI NO: 21592543 NR Description: cytochrome p450 (CYP78A9) [Arabidopsis thaliana]
  misc_feature (17)..(516): Homolog of NCBI NO: 15226422 NR Description: putative cytochrome P450; protein id: At2g46660.1
  misc_feature (1)..(514): Homolog of NCBI NO: 6715638 NR Description: T25K16.18 [Arabidopsis thaliana]
  misc_feature (1)..(514): Homolog of NCBI NO: 15223341 NR Description: cytochrome P450, putative; protein id:
MIALPAGFGSQNLHDVSTLGYLFLAVVFLSIVTWALAGGGGVAWKNGRNRLGRVAIPGPRGIPVFGSLFTLSRGLAHRTLAAMAWSRANTEIMAFSLGSTPVIVASEPNIAREILMSPHFADRPVKQSAKSLMFSRAIGFAPNGTYWRMLRRIASTHLFAPRRILAHEAGRQLDCAEMVKAVSVEQNGAGSVVLRKHLQLAALNNIMGSVFGRRYDPLAQKEDLDELTSMVREGFELLGAFNWSDYLPWLGYFYDSIRLNQRCSDLVPRIRTLVKKIIDEHRVSNSEKKRDIGDFVDVLLSLDGDEKLQEDDMIAVLWEMIFRGTDTTALLTEWTMAELVLNPNVQTKLRDEILTAVGDGADGDVADADLAKLPYLNAVVKETLRLHPPGPLLSWARLSTSDVQLSNGMVIPKGTTAMVNMWAITHDQTVWSDPLKFDPERFTGNADMDIRGGDLRLAPFGAGRRVCPGKNMGLATVTRWVAELVRRFEWGQDQTEPVDLGEVLKLSCEMEHPLRAVVTEIF

SEQ ID NO: 79459 - DNA, 1845 bp, Arabidopsis thaliana
  misc_feature (1)..(1845): Ceres Seq. ID no. 12651429
  misc_feature: MA Experiment ID: 20000169 Result: Down-regulated in Transcription
  misc_feature: MA Experiment 20000169 PARAMETER Experiment Name: At_100uM_ABA_P Parameter: Age (day) Value: 14
  misc_feature: MA Experiment 20000169 PARAMETER Experiment Name: At_100uM_ABA_P Parameter: Organism Value: A. thaliana
  misc_feature: MA Experiment 20000169 PARAMETER Experiment Name: At_100uM_ABA_P Parameter: Plant Line Value: WS
  misc_feature: MA Experiment 20000169 PARAMETER Experiment Name: At_100uM_ABA_P Parameter: Timepoint (hr) Value: 6
  misc_feature: MA Experiment 20000169 PARAMETER Experiment Name: At_100uM_ABA_P Parameter: Tissue Value: Aerial
  misc_feature: MA Experiment 20000169 PARAMETER Experiment Name: At_100uM_ABA_P Parameter: Treatment Value: 100uM ABA vs. No Treatment
  misc_feature: MA Experiment ID: 20000171 Result: Up-regulated in Transcription
  misc_feature: MA Experiment 20000171 PARAMETER Experiment Name: At_42deg_Heat_P Parameter: Age (day) Value: 14
  misc_feature: MA Experiment 20000171 PARAMETER Experiment Name: At_42deg_Heat_P Parameter: Organism Value: A. thaliana
  misc_feature: MA Experiment 20000171 PARAMETER Experiment Name: At_42deg_Heat_P Parameter: Plant Line Value: WS
  misc_feature: MA Experiment 20000171 PARAMETER Experiment Name: At_42deg_Heat_P Parameter: Temperature (deg C) Value: 42 vs. 22
  misc_feature: MA Experiment 20000171 PARAMETER Experiment Name: At_42deg_Heat_P Parameter: Timepoint (hr) Value: 1
  misc_feature: MA Experiment 20000171 PARAMETER Experiment Name: At_42deg_Heat_P Parameter: Tissue Value: Aerial
  misc_feature: MA Experiment ID: 20000173 Result: Up-regulated in Transcription
  misc_feature: MA Experiment 20000173 PARAMETER Experiment Name: At_42deg_Heat_P Parameter: Age (day) Value: 14
  misc_feature: MA Experiment 20000173 PARAMETER Experiment Name: At_42deg_Heat_P Parameter: Organism Value: A. thaliana
  misc_feature: MA Experiment 20000173 PARAMETER Experiment Name: At_42deg_Heat_P Parameter: Plant Line Value: WS
  misc_feature: MA Experiment 20000173 PARAMETER Experiment Name: At_42deg_Heat_P Parameter: Temperature (deg C) Value: 42 vs. 22
  misc_feature: MA Experiment 20000173 PARAMETER Experiment Name: At_42deg_Heat_P Parameter: Timepoint (hr) Value: 6
  misc_feature: MA Experiment 20000173 PARAMETER Experiment Name: At_42deg_Heat_P Parameter: Tissue Value: Aerial
  misc_feature: MA Experiment ID: 20000180 Result: Up-regulated in Transcription
  misc_feature: MA Experiment 20000180 PARAMETER Experiment Name: At_Germinating_Seeds_P Parameter: Age (hr) Value: 24 vs. 0
  misc_feature: MA Experiment 20000180 PARAMETER Experiment Name: At_Germinating_Seeds_P Parameter: Tissue Value: Germinating Seeds
  misc_feature: MA Experiment ID: 20000184 Result: Up-regulated in Transcription
  misc_feature: MA Experiment 20000184 PARAMETER Experiment Name: At_Shoots__P Parameter: Age (day) Value: 7
  misc_feature: MA Experiment 20000184 PARAMETER Experiment Name: At_Shoots__P Parameter: Tissue Value: Shoots vs. Whole Plant
  misc_feature: MA Experiment ID: 20000453 Result: Down-regulated in Transcription
  misc_feature: MA Experiment 20000453 PARAMETER Experiment Name: At_100uM_ABA_P Parameter: Age (day) Value: 15
  misc_feature: MA Experiment 20000453 PARAMETER Experiment Name: At_100uM_ABA_P Parameter: Organism Value: A. thaliana
  misc_feature: MA Experiment 20000453 PARAMETER Experiment Name: At_100uM_ABA_P Parameter: Plant Line Value: WS
  misc_feature: MA Experiment 20000453 PARAMETER Experiment Name: At_100uM_ABA_P Parameter: Timepoint (hr) Value: 24
  misc_feature: MA Experiment 20000453 PARAMETER Experiment Name: At_100uM_ABA_P Parameter: Tissue Value: Aerial
  misc_feature: MA Experiment 20000453 PARAMETER Experiment Name: At_100uM_ABA_P Parameter: Treatment Value: 100uM ABA vs. No Treatment
  misc_feature: MA Experiment ID: 20000527 Result: Down-regulated in Transcription
  misc_feature: MA Experiment 20000527 PARAMETER Experiment Name: At_10percent_PEG_P Parameter: Age (day) Value: 20
  misc_feature: MA Experiment 20000527 PARAMETER Experiment Name: At_10percent_PEG_P Parameter: Organism Value: A. thaliana
  misc_feature: MA Experiment 20000527 PARAMETER Experiment Name: At_10percent_PEG_P Parameter: Plant Line Value: WS
  misc_feature: MA Experiment 20000527 PARAMETER Experiment Name: At_10percent_PEG_P Parameter: Timepoint (day) Value: 20
  misc_feature: MA Experiment 20000527 PARAMETER Experiment Name: At_10percent_PEG_P Parameter: Tissue Value: Whole Plant
  misc_feature: MA Experiment 20000527 PARAMETER Experiment Name: At_10percent_PEG_P Parameter: Treatment Value: 10percent PEG vs. No Treatment
  misc_feature: MA Experiment ID: 20001450 Result: Down-regulated in Transcription
  misc_feature: MA Experiment 20001450 PARAMETER Experiment Name: At_Far-red-induction_P Parameter: Age (day) Value: 7
  misc_feature: MA Experiment 20001450 PARAMETER Experiment Name: At_Far-red-induction_P Parameter: Light Value: Far-red vs. White
  misc_feature: MA Experiment 20001450 PARAMETER Experiment Name: At_Far-red-induction_P Parameter: Organism Value: A. thaliana
  misc_feature: MA Experiment 20001450 PARAMETER Experiment Name: At_Far-red-induction_P Parameter: Plant Line Value: Columbia
  misc_feature: MA Experiment 20001450 PARAMETER Experiment Name: At_Far-red-induction_P Parameter: Timepoint (hr) Value: 8
  misc_feature: MA Experiment 20001450 PARAMETER Experiment Name: At_Far-red-induction_P Parameter: Tissue Value: Whole Plant
  misc_feature: MA Experiment ID: 20001451 Result: Down-regulated in Transcription
  misc_feature: MA Experiment 20001451 PARAMETER Experiment Name: At_Far-red-induction_P Parameter: Age (day) Value: 7
  misc_feature: MA Experiment 20001451 PARAMETER Experiment Name: At_Far-red-induction_P Parameter: Light Value: Far-red vs. White
  misc_feature: MA Experiment 20001451 PARAMETER Experiment Name: At_Far-red-induction_P Parameter: Organism Value: A. thaliana
  misc_feature: MA Experiment 20001451 PARAMETER Experiment Name: At_Far-red-induction_P Parameter: Plant Line Value: Columbia
  misc_feature: MA Experiment 20001451 PARAMETER Experiment Name: At_Far-red-induction_P Parameter: Timepoint (hr) Value: 24
  misc_feature: MA Experiment 20001451 PARAMETER Experiment Name: At_Far-red-induction_P Parameter: Tissue Value: Whole Plant
  misc_feature: MA Experiment ID: 20001904 Result: Down-regulated in Transcription
  misc_feature: MA Experiment 20001904 PARAMETER Experiment Name: At_Drought_Reproduction_P Parameter: Age (day) Value: 37
  misc_feature: MA Experiment 20001904 PARAMETER Experiment Name: At_Drought_Reproduction_P Parameter: Organism Value: A. thaliana
  misc_feature: MA Experiment 20001904 PARAMETER Experiment Name: At_Drought_Reproduction_P Parameter: Plant Line Value: WS
  misc_feature: MA Experiment 20001904 PARAMETER Experiment Name: At_Drought_Reproduction_P Parameter: Timepoint (day) Value: 7
  misc_feature: MA Experiment 20001904 PARAMETER Experiment Name: At_Drought_Reproduction_P Parameter: Tissue Value: Rosettes
  misc_feature: MA Experiment 20001904 PARAMETER Experiment Name: At_Drought_Reproduction_P Parameter: Treatment Value: Drought vs. No Drought
attcagaagcactcgagcaaacataatatatctctctcttcctctctctctcaagcatcaattaattctcaaagtcttccttaggcaaaaatgttcatcgaaagcttcaaggttgaatctccgaacgtgaagtacaccgagaatgagatccactcagtgtacgactaccaaaccactgagcttgttcatgagaacaaaaacggtgcttttcaatggactgtgaagccaaagactgtgaagtatgagtttaagaccgacactcatgttcccaaacttggagtaatgctcgttggttggggaggcaacaatggttctacacttaccgctggtgttatcgccaatcgtgagggaatatcttgggctacaaaggagaaagtgcaacaagctaattatttcgggtcattaacccaagcatcttctattcgggtcgggtcatttaatggtgaagaaatctatgctcctttcaaaagtcttctccccatggtgaatccggaagaaattgtgtttggaggatgggacataagtgacatgaacttagcagacgcaatggcacgagccaaggtcctagacatcgaccttcaaaagcagatgcgtccgttcatggaacacatggttccactccccggaatcttcgacccagatttcatcgcagctaaccaagggtcacgtgctaaccacgtgatcaaaggcaccaagaaacaacaactcgaacaagtcatcaaggacatcagggagttcaaagagaaaaacaaagtggataaagtggtggtactgtggacggcaaacacagaaagatacagcaatgtggtggttggtcttaacgacacgacggagaatctcatgtcatctttggacaaggatgaggctgagatttctccttctacactttacgccattgcttgtgttcttgagaacgttccttttatcaatggaagtccacaaaacacttttgtccctgggcttattgaattagccataaagagaaactgcttgatcggtggtgatgacttcaagagtggtcagaccaagatgaagtctgtcctcgtcgatttccttgttggcgccggaatcaaaccgacgtcgattgtcagttacaaccatcttgggaacaacgacggcatgaacttgtcagcacctcaaacattccggtcaaaggagatatcgaagagcaatgtcgtggacgatatggttggtagcaacggaattttgtacgagcctggtgaacaccctgaccacgttgtggtcattaagtatgtgccatgtgtaggagacagcaagagagcaatggatgaatacacatcagagatattcatgggagggaagaacacgattgtgatgcacaacacttgtgaagactctctcttggctgctccaattattttggaccttgttcttcttgctgagctcactactcggatccagttcatgagtgaaaacgagggaaagtttcattctttccatccggtggctactctcctaagttacctctcaaaggcaccactggttcctcctggcacgccagttgttaatgctttgtcgaaacagcgtgcaatgcttgagaacgtactcagagcttgtgttggacttgctcctgagaacaacatgattctcgagtacaagtgatcaaagagaccaattcaagaccccctttcttagctatgttgctttctatgtttaataaataattacatttctaaaatgtaagtgttcttttctttgtctttctctcatttacaaatgtcatctatgtggtttcgttatcttccccagccaaatatgtaatggtatctcgcgctgaattgggattgtctttcatctcatttcaaactataatatatatttggg

SEQ ID NO: 79460 - protein, 510 aa, Arabidopsis thaliana
  peptide (1)..(510): Ceres Seq. ID no. 12651430
  misc_feature (61)..(495): Pfam Name: Myo-inositol-1-phosphate synthase Pfam Description: Myo-inositol-1-phosphate synthase
  misc_feature (1)..(510): Homolog of NCBI NO: 15238080 NR Description: myo-inositol-1-phosphate synthase -like protein; id: At5g10170.1, supported by cDNA: gi_17529257, supported by
  misc_feature (1)..(510): Homolog of NCBI NO: 14548099 NR Description: Inositol-3-phosphate synthase
  misc_feature (1)..(510): Homolog of NCBI NO: 14548096 NR Description: Inositol-3-phosphate synthase
  misc_feature (1)..(510): Homolog of NCBI NO: 14548098 NR Description: Inositol-3-phosphate synthase
  misc_feature (1)..(510): Homolog of NCBI NO: 15227169 NR Description: putative myo-inositol 1-phosphate synthase; id: At2g22240.1, supported by cDNA: gi_15450746, supported by
  misc_feature (1)..(510): Homolog of NCBI NO: 14548093 NR Description: Inositol-3-phosphate synthase
  misc_feature (1)..(510): Homolog of NCBI NO: 14548095 NR Description: Inositol-3-phosphate synthase
  misc_feature (2)..(510): Homolog of NCBI NO: 7488491 NR Description: inositol-3-phosphate synthase (EC 5.5.1.4)
  misc_feature (1)..(510): Homolog of NCBI NO: 973313 NR Description: myo-inositol 1-phosphate synthase isozyme-2
  misc_feature (1)..(510): Homolog of NCBI NO: 15236025 NR Description: myo-inositol-1-phosphate synthase; protein id: supported by cDNA: 1978., supported by cDNA: gi_1161311, by cDNA: gi_13937199, supported by cDNA: gi_14334743 [Arabidopsis
MFIESFKVESPNVKYTENEIHSVYDYQTTELVHENKNGAFQWTVKPKTVKYEFKTDTHVPKLGVMLVGWGGNNGSTLTAGVIANREGISWATKEKVQQANYFGSLTQASSIRVGSFNGEEIYAPFKSLLPMVNPEEIVFGGWDISDMNLADAMARAKVLDIDLQKQMRPFMEHMVPLPGIFDPDFIAANQGSRANHVIKGTKKQQLEQVIKDIREFKEKNKVDKVVVLWTANTERYSNVVVGLNDTTENLMSSLDKDEAEISPSTLYAIACVLENVPFINGSPQNTFVPGLIELAIKRNCLIGGDDFKSGQTKMKSVLVDFLVGAGIKPTSIVSYNHLGNNDGMNLSAPQTFRSKEISKSNVVDDMVGSNGILYEPGEHPDHVVVIKYVPCVGDSKRAMDEYTSEIFMGGKNTIVMHNTCEDSLLAAPIILDLVLLAELTTRIQFMSENEGKFHSFHPVATLLSYLSKAPLVPPGTPVVNALSKQRAMLENVLRACVGLAPENNMILEYK

SEQ ID NO: 79461 - protein, 446 aa, Arabidopsis thaliana
  peptide (1)..(446): Ceres Seq. ID no. 12651431
  misc_feature (1)..(431): Pfam Name: Myo-inositol-1-phosphate synthase Pfam Description: Myo-inositol-1-phosphate synthase
  misc_feature (1)..(446): Homolog of NCBI NO: 15238080 NR Description: myo-inositol-1-phosphate synthase -like protein; id: At5g10170.1, supported by cDNA: gi_17529257, supported by
  misc_feature (1)..(446): Homolog of NCBI NO: 14548099 NR Description: Inositol-3-phosphate synthase
  misc_feature (1)..(446): Homolog of NCBI NO: 14548096 NR Description: Inositol-3-phosphate synthase
  misc_feature (1)..(446): Homolog of NCBI NO: 14548098 NR Description: Inositol-3-phosphate synthase
  misc_feature (1)..(446): Homolog of NCBI NO: 15227169 NR Description: putative myo-inositol 1-phosphate synthase; id: At2g22240.1, supported by cDNA: gi_15450746, supported by
  misc_feature (1)..(446): Homolog of NCBI NO: 14548093 NR Description: Inositol-3-phosphate synthase
  misc_feature (1)..(446): Homolog of NCBI NO: 14548095 NR Description: Inositol-3-phosphate synthase
  misc_feature (1)..(446): Homolog of NCBI NO: 7488491 NR Description: inositol-3-phosphate synthase (EC 5.5.1.4)
  misc_feature (1)..(446): Homolog of NCBI NO: 973313 NR Description: myo-inositol 1-phosphate synthase isozyme-2
  misc_feature (1)..(446): Homolog of NCBI NO: 15236025 NR Description: myo-inositol-1-phosphate synthase; protein id: supported by cDNA: 1978., supported by cDNA: gi_1161311, by cDNA: gi_13937199, supported by cDNA: gi_14334743 [Arabidopsis
MLVGWGGNNGSTLTAGVIANREGISWATKEKVQQANYFGSLTQASSIRVGSFNGEEIYAPFKSLLPMVNPEEIVFGGWDISDMNLADAMARAKVLDIDLQKQMRPFMEHMVPLPGIFDPDFIAANQGSRANHVIKGTKKQQLEQVIKDIREFKEKNKVDKVVVLWTANTERYSNVVVGLNDTTENLMSSLDKDEAEISPSTLYAIACVLENVPFINGSPQNTFVPGLIELAIKRNCLIGGDDFKSGQTKMKSVLVDFLVGAGIKPTSIVSYNHLGNNDGMNLSAPQTFRSKEISKSNVVDDMVGSNGILYEPGEHPDHVVVIKYVPCVGDSKRAMDEYTSEIFMGGKNTIVMHNTCEDSLLAAPIILDLVLLAELTTRIQFMSENEGKFHSFHPVATLLSYLSKAPLVPPGTPVVNALSKQRAMLENVLRACVGLAPENNMILEYK

SEQ ID NO: 79462 - protein, 380 aa, Arabidopsis thaliana
  peptide (1)..(380): Ceres Seq. ID no. 12651432
  misc_feature (1)..(365): Pfam Name: Myo-inositol-1-phosphate synthase Pfam Description: Myo-inositol-1-phosphate synthase
  misc_feature (1)..(380): Homolog of NCBI NO: 15238080 NR Description: myo-inositol-1-phosphate synthase -like protein; id: At5g10170.1, supported by cDNA: gi_17529257, supported by
  misc_feature (1)..(380): Homolog of NCBI NO: 14548099 NR Description: Inositol-3-phosphate synthase
  misc_feature (1)..(380): Homolog of NCBI NO: 14548096 NR Description: Inositol-3-phosphate synthase
  misc_feature (1)..(380): Homolog of NCBI NO: 14548098 NR Description: Inositol-3-phosphate synthase
  misc_feature (1)..(380): Homolog of NCBI NO: 15227169 NR Description: putative myo-inositol 1-phosphate synthase; id: At2g22240.1, supported by cDNA: gi_15450746, supported by
  misc_feature (1)..(380): Homolog of NCBI NO: 14548093 NR Description: Inositol-3-phosphate synthase
  misc_feature (1)..(380): Homolog of NCBI NO: 14548095 NR Description: Inositol-3-phosphate synthase
  misc_feature (1)..(380): Homolog of NCBI NO: 7488491 NR Description: inositol-3-phosphate synthase (EC 5.5.1.4)
  misc_feature (1)..(380): Homolog of NCBI NO: 973313 NR Description: myo-inositol 1-phosphate synthase isozyme-2
  misc_feature (1)..(380): Homolog of NCBI NO: 15236025 NR Description: myo-inositol-1-phosphate synthase; protein id: supported by cDNA: 1978., supported by cDNA: gi_1161311, by cDNA: gi_13937199, supported by cDNA: gi_14334743 [Arabidopsis
MVNPEEIVFGGWDISDMNLADAMARAKVLDIDLQKQMRPFMEHMVPLPGIFDPDFIAANQGSRANHVIKGTKKQQLEQVIKDIREFKEKNKVDKVVVLWTANTERYSNVVVGLNDTTENLMSSLDKDEAEISPSTLYAIACVLENVPFINGSPQNTFVPGLIELAIKRNCLIGGDDFKSGQTKMKSVLVDFLVGAGIKPTSIVSYNHLGNNDGMNLSAPQTFRSKEISKSNVVDDMVGSNGILYEPGEHPDHVVVIKYVPCVGDSKRAMDEYTSEIFMGGKNTIVMHNTCEDSLLAAPIILDLVLLAELTTRIQFMSENEGKFHSFHPVATLLSYLSKAPLVPPGTPVVNALSKQRAMLENVLRACVGLAPENNMILEYK

SEQ ID NO: 79463 - DNA, 1004 bp, Arabidopsis thaliana
  misc_feature (1)..(1004): Ceres Seq. ID no. 12651433
  misc_feature: MA Experiment ID: 20000307 Result: Up-regulated in Transcription
  misc_feature: MA Experiment 20000307 PARAMETER Experiment Name: At_Germinating_Seeds_Sub_P Parameter: Age (hr) Value: 24 vs. 0
  misc_feature: MA Experiment 20000307 PARAMETER Experiment Name: At_Germinating_Seeds_Sub_P Parameter: Organism Value: A. thaliana
  misc_feature: MA Experiment 20000307 PARAMETER Experiment Name: At_Germinating_Seeds_Sub_P Parameter: Plant Line Value: WS
  misc_feature: MA Experiment 20000307 PARAMETER Experiment Name: At_Germinating_Seeds_Sub_P Parameter: Tissue Value: Germinating Seeds
  misc_feature: MA Experiment ID: 20000314 Result: Up-regulated in Transcription
  misc_feature: MA Experiment 20000314 PARAMETER Experiment Name: At_14day_Shoots-Roots_Sub_P Parameter: Age (day) Value: 14
  misc_feature: MA Experiment 20000314 PARAMETER Experiment Name: At_14day_Shoots-Roots_Sub_P Parameter: Organism Value: A. thaliana
  misc_feature: MA Experiment 20000314 PARAMETER Experiment Name: At_14day_Shoots-Roots_Sub_P Parameter: Plant Line Value: WS
  misc_feature: MA Experiment 20000314 PARAMETER Experiment Name: At_14day_Shoots-Roots_Sub_P Parameter: Tissue Value: Roots vs. Whole Plant
  misc_feature: MA Experiment ID: 20000352 Result: Up-regulated in Transcription
  misc_feature: MA Experiment 20000352 PARAMETER Experiment Name: At_Drought_Sub_P Parameter: Age (day) Value: 7
  misc_feature: MA Experiment 20000352 PARAMETER Experiment Name: At_Drought_Sub_P Parameter: Organism Value: A. thaliana
  misc_feature: MA Experiment 20000352 PARAMETER Experiment Name: At_Drought_Sub_P Parameter: Plant Line Value: WS
  misc_feature: MA Experiment 20000352 PARAMETER Experiment Name: At_Drought_Sub_P Parameter: Timepoint (hr) Value: 6
  misc_feature: MA Experiment 20000352 PARAMETER Experiment Name: At_Drought_Sub_P Parameter: Tissue Value: Whole Plant
  misc_feature: MA Experiment 20000352 PARAMETER Experiment Name: At_Drought_Sub_P Parameter: Treatment Value: Drought vs. No Drought
  misc_feature: MA Experiment ID: 20000355 Result: Up-regulated in Transcription
  misc_feature: MA Experiment 20000355 PARAMETER Experiment Name: At_Siliques_Sub_P Parameter: Age (day) Value: 21
  misc_feature: MA Experiment 20000355 PARAMETER Experiment Name: At_Siliques_Sub_P Parameter: Organism Value: A. thaliana
  misc_feature: MA Experiment 20000355 PARAMETER Experiment Name: At_Siliques_Sub_P Parameter: Plant Line Value: WS
  misc_feature: MA Experiment 20000355 PARAMETER Experiment Name: At_Siliques_Sub_P Parameter: Tissue Value: Less Than 5mm Siliques vs. Whole Plant
  misc_feature: MA Experiment ID: 20000440 Result: Down-regulated in Transcription
  misc_feature: MA Experiment 20000440 PARAMETER Experiment Name: At_Closed-Flower__Sub_P Parameter: Tissue Value: Closed Flower vs. Whole Plant
catacagaaatttcacttgttcgaaaaatggcttctctcaaagttcccgccactgttcctcttcccgaagaagacgctgagcaactctacaaagcctttaaaggatggggaaccaatgagaggatgatcatatcaatcttggctcacagaaatgcaacgcaacgtagtttcattcgtgccgtttatgctgctaactacaataaggatcttctcaaggaattagacagagagctttccggtgactttgagcgagctgtgatgttgtggacttttgaaccagcggagagagatgcttatttggcaaaagaatctaccaaaatgttcaccaaaaacaattgggttcttgtcgaaatcgcttgtactagatctgctcttgaactctttaatgccaagcaagcataccaagcccgctacaagacctccctcgaggaagacgtcgcataccacacatctggagacattcgaaagctcttggtacctcttgtgagcacttttaggtacgatggagatgaagtgaacatgacgttagctaggtccgaggctaagatacttcacgagaagatcaaggaaaaggcttatgctgatgatgatctcataagaatcttgacaaccaggagcaaagcacaaatcagcgcaactctcaatcactacaaaaacaatttcggaacttccatgagcaaatacctaaaggaggattcggaaaacgaatacattcaattgctcaaagccgtgatcaaatgcttgacatatccagagaagtattttgagaaagttctacgtcaagccatcaacaaattgggaacagatgagtggggactaacgagagtggtcactacacgagcagagtttgacatggaacggatcaaagaggaatatatacgtagaaacagtgttcctcttgatcgagccattgctaaagacactcatggtgactatgaggatatacttctcgctcttctcggacatgaccatgcttgaaataacatttgcaagttttgtttaag

SEQ ID NO: 79464 - protein, 325 aa, Arabidopsis thaliana
  peptide (1)..(325): Ceres Seq. ID no. 12651434
  misc_feature (22)..(89): Pfam Name: Annexin Pfam Description: Annexin
  misc_feature (10)..(325): Homolog of NCBI NO: 15238105 NR Description: annexin -like protein; protein id: At5g10230.1,
  misc_feature (10)..(325): Homolog of NCBI NO: 12667522 NR Description: calcium-binding protein annexin 7 [Arabidopsis
  misc_feature (10)..(325): Homolog of NCBI NO: 15238094 NR Description: annexin -like protein; protein id: At5g10220.1,
  misc_feature (10)..(325): Homolog of NCBI NO: 12667518 NR Description: calcium-binding protein annexin 6 [Arabidopsis
  misc_feature (10)..(325): Homolog of NCBI NO: 15238320 NR Description: annexin; protein id: At5g65020.1, supported by supported by cDNA: gi_4959107 [Arabidopsis thaliana]
  misc_feature (10)..(325): Homolog of NCBI NO: 4580920 NR Description: vacuole-associated annexin VCaB42 [Nicotiana
  misc_feature (12)..(321): Homolog of NCBI NO: 7441511 NR Description: annexin 2 - upland cotton (fragment)
  misc_feature (19)..(323): Homolog of NCBI NO: 7441509 NR Description: annexin - alfalfa (fragment)
  misc_feature (10)..(325): Homolog of NCBI NO: 3928134 NR Description: annexin P38 [Capsicum annuum]
  misc_feature (10)..(325): Homolog of NCBI NO: 7441508 NR Description: annexin, isoform P35 - tomato
HTEISLVRKMASLKVPATVPLPEEDAEQLYKAFKGWGTNERMIISILAHRNATQRSFIRAVYAANYNKDLLKELDRELSGDFERAVMLWTFEPAERDAYLAKESTKMFTKNNWVLVEIACTRSALELFNAKQAYQARYKTSLEEDVAYHTSGDIRKLLVPLVSTFRYDGDEVNMTLARSEAKILHEKIKEKAYADDDLIRILTTRSKAQISATLNHYKNNFGTSMSKYLKEDSENEYIQLLKAVIKCLTYPEKYFEKVLRQAINKLGTDEWGLTRVVTTRAEFDMERIKEEYIRRNSVPLDRAIAKDTHGDYEDILLALLGHDHA

SEQ ID NO: 79465 - protein, 316 aa, Arabidopsis thaliana
  peptide (1)..(316): Ceres Seq. ID no. 12651435
  misc_feature (13)..(80): Pfam Name: Annexin Pfam Description: Annexin
  misc_feature (1)..(316): Homolog of NCBI NO: 15238105 NR Description: annexin -like protein; protein id: At5g10230.1,
  misc_feature (1)..(316): Homolog of NCBI NO: 12667522 NR Description: calcium-binding protein annexin 7 [Arabidopsis
  misc_feature (1)..(316): Homolog of NCBI NO: 15238094 NR Description: annexin -like protein; protein id: At5g10220.1,
  misc_feature (1)..(316): Homolog of NCBI NO: 12667518 NR Description: calcium-binding protein annexin 6 [Arabidopsis
  misc_feature (1)..(316): Homolog of NCBI NO: 15238320 NR Description: annexin; protein id: At5g65020.1, supported by supported by cDNA: gi_4959107 [Arabidopsis thaliana]
  misc_feature (1)..(316): Homolog of NCBI NO: 4580920 NR Description: vacuole-associated annexin VCaB42 [Nicotiana
  misc_feature (3)..(312): Homolog of NCBI NO: 7441511 NR Description: annexin 2 - upland cotton (fragment)
  misc_feature (10)..(314): Homolog of NCBI NO: 7441509 NR Description: annexin - alfalfa (fragment)
  misc_feature (1)..(316): Homolog of NCBI NO: 3928134 NR Description: annexin P38 [Capsicum annuum]
  misc_feature (1)..(316): Homolog of NCBI NO: 7441508 NR Description: annexin, isoform P35 - tomato
MASLKVPATVPLPEEDAEQLYKAFKGWGTNERMIISILAHRNATQRSFIRAVYAANYNKDLLKELDRELSGDFERAVMLWTFEPAERDAYLAKESTKMFTKNNWVLVEIACTRSALELFNAKQAYQARYKTSLEEDVAYHTSGDIRKLLVPLVSTFRYDGDEVNMTLARSEAKILHEKIKEKAYADDDLIRILTTRSKAQISATLNHYKNNFGTSMSKYLKEDSENEYIQLLKAVIKCLTYPEKYFEKVLRQAINKLGTDEWGLTRVVTTRAEFDMERIKEEYIRRNSVPLDRAIAKDTHGDYEDILLALLGHDHA

SEQ ID NO: 79466 - protein, 284 aa, Arabidopsis thaliana
  peptide (1)..(284): Ceres Seq. ID no. 12651436
  misc_feature (1)..(48): Pfam Name: Annexin Pfam Description: Annexin
  misc_feature (1)..(284): Homolog of NCBI NO: 15238105 NR Description: annexin -like protein; protein id: At5g10230.1,
  misc_feature (1)..(284): Homolog of NCBI NO: 12667522 NR Description: calcium-binding protein annexin 7 [Arabidopsis
  misc_feature (1)..(284): Homolog of NCBI NO: 15238094 NR Description: annexin -like protein; protein id: At5g10220.1,
  misc_feature (1)..(284): Homolog of NCBI NO: 12667518 NR Description: calcium-binding protein annexin 6 [Arabidopsis
  misc_feature (1)..(284): Homolog of NCBI NO: 15238320 NR Description: annexin; protein id: At5g65020.1, supported by supported by cDNA: gi_4959107 [Arabidopsis thaliana]
  misc_feature (1)..(284): Homolog of NCBI NO: 4580920 NR Description: vacuole-associated annexin VCaB42 [Nicotiana
  misc_feature (1)..(280): Homolog of NCBI NO: 7441511 NR Description: annexin 2 - upland cotton (fragment)
  misc_feature (1)..(282): Homolog of NCBI NO: 7441509 NR Description: annexin - alfalfa (fragment)
  misc_feature (1)..(284): Homolog of NCBI NO: 3928134 NR Description: annexin P38 [Capsicum annuum]
  misc_feature (1)..(284): Homolog of NCBI NO: 7441508 NR Description: annexin, isoform P35 - tomato
MIISILAHRNATQRSFIRAVYAANYNKDLLKELDRELSGDFERAVMLWTFEPAERDAYLAKESTKMFTKNNWVLVEIACTRSALELFNAKQAYQARYKTSLEEDVAYHTSGDIRKLLVPLVSTFRYDGDEVNMTLARSEAKILHEKIKEKAYADDDLIRILTTRSKAQISATLNHYKNNFGTSMSKYLKEDSENEYIQLLKAVIKCLTYPEKYFEKVLRQAINKLGTDEWGLTRVVTTRAEFDMERIKEEYIRRNSVPLDRAIAKDTHGDYEDILLALLGHDHA

SEQ ID NO: 79467 - DNA, 624 bp, Arabidopsis thaliana
  misc_feature (1)..(624): Ceres Seq. ID no. 12651437
  misc_feature: MA Experiment ID: 20000307 Result: Up-regulated in Transcription
  misc_feature: MA Experiment 20000307 PARAMETER Experiment Name: At_Germinating_Seeds_Sub_P Parameter: Age (hr) Value: 24 vs. 0
  misc_feature: MA Experiment 20000307 PARAMETER Experiment Name: At_Germinating_Seeds_Sub_P Parameter: Organism Value: A. thaliana
  misc_feature: MA Experiment 20000307 PARAMETER Experiment Name: At_Germinating_Seeds_Sub_P Parameter: Plant Line Value: WS
  misc_feature: MA Experiment 20000307 PARAMETER Experiment Name: At_Germinating_Seeds_Sub_P Parameter: Tissue Value: Germinating Seeds
  misc_feature: MA Experiment ID: 20000315 Result: Down-regulated in Transcription
  misc_feature: MA Experiment 20000315 PARAMETER Experiment Name: At_14day_Shoots-Roots_Sub_P Parameter: Age (day) Value: 14
  misc_feature: MA Experiment 20000315 PARAMETER Experiment Name: At_14day_Shoots-Roots_Sub_P Parameter: Organism Value: A. thaliana
  misc_feature: MA Experiment 20000315 PARAMETER Experiment Name: At_14day_Shoots-Roots_Sub_P Parameter: Plant Line Value: WS
  misc_feature: MA Experiment 20000315 PARAMETER Experiment Name: At_14day_Shoots-Roots_Sub_P Parameter: Tissue Value: Shoots vs. Whole Plant
  misc_feature: MA Experiment ID: 20000355 Result: Up-regulated in Transcription
  misc_feature: MA Experiment 20000355 PARAMETER Experiment Name: At_Siliques_Sub_P Parameter: Age (day) Value: 21
  misc_feature: MA Experiment 20000355 PARAMETER Experiment Name: At_Siliques_Sub_P Parameter: Organism Value: A. thaliana
  misc_feature: MA Experiment 20000355 PARAMETER Experiment Name: At_Siliques_Sub_P Parameter: Plant Line Value: WS
  misc_feature: MA Experiment 20000355 PARAMETER Experiment Name: At_Siliques_Sub_P Parameter: Tissue Value: Less Than 5mm Siliques vs. Whole Plant
  misc_feature: MA Experiment ID: 20000440 Result: Up-regulated in Transcription
  misc_feature: MA Experiment 20000440 PARAMETER Experiment Name: At_Closed-Flower__Sub_P Parameter: Tissue Value: Closed Flower vs. Whole Plant
atggcgagtgtgtcaccattagcaaagtacaagctcgtgttccttggagatcaatccgttggcaagaccagcatcatcactcgtttcatgtacgacaaattcgataccacttatcaggcaaccattggaattgattttttgtcaaaaacaatgtaccttgaggataggactgttcgtctccaactatgggatactgcaggacaggagagatttcgaagtctaataccaagttatatcagagattcttctgttgctgtaattgtctatgatgttgcaaataggcagtcattcttgaacacatccaagtggattgaggatgttcgtacagagagaggtagcgatgtcatcattgttctggttggtaacaaaacagatctcgtcgacaaaaggcaagtgtcgattgaggaaggtgataacaaagctcgtgattatggagtaatattcattgagaccagtgcaaaagcaggatttaacatcaagccactttttcgcaagattgcagcagcgttaccaggaatggaaacactttcttcaacgaaacaagaggatatggttgatgtgaatctaaagacttcgagcaattcggctcaaggggagcaacaacgaggtggttgtgcttgttaa

SEQ ID NO: 79468 - protein, 207 aa, Arabidopsis thaliana
  peptide (1)..(207): Ceres Seq. ID no. 12651438
  misc_feature (11)..(172): Pfam Name: Ras family Pfam Description: Ras family
  misc_feature (1)..(207): Homolog of NCBI NO: 15238112 NR Description: Ras family GTP-binding protein, putative; protein
  misc_feature (1)..(207): Homolog of NCBI NO: 15227173 NR Description: GTP-binding protein, putative; protein id:
  misc_feature (1)..(207): Homolog of NCBI NO: 34901804 NR Description: putative ras-related protein Rab-6A [Oryza sativa
  misc_feature (1)..(207): Homolog of NCBI NO: 7438385 NR Description: GTP-binding protein Rab6 - common tobacco
  misc_feature (1)..(207): Homolog of NCBI NO: 15224916 NR Description: GTP-binding protein, putative; protein id:
  misc_feature (1)..(207): Homolog of NCBI NO: 15236081 NR Description: GTP-binding protein, putative; protein id: supported by cDNA: gi_13272476, supported by cDNA: gi_14423429
  misc_feature (5)..(207): Homolog of NCBI NO: 13195674 NR Description: RAB6, member RAS oncogene family [Mus musculus]
  misc_feature (5)..(207): Homolog of NCBI NO: 17137220 NR Description: Rab-protein 6 CG6601-PA [Drosophila melanogaster]
  misc_feature (5)..(207): Homolog of NCBI NO: 38679888 NR Description: RAB6A, member RAS oncogene family isoform b;
  misc_feature (10)..(207): Homolog of NCBI NO: 15238317 NR Description: GTP-binding protein, putative; protein id:
MASVSPLAKYKLVFLGDQSVGKTSIITRFMYDKFDTTYQATIGIDFLSKTMYLEDRTVRLQLWDTAGQERFRSLIPSYIRDSSVAVIVYDVANRQSFLNTSKWIEDVRTERGSDVIIVLVGNKTDLVDKRQVSIEEGDNKARDYGVIFIETSAKAGFNIKPLFRKIAAALPGMETLSSTKQEDMVDVNLKTSSNSAQGEQQRGGCAC

SEQ ID NO: 79469 - protein, 178 aa, Arabidopsis thaliana
  peptide (1)..(178): Ceres Seq. ID no. 12651439
  misc_feature (1)..(143): Pfam Name: Ras family Pfam Description: Ras family
  misc_feature (1)..(178): Homolog of NCBI NO: 15238112 NR Description: Ras family GTP-binding protein, putative; protein
  misc_feature (1)..(178): Homolog of NCBI NO: 15227173 NR Description: GTP-binding protein, putative; protein id:
  misc_feature (1)..(178): Homolog of NCBI NO: 34901804 NR Description: putative ras-related protein Rab-6A [Oryza sativa
  misc_feature (1)..(178): Homolog of NCBI NO: 7438385 NR Description: GTP-binding protein Rab6 - common tobacco
  misc_feature (1)..(178): Homolog of NCBI NO: 15224916 NR Description: GTP-binding protein, putative; protein id:
  misc_feature (1)..(178): Homolog of NCBI NO: 15236081 NR Description: GTP-binding protein, putative; protein id: supported by cDNA: gi_13272476, supported by cDNA: gi_14423429
  misc_feature (1)..(178): Homolog of NCBI NO: 13195674 NR Description: RAB6, member RAS oncogene family [Mus musculus]
  misc_feature (1)..(178): Homolog of NCBI NO: 17137220 NR Description: Rab-protein 6 CG6601-PA [Drosophila melanogaster]
  misc_feature (1)..(178): Homolog of NCBI NO: 38679888 NR Description: RAB6A, member RAS oncogene family isoform b;
  misc_feature (1)..(178): Homolog of NCBI NO: 15238317 NR Description: GTP-binding protein, putative; protein id:
MYDKFDTTYQATIGIDFLSKTMYLEDRTVRLQLWDTAGQERFRSLIPSYIRDSSVAVIVYDVANRQSFLNTSKWIEDVRTERGSDVIIVLVGNKTDLVDKRQVSIEEGDNKARDYGVIFIETSAKAGFNIKPLFRKIAAALPGMETLSSTKQEDMVDVNLKTSSNSAQGEQQRGGCAC

SEQ ID NO: 79470 - protein, 157 aa, Arabidopsis thaliana
  peptide (1)..(157): Ceres Seq. ID no. 12651440
  misc_feature (1)..(122): Pfam Name: Ras family Pfam Description: Ras family
  misc_feature (1)..(157): Homolog of NCBI NO: 15238112 NR Description: Ras family GTP-binding protein, putative; protein
  misc_feature (1)..(157): Homolog of NCBI NO: 15227173 NR Description: GTP-binding protein, putative; protein id:
  misc_feature (1)..(157): Homolog of NCBI NO: 34901804 NR Description: putative ras-related protein Rab-6A [Oryza sativa
  misc_feature (1)..(157): Homolog of NCBI NO: 7438385 NR Description: GTP-binding protein Rab6 - common tobacco
  misc_feature (1)..(157): Homolog of NCBI NO: 15224916 NR Description: GTP-binding protein, putative; protein id:
  misc_feature (1)..(157): Homolog of NCBI NO: 15236081 NR Description: GTP-binding protein, putative; protein id: supported by cDNA: gi_13272476, supported by cDNA: gi_14423429
  misc_feature (1)..(157): Homolog of NCBI NO: 13195674 NR Description: RAB6, member RAS oncogene family [Mus musculus]
  misc_feature (1)..(157): Homolog of NCBI NO: 17137220 NR Description: Rab-protein 6 CG6601-PA [Drosophila melanogaster]
  misc_feature (1)..(157): Homolog of NCBI NO: 38679888 NR Description: RAB6A, member RAS oncogene family isoform b;
  misc_feature (1)..(157): Homolog of NCBI NO: 15238317 NR Description: GTP-binding protein, putative; protein id:
MYLEDRTVRLQLWDTAGQERFRSLIPSYIRDSSVAVIVYDVANRQSFLNTSKWIEDVRTERGSDVIIVLVGNKTDLVDKRQVSIEEGDNKARDYGVIFIETSAKAGFNIKPLFRKIAAALPGMETLSSTKQEDMVDVNLKTSSNSAQGEQQRGGCAC

SEQ ID NO: 79471 - DNA, 2205 bp, Arabidopsis thaliana
  misc_feature (1)..(2205): Ceres Seq. ID no. 12651445
  misc_feature: MA Experiment ID: 20000315 Result: Down-regulated in Transcription
  misc_feature: MA Experiment 20000315 PARAMETER Experiment Name: At_14day_Shoots-Roots_Sub_P Parameter: Age (day) Value: 14
  misc_feature: MA Experiment 20000315 PARAMETER Experiment Name: At_14day_Shoots-Roots_Sub_P Parameter: Organism Value: A. thaliana
  misc_feature: MA Experiment 20000315 PARAMETER Experiment Name: At_14day_Shoots-Roots_Sub_P Parameter: Plant Line Value: WS
  misc_feature: MA Experiment 20000315 PARAMETER Experiment Name: At_14day_Shoots-Roots_Sub_P Parameter: Tissue Value: Shoots vs. Whole Plant
  misc_feature: MA Experiment ID: 20000328 Result: Down-regulated in Transcription
  misc_feature: MA Experiment 20000328 PARAMETER Experiment Name: At_42deg_Heat_Sub_P Parameter: Age (day) Value: 14
  misc_feature: MA Experiment 20000328 PARAMETER Experiment Name: At_42deg_Heat_Sub_P Parameter: Organism Value: A. thaliana
  misc_feature: MA Experiment 20000328 PARAMETER Experiment Name: At_42deg_Heat_Sub_P Parameter: Plant Line Value: WS
  misc_feature: MA Experiment 20000328 PARAMETER Experiment Name: At_42deg_Heat_Sub_P Parameter: Temperature (deg C) Value: 42 vs. 22
  misc_feature: MA Experiment 20000328 PARAMETER Experiment Name: At_42deg_Heat_Sub_P Parameter: Timepoint (hr) Value: 6
  misc_feature: MA Experiment 20000328 PARAMETER Experiment Name: At_42deg_Heat_Sub_P Parameter: Tissue Value: Aerial
gagagtgataattgcgaaattgccaaaaaacgcaaagtctaccactagacaagaaaatcgaagcttttcactttctcttttttctgttttgttgtctttggttctactctccgcactgaatctttcgatcagcgataattgtttccttcttttgggattttctccttggatggaaccagctcaattaatgagatgagatgagaatgttcagcttgcagaagatggctatggcttttactctcttgttttttgcctgtttatgctcatttgtgtctccagatgctcaaggggatgcactgtttgcgttgaggatctccttacgtgcattaccgaatcagctaagtgactggaatcagaaccaagttaatccttgcacttggtcccaagttatttgtgatgacaaaaactttgtcacttctcttacattgtcagatatgaacttctcgggaaccttgtcttcaagagtaggaatcctagaaaatctcaagactcttactttaaagggaaatggaattacgggtgaaataccagaagactttggaaatctgactagcttgactagtttggatttggaggacaatcagctaactggtcgtataccatccactatcggtaatctcaagaaacttcagttcttgaccttgagtaggaacaaacttaatgggactattccggagtcactcactggtcttccaaacctgttaaacctgctgcttgattccaatagtctcagtggtcagattcctcaaagtctgtttgagatcccaaaatataatttcacgtcaaacaacttgaattgtggcggtcgtcaacctcacccttgtgtatccgcggttgcccattcaggtgattcaagcaagcctaaaactggcattattgctggagttgttgctggagttacagttgttctctttggaatcttgttgtttctgttctgcaaggataggcataaaggatatagacgtgatgtgtttgtggatgttgcaggtgaagtggacaggagaattgcatttggacagttgaaaaggtttgcatggagagagctccagttagcgacagataacttcagcgaaaagaatgtacttggtcaaggaggctttgggaaagtttacaaaggagtgcttccggataacaccaaagttgctgtgaagagattgacggatttcgaaagtcctggtggagatgctgctttccaaagggaagtagagatgataagtgtagctgttcataggaatctactccgtcttatcgggttctgcaccacacaaacagaacgccttttggtttatcccttcatgcagaatctaagtcttgcacatcgtctgagagagatcaaagcaggcgacccggttctagattgggagacgaggaaacggattgccttaggagcagcgcgtggttttgagtatcttcatgaacattgcaatccgaagatcatacatcgtgatgtgaaagcagctaatgtgttactagatgaagattttgaagcagtggttggtgattttggtttagccaagctagtagatgttagaaggactaatgtgactactcaagttcgaggaacaatgggtcacattgcaccagaatatttatcaacagggaaatcatcagagagaaccgatgttttcgggtatggaattatgcttcttgagcttgttacaggacaacgcgcaatagacttttcacgtttggaggaagaagatgatgtcttgttacttgaccacgtgaagaaactggaaagagagaagagattaggagcaatcgtagataagaatttggatggagagtatataaaagaagaagtagagatgatgatacaagtggctttgctttgtacacaaggttcaccagaagaccgaccagtgatgtctgaagttgtgaggatgttagaaggagaagggcttgcggagagatgggaagagtggcaaaacgtggaagtcacgagacgtcatgagtttgaacggttgcagaggagatttgattggggtgaagattctatgcataaccaagatgccattgaattatctggtggaagatgaccaaaaacatcaaaccttgagtttactgtaaagttgccaacttcacttttttgttttgttcttcggtgaagaagtaaaatcagttgtataaatcttgtttttgtttcatgatgtatcttttgactttaataaattctgtgaatgaaaagaactatgatgttttgtt

SEQ ID NO: 79472 - protein, 613 aa, Arabidopsis thaliana
  peptide (1)..(613): Ceres Seq. ID no. 12651446
  misc_feature (11)..(613): Homolog of NCBI NO: 15238386 NR Description: receptor-like protein kinase; protein id:
  misc_feature (1)..(613): Homolog of NCBI NO: 5596996 NR Description: putative protein serine /threonine kinase
  misc_feature (25)..(613): Homolog of NCBI NO: 13897308 NR Description: SERK1 protein [Zea mays]
  misc_feature (25)..(613): Homolog of NCBI NO: 13897310 NR Description: SERK2 protein [Zea mays]
  misc_feature (25)..(613): Homolog of NCBI NO: 13897320 NR Description: somatic embryogenesis receptor-like kinase 2 [Zea
  misc_feature (10)..(613): Homolog of NCBI NO: 24935324 NR Description: somatic embryogenesis receptor kinase 1 [Medicago >gi|24935326|gb|AAN64294.1| somatic embryogenesis receptor kinase
  misc_feature (26)..(613): Homolog of NCBI NO: 15217584 NR Description: protein kinase, putative; protein id:
  misc_feature (7)..(587): Homolog of NCBI NO: 30678986 NR Description: leucine-rich repeat protein kinase family thaliana] >gi|15810409|gb|AAL07092.1| unknown protein
  misc_feature (265)..(587): Homolog of NCBI NO: 25411516 NR Description: probable receptor-like protein kinase [imported] -
  misc_feature (101)..(199): Homolog of NCBI NO: 25411516 NR Description: probable receptor-like protein kinase [imported] -
MRMFSLQKMAMAFTLLFFACLCSFVSPDAQGDALFALRISLRALPNQLSDWNQNQVNPCTWSQVICDDKNFVTSLTLSDMNFSGTLSSRVGILENLKTLTLKGNGITGEIPEDFGNLTSLTSLDLEDNQLTGRIPSTIGNLKKLQFLTLSRNKLNGTIPESLTGLPNLLNLLLDSNSLSGQIPQSLFEIPKYNFTSNNLNCGGRQPHPCVSAVAHSGDSSKPKTGIIAGVVAGVTVVLFGILLFLFCKDRHKGYRRDVFVDVAGEVDRRIAFGQLKRFAWRELQLATDNFSEKNVLGQGGFGKVYKGVLPDNTKVAVKRLTDFESPGGDAAFQREVEMISVAVHRNLLRLIGFCTTQTERLLVYPFMQNLSLAHRLREIKAGDPVLDWETRKRIALGAARGFEYLHEHCNPKIIHRDVKAANVLLDEDFEAVVGDFGLAKLVDVRRTNVTTQVRGTMGHIAPEYLSTGKSSERTDVFGYGIMLLELVTGQRAIDFSRLEEEDDVLLLDHVKKLEREKRLGAIVDKNLDGEYIKEEVEMMIQVALLCTQGSPEDRPVMSEVVRMLEGEGLAERWEEWQNVEVTRRHEFERLQRRFDWGEDSMHNQDAIELSGGR

SEQ ID NO: 79473 - protein, 611 aa, Arabidopsis thaliana
  peptide (1)..(611): Ceres Seq. ID no. 12651447
  misc_feature (9)..(611): Homolog of NCBI NO: 15238386 NR Description: receptor-like protein kinase; protein id:
  misc_feature (1)..(611): Homolog of NCBI NO: 5596996 NR Description: putative protein serine /threonine kinase
  misc_feature (23)..(611): Homolog of NCBI NO: 13897308 NR Description: SERK1 protein [Zea mays]
  misc_feature (23)..(611): Homolog of NCBI NO: 13897310 NR Description: SERK2 protein [Zea mays]
  misc_feature (23)..(611): Homolog of NCBI NO: 13897320 NR Description: somatic embryogenesis receptor-like kinase 2 [Zea
  misc_feature (8)..(611): Homolog of NCBI NO: 24935324 NR Description: somatic embryogenesis receptor kinase 1 [Medicago >gi|24935326|gb|AAN64294.1| somatic embryogenesis receptor kinase
  misc_feature (24)..(611): Homolog of NCBI NO: 15217584 NR Description: protein kinase, putative; protein id:
  misc_feature (5)..(585): Homolog of NCBI NO: 30678986 NR Description: leucine-rich repeat protein kinase family thaliana] >gi|15810409|gb|AAL07092.1| unknown protein
  misc_feature (263)..(585): Homolog of NCBI NO: 25411516 NR Description: probable receptor-like protein kinase [imported] -
  misc_feature (99)..(197): Homolog of NCBI NO: 25411516 NR Description: probable receptor-like protein kinase [imported] -
MFSLQKMAMAFTLLFFACLCSFVSPDAQGDALFALRISLRALPNQLSDWNQNQVNPCTWSQVICDDKNFVTSLTLSDMNFSGTLSSRVGILENLKTLTLKGNGITGEIPEDFGNLTSLTSLDLEDNQLTGRIPSTIGNLKKLQFLTLSRNKLNGTIPESLTGLPNLLNLLLDSNSLSGQIPQSLFEIPKYNFTSNNLNCGGRQPHPCVSAVAHSGDSSKPKTGIIAGVVAGVTVVLFGILLFLFCKDRHKGYRRDVFVDVAGEVDRRIAFGQLKRFAWRELQLATDNFSEKNVLGQGGFGKVYKGVLPDNTKVAVKRLTDFESPGGDAAFQREVEMISVAVHRNLLRLIGFCTTQTERLLVYPFMQNLSLAHRLREIKAGDPVLDWETRKRIALGAARGFEYLHEHCNPKIIHRDVKAANVLLDEDFEAVVGDFGLAKLVDVRRTNVTTQVRGTMGHIAPEYLSTGKSSERTDVFGYGIMLLELVTGQRAIDFSRLEEEDDVLLLDHVKKLEREKRLGAIVDKNLDGEYIKEEVEMMIQVALLCTQGSPEDRPVMSEVVRMLEGEGLAERWEEWQNVEVTRRHEFERLQRRFDWGEDSMHNQDAIELSGGR

SEQ ID NO: 79474 - protein, 605 aa, Arabidopsis thaliana
  peptide (1)..(605): Ceres Seq. ID no. 12651448
  misc_feature (3)..(605): Homolog of NCBI NO: 15238386 NR Description: receptor-like protein kinase; protein id:
  misc_feature (1)..(605): Homolog of NCBI NO: 5596996 NR Description: putative protein serine /threonine kinase
  misc_feature (17)..(605): Homolog of NCBI NO: 13897308 NR Description: SERK1 protein [Zea mays]
  misc_feature (17)..(605): Homolog of NCBI NO: 13897310 NR Description: SERK2 protein [Zea mays]
  misc_feature (17)..(605): Homolog of NCBI NO: 13897320 NR Description: somatic embryogenesis receptor-like kinase 2 [Zea
  misc_feature (2)..(605): Homolog of NCBI NO: 24935324 NR Description: somatic embryogenesis receptor kinase 1 [Medicago >gi|24935326|gb|AAN64294.1| somatic embryogenesis receptor kinase
  misc_feature (18)..(605): Homolog of NCBI NO: 15217584 NR Description: protein kinase, putative; protein id:
  misc_feature (1)..(579): Homolog of NCBI NO: 30678986 NR Description: leucine-rich repeat protein kinase family thaliana] >gi|15810409|gb|AAL07092.1| unknown protein
  misc_feature (257)..(579): Homolog of NCBI NO: 25411516 NR Description: probable receptor-like protein kinase [imported] -
  misc_feature (93)..(191): Homolog of NCBI NO: 25411516 NR Description: probable receptor-like protein kinase [imported] -
MAMAFTLLFFACLCSFVSPDAQGDALFALRISLRALPNQLSDWNQNQVNPCTWSQVICDDKNFVTSLTLSDMNFSGTLSSRVGILENLKTLTLKGNGITGEIPEDFGNLTSLTSLDLEDNQLTGRIPSTIGNLKKLQFLTLSRNKLNGTIPESLTGLPNLLNLLLDSNSLSGQIPQSLFEIPKYNFTSNNLNCGGRQPHPCVSAVAHSGDSSKPKTGIIAGVVAGVTVVLFGILLFLFCKDRHKGYRRDVFVDVAGEVDRRIAFGQLKRFAWRELQLATDNFSEKNVLGQGGFGKVYKGVLPDNTKVAVKRLTDFESPGGDAAFQREVEMISVAVHRNLLRLIGFCTTQTERLLVYPFMQNLSLAHRLREIKAGDPVLDWETRKRIALGAARGFEYLHEHCNPKIIHRDVKAANVLLDEDFEAVVGDFGLAKLVDVRRTNVTTQVRGTMGHIAPEYLSTGKSSERTDVFGYGIMLLELVTGQRAIDFSRLEEEDDVLLLDHVKKLEREKRLGAIVDKNLDGEYIKEEVEMMIQVALLCTQGSPEDRPVMSEVVRMLEGEGLAERWEEWQNVEVTRRHEFERLQRRFDWGEDSMHNQDAIELSGGR

SEQ ID NO: 79475 - DNA, 1804 bp, Arabidopsis thaliana
  misc_feature (1)..(1804): Ceres Seq. ID no. 12651457
  misc_feature: MA Experiment ID: 20000185 Result: Up-regulated in Transcription
  misc_feature: MA Experiment 20000185 PARAMETER Experiment Name: At_Roots__P Parameter: Age (day) Value: 7 vs. 21
  misc_feature: MA Experiment 20000185 PARAMETER Experiment Name: At_Roots__P Parameter: Organism Value: A. thaliana
  misc_feature: MA Experiment 20000185 PARAMETER Experiment Name: At_Roots__P Parameter: Tissue Value: Roots vs. Whole Plant
  misc_feature: MA Experiment ID: 20000439 Result: Up-regulated in Transcription
  misc_feature: MA Experiment 20000439 PARAMETER Experiment Name: At_Roots__P Parameter: Age (day) Value: 14 vs. 21
  misc_feature: MA Experiment 20000439 PARAMETER Experiment Name: At_Roots__P Parameter: Organism Value: A. thaliana
  misc_feature: MA Experiment 20000439 PARAMETER Experiment Name: At_Roots__P Parameter: Tissue Value: Roots vs. Whole Plant
agcaaaagctgactcttcttctaactttctatttcttccaagaataacaaacttttttctcataagaaacaaaacaagaattctacaaaacttctcattaaacctctgttttcttgtttctcttctgctctgtattttcgataattctctctgttttgtatcctttcttattttctgtgaatctgtttttttatggaaatttaattcaaaggcttattagaggaagaaagaaagaaaaagaaaaaaaaacccactggagctatggctgttgaagataacaagaacagtgaaagcaaaaatcatcaagaggtagagcttcataggaacgacttaggcctcgaagattcatcatcgccaagaggtgttctcggaatggtttcagattccgacaacagcagcagtagttgcagctcttgttcctctgatgataaatcatcatcaacatcgtcaccattttcaaatactactaaaaccgtttcgtcttctcaccatggtcttcaatggaacaaaatgattgaatctatcaagaagaagtccatgagacgattctctgtcattcctcttcttgcaagttacgaactcacccgtaaaaacttgcgtcgtaagcaacctaagctaactccctctgagagtgctttcacctgtgaagccttctttatggctaaaccctcttggagaaacttcacttacgaagagctcgctgtagccaccgattatttcaatcctgagaacatgattggtaagggaggacatgcggaggtatacaaaggggttttgattaatggtgagacggtggcgattaagaagctgatgagtcacgccaaggaagaagaagaaagagtgagcgatttcctttcagagctcggtataatcgcacatgtaaaccacccaaacgcagctaggcttcgcggtttcagcagtgatcgcggtttgcattttgttcttgagtacgctccctatggcagcctcgcttctatgctttttggatcagaggaatgtctagagtggaagataaggtataaagtggctctaggtatagctgatggtctgagttatcttcataatgcttgtccaagaaggatcattcaccgtgacatcaaagcttctaacatattgctcaaccacgattacgaagctcagatttcagatttcggacttgcaaaatggctcccagagaactggcctcaccatgttgtattccccattgaaggaacattcggatatctagctccagagtatttcatgcacggcattgttgatgagaagattgatgtgtttgcctttggagtattgcttctagagatcataaccagtcgccgagctgttgatacagcaagcaggcagagcattgttgcatgggcaaaaccttttcttgagaaaaatagcatggaggacattgtggatcctcggctaggaaatatgtttaatccaacagagatgcaacgagtgatgctaacagcttcaatgtgtgtacatcatattgccgcaatgcgacctgacatgactcggttggtgcagctgttacgtggagaagacggaccagctgagctacagcagaaggcaggtgaaagaacaatgagcgtgaacgcttgtgatctacaagatcacacctcttcctcatacctcaacgaactccgccgccataggcaactcttaatggagtgagtagaagcaataacatcaacttaaagaactgtttatcaacctctttctttttagatttttattttcttgacttgagttttgcttgttattctccattggttgcttttttttcttgtccaaccaaactgtgaatatcttc

SEQ ID NO: 79476 - protein, 467 aa, Arabidopsis thaliana
  peptide (1)..(467): Ceres Seq. ID no. 12651458
  misc_feature (1)..(467): Homolog of NCBI NO: 18416299 NR Description: Pto kinase interactor - like protein; protein id: supported by cDNA: gi_15810234 [Arabidopsis thaliana]
  misc_feature (1)..(467): Homolog of NCBI NO: 15810235 NR Description: putative Pto kinase interactor [Arabidopsis
  misc_feature (1)..(467): Homolog of NCBI NO: 11358733 NR Description: Pto kinase interactor-like protein - Arabidopsis
  misc_feature (1)..(467): Homolog of NCBI NO: 30698132 NR Description: protein kinase, putative [Arabidopsis thaliana]
  misc_feature (1)..(467): Homolog of NCBI NO: 26452369 NR Description: unknown protein [Arabidopsis thaliana]
  misc_feature (42)..(466): Homolog of NCBI NO: 30687061 NR Description: protein kinase family [Arabidopsis thaliana] putative protein kinase [Arabidopsis thaliana]
  misc_feature (11)..(466): Homolog of NCBI NO: 22330852 NR Description: putative serine/threonine protein kinase; protein At3g05140.1, supported by cDNA: gi_19698986 [Arabidopsis >gi|19698987|gb|AAL91229.1| putative serine/threonine protein
  misc_feature (66)..(423): Homolog of NCBI NO: 15239245 NR Description: serine/threonine protein kinase-like; protein id: [Arabidopsis thaliana] >gi|9758799|dbj|BAB09252.1|
  misc_feature (16)..(334): Homolog of NCBI NO: 6729024 NR Description: putative serine/threonine protein kinase
  misc_feature (319)..(466): Homolog of NCBI NO: 6729024 NR Description: putative serine/threonine protein kinase
MAVEDNKNSESKNHQEVELHRNDLGLEDSSSPRGVLGMVSDSDNSSSSCSSCSSDDKSSSTSSPFSNTTKTVSSSHHGLQWNKMIESIKKKSMRRFSVIPLLASYELTRKNLRRKQPKLTPSESAFTCEAFFMAKPSWRNFTYEELAVATDYFNPENMIGKGGHAEVYKGVLINGETVAIKKLMSHAKEEEERVSDFLSELGIIAHVNHPNAARLRGFSSDRGLHFVLEYAPYGSLASMLFGSEECLEWKIRYKVALGIADGLSYLHNACPRRIIHRDIKASNILLNHDYEAQISDFGLAKWLPENWPHHVVFPIEGTFGYLAPEYFMHGIVDEKIDVFAFGVLLLEIITSRRAVDTASRQSIVAWAKPFLEKNSMEDIVDPRLGNMFNPTEMQRVMLTASMCVHHIAAMRPDMTRLVQLLRGEDGPAELQQKAGERTMSVNACDLQDHTSSSYLNELRRHRQLLME

SEQ ID NO: 79477 - protein, 430 aa, Arabidopsis thaliana
  peptide (1)..(430): Ceres Seq. ID no. 12651459
  misc_feature (1)..(430): Homolog of NCBI NO: 18416299 NR Description: Pto kinase interactor - like protein; protein id: supported by cDNA: gi_15810234 [Arabidopsis thaliana]
  misc_feature (1)..(430): Homolog of NCBI NO: 15810235 NR Description: putative Pto kinase interactor [Arabidopsis
  misc_feature (1)..(430): Homolog of NCBI NO: 11358733 NR Description: Pto kinase interactor-like protein - Arabidopsis
  misc_feature (1)..(430): Homolog of NCBI NO: 30698132 NR Description: protein kinase, putative [Arabidopsis thaliana]
  misc_feature (1)..(430): Homolog of NCBI NO: 26452369 NR Description: unknown protein [Arabidopsis thaliana]
  misc_feature (5)..(429): Homolog of NCBI NO: 30687061 NR Description: protein kinase family [Arabidopsis thaliana] putative protein kinase [Arabidopsis thaliana]
  misc_feature (1)..(429): Homolog of NCBI NO: 22330852 NR Description: putative serine/threonine protein kinase; protein At3g05140.1, supported by cDNA: gi_19698986 [Arabidopsis >gi|19698987|gb|AAL91229.1| putative serine/threonine protein
  misc_feature (29)..(386): Homolog of NCBI NO: 15239245 NR Description: serine/threonine protein kinase-like; protein id: [Arabidopsis thaliana] >gi|9758799|dbj|BAB09252.1|
  misc_feature (1)..(297): Homolog of NCBI NO: 6729024 NR Description: putative serine/threonine protein kinase
  misc_feature (282)..(429): Homolog of NCBI NO: 6729024 NR Description: putative serine/threonine protein kinase
MVSDSDNSSSSCSSCSSDDKSSSTSSPFSNTTKTVSSSHHGLQWNKMIESIKKKSMRRFSVIPLLASYELTRKNLRRKQPKLTPSESAFTCEAFFMAKPSWRNFTYEELAVATDYFNPENMIGKGGHAEVYKGVLINGETVAIKKLMSHAKEEEERVSDFLSELGIIAHVNHPNAARLRGFSSDRGLHFVLEYAPYGSLASMLFGSEECLEWKIRYKVALGIADGLSYLHNACPRRIIHRDIKASNILLNHDYEAQISDFGLAKWLPENWPHHVVFPIEGTFGYLAPEYFMHGIVDEKIDVFAFGVLLLEIITSRRAVDTASRQSIVAWAKPFLEKNSMEDIVDPRLGNMFNPTEMQRVMLTASMCVHHIAAMRPDMTRLVQLLRGEDGPAELQQKAGERTMSVNACDLQDHTSSSYLNELRRHRQLLME

SEQ ID NO: 79478 - protein, 384 aa, Arabidopsis thaliana
  peptide (1)..(384): Ceres Seq. ID no. 12651460
  misc_feature (1)..(384): Homolog of NCBI NO: 18416299 NR Description: Pto kinase interactor - like protein; protein id: supported by cDNA: gi_15810234 [Arabidopsis thaliana]
  misc_feature (1)..(384): Homolog of NCBI NO: 15810235 NR Description: putative Pto kinase interactor [Arabidopsis
  misc_feature (1)..(384): Homolog of NCBI NO: 11358733 NR Description: Pto kinase interactor-like protein - Arabidopsis
  misc_feature (1)..(384): Homolog of NCBI NO: 30698132 NR Description: protein kinase, putative [Arabidopsis thaliana]
  misc_feature (1)..(384): Homolog of NCBI NO: 26452369 NR Description: unknown protein [Arabidopsis thaliana]
  misc_feature (1)..(383): Homolog of NCBI NO: 30687061 NR Description: protein kinase family [Arabidopsis thaliana] putative protein kinase [Arabidopsis thaliana]
  misc_feature (1)..(383): Homolog of NCBI NO: 22330852 NR Description: putative serine/threonine protein kinase; protein At3g05140.1, supported by cDNA: gi_19698986 [Arabidopsis >gi|19698987|gb|AAL91229.1| putative serine/threonine protein
  misc_feature (1)..(340): Homolog of NCBI NO: 15239245 NR Description: serine/threonine protein kinase-like; protein id: [Arabidopsis thaliana] >gi|9758799|dbj|BAB09252.1|
  misc_feature (1)..(251): Homolog of NCBI NO: 6729024 NR Description: putative serine/threonine protein kinase
  misc_feature (236)..(383): Homolog of NCBI NO: 6729024 NR Description: putative serine/threonine protein kinase
MIESIKKKSMRRFSVIPLLASYELTRKNLRRKQPKLTPSESAFTCEAFFMAKPSWRNFTYEELAVATDYFNPENMIGKGGHAEVYKGVLINGETVAIKKLMSHAKEEEERVSDFLSELGIIAHVNHPNAARLRGFSSDRGLHFVLEYAPYGSLASMLFGSEECLEWKIRYKVALGIADGLSYLHNACPRRIIHRDIKASNILLNHDYEAQISDFGLAKWLPENWPHHVVFPIEGTFGYLAPEYFMHGIVDEKIDVFAFGVLLLEIITSRRAVDTASRQSIVAWAKPFLEKNSMEDIVDPRLGNMFNPTEMQRVMLTASMCVHHIAAMRPDMTRLVQLLRGEDGPAELQQKAGERTMSVNACDLQDHTSSSYLNELRRHRQLLME

SEQ ID NO: 79479 - DNA, 1063 bp, Arabidopsis thaliana
  misc_feature (1)..(1063): Ceres Seq. ID no. 12651465
  misc_feature: MA Experiment ID: 20000265 Result: Down-regulated in Transcription
  misc_feature: MA Experiment 20000265 PARAMETER Experiment Name: At_Open_Flower_P Parameter: Age (day) Value: 21
  misc_feature: MA Experiment 20000265 PARAMETER Experiment Name: At_Open_Flower_P Parameter: Plant Line Value: WS
  misc_feature: MA Experiment 20000265 PARAMETER Experiment Name: At_Open_Flower_P Parameter: Tissue Value: Closed Flower vs. Whole Plant
  misc_feature: MA Experiment ID: 20000286 Result: Down-regulated in Transcription
  misc_feature: MA Experiment 20000286 PARAMETER Experiment Name: At_Open_Flower_P Parameter: Age (day) Value: 21
  misc_feature: MA Experiment 20000286 PARAMETER Experiment Name: At_Open_Flower_P Parameter: Plant Line Value: WS
  misc_feature: MA Experiment 20000286 PARAMETER Experiment Name: At_Open_Flower_P Parameter: Tissue Value: Half Open vs. Whole Plant
  misc_feature: MA Experiment ID: 20000438 Result: Up-regulated in Transcription
  misc_feature: MA Experiment 20000438 PARAMETER Experiment Name: At_Shoots__P Parameter: Age (day) Value: 14
  misc_feature: MA Experiment 20000438 PARAMETER Experiment Name: At_Shoots__P Parameter: Tissue Value: Shoots vs. Whole Plant
  misc_feature: MA Experiment ID: 20000495 Result: Down-regulated in Transcription
  misc_feature: MA Experiment 20000495 PARAMETER Experiment Name: At_Guard_Cells_P Parameter: Harvest Date Value: 8/2/2002
  misc_feature: MA Experiment 20000495 PARAMETER Experiment Name: At_Guard_Cells_P Parameter: Organism Value: A. thaliana
  misc_feature: MA Experiment 20000495 PARAMETER Experiment Name: At_Guard_Cells_P Parameter: Tissue Value: Guard Cells vs. Leaves
  misc_feature: MA Experiment ID: 20001554 Result: Down-regulated in Transcription
  misc_feature: MA Experiment 20001554 PARAMETER Experiment Name: At_Drought_Soil_Dry_P Parameter: Age (day) Value: 21
  misc_feature: MA Experiment 20001554 PARAMETER Experiment Name: At_Drought_Soil_Dry_P Parameter: Organism Value: A. thaliana
  misc_feature: MA Experiment 20001554 PARAMETER Experiment Name: At_Drought_Soil_Dry_P Parameter: Plant Line Value: WS
  misc_feature: MA Experiment 20001554 PARAMETER Experiment Name: At_Drought_Soil_Dry_P Parameter: Post Timepoint (hr) Value: None
  misc_feature: MA Experiment 20001554 PARAMETER Experiment Name: At_Drought_Soil_Dry_P Parameter: Post-Treatment Value: None
  misc_feature: MA Experiment 20001554 PARAMETER Experiment Name: At_Drought_Soil_Dry_P Parameter: Timepoint (day) Value: 7
  misc_feature: MA Experiment 20001554 PARAMETER Experiment Name: At_Drought_Soil_Dry_P Parameter: Treatment Value: Drought vs. No Drought
  misc_feature: MA Experiment ID: 20001555 Result: Down-regulated in Transcription
  misc_feature: MA Experiment 20001555 PARAMETER Experiment Name: At_Drought_Soil_Dry_P Parameter: Age (day) Value: 24
  misc_feature: MA Experiment 20001555 PARAMETER Experiment Name: At_Drought_Soil_Dry_P Parameter: Organism Value: A. thaliana
  misc_feature: MA Experiment 20001555 PARAMETER Experiment Name: At_Drought_Soil_Dry_P Parameter: Plant Line Value: WS
  misc_feature: MA Experiment 20001555 PARAMETER Experiment Name: At_Drought_Soil_Dry_P Parameter: Post Timepoint (hr) Value: None
  misc_feature: MA Experiment 20001555 PARAMETER Experiment Name: At_Drought_Soil_Dry_P Parameter: Post-Treatment Value: None
  misc_feature: MA Experiment 20001555 PARAMETER Experiment Name: At_Drought_Soil_Dry_P Parameter: Timepoint (day) Value: 10
  misc_feature: MA Experiment 20001555 PARAMETER Experiment Name: At_Drought_Soil_Dry_P Parameter: Treatment Value: Drought vs. No Drought
  misc_feature: MA Experiment ID: 20001557 Result: Down-regulated in Transcription
  misc_feature: MA Experiment 20001557 PARAMETER Experiment Name: At_Drought_Soil_Dry_P Parameter: Age (day) Value: 27
  misc_feature: MA Experiment 20001557 PARAMETER Experiment Name: At_Drought_Soil_Dry_P Parameter: Organism Value: A. thaliana
  misc_feature: MA Experiment 20001557 PARAMETER Experiment Name: At_Drought_Soil_Dry_P Parameter: Plant Line Value: WS
  misc_feature: MA Experiment 20001557 PARAMETER Experiment Name: At_Drought_Soil_Dry_P Parameter: Post Timepoint (hr) Value: 3
  misc_feature: MA Experiment 20001557 PARAMETER Experiment Name: At_Drought_Soil_Dry_P Parameter: Post-Treatment Value: Re-Water vs. No Drought
  misc_feature: MA Experiment 20001557 PARAMETER Experiment Name: At_Drought_Soil_Dry_P Parameter: Timepoint (day) Value: 13
  misc_feature: MA Experiment 20001557 PARAMETER Experiment Name: At_Drought_Soil_Dry_P Parameter: Treatment Value: Drought vs. No Drought
  misc_feature: MA Experiment ID: 20001558 Result: Down-regulated in Transcription
  misc_feature: MA Experiment 20001558 PARAMETER Experiment Name: At_Drought_Soil_Dry_P Parameter: Age (day) Value: 27
  misc_feature: MA Experiment 20001558 PARAMETER Experiment Name: At_Drought_Soil_Dry_P Parameter: Organism Value: A. thaliana
  misc_feature: MA Experiment 20001558 PARAMETER Experiment Name: At_Drought_Soil_Dry_P Parameter: Plant Line Value: WS
  misc_feature: MA Experiment 20001558 PARAMETER Experiment Name: At_Drought_Soil_Dry_P Parameter: Post Timepoint (hr) Value: 6
  misc_feature: MA Experiment 20001558 PARAMETER Experiment Name: At_Drought_Soil_Dry_P Parameter: Post-Treatment Value: Re-Water vs. No Drought
  misc_feature: MA Experiment 20001558 PARAMETER Experiment Name: At_Drought_Soil_Dry_P Parameter: Timepoint (day) Value: 13
  misc_feature: MA Experiment 20001558 PARAMETER Experiment Name: At_Drought_Soil_Dry_P Parameter: Treatment Value: Drought vs. No Drought
  misc_feature: MA Experiment ID: 20001904 Result: Down-regulated in Transcription
  misc_feature: MA Experiment 20001904 PARAMETER Experiment Name: At_Drought_Reproduction_P Parameter: Age (day) Value: 37
  misc_feature: MA Experiment 20001904 PARAMETER Experiment Name: At_Drought_Reproduction_P Parameter: Organism Value: A. thaliana
  misc_feature: MA Experiment 20001904 PARAMETER Experiment Name: At_Drought_Reproduction_P Parameter: Plant Line Value: WS
  misc_feature: MA Experiment 20001904 PARAMETER Experiment Name: At_Drought_Reproduction_P Parameter: Timepoint (day) Value: 7
  misc_feature: MA Experiment 20001904 PARAMETER Experiment Name: At_Drought_Reproduction_P Parameter: Tissue Value: Rosettes
  misc_feature: MA Experiment 20001904 PARAMETER Experiment Name: At_Drought_Reproduction_P Parameter: Treatment Value: Drought vs. No Drought
atggaaacggaattgacgcaattgagaaaacaagaaagcaacaatctcaacggcgttaatggaggattcatggcgattgaccaattcgtcccaaatgattggaacttcgattacctctgtttcaacaatcttctccaagaagacgacaacattgatcatccttcttcttcttctttgatgaatctaatttctcagccacctccattgcttcatcaaccaccacaaccgtcgtcacctctttatgattctccgccgctctcctccgctttcgactatccttttctcgaggatatcatacactcctcttattctcctcctccattgatccttccggcttcgcaagagaacaccaacaattactcaccattgatggaggaaagcaagagcttcataagcatcggagagactaacaagaaaaggagtaacaagaagcttgaaggtcagccttcgaagaatcttatggcggagagacggcggaggaaacggttaaatgaccgactctccctgctccgatccattgtccctaaaatcaccaagatggataggacatcgatactaggagatgcaatagattacatgaaggagcttttggacaagattaacaagttgcaagaagacgaacaagaacttggaagcaactctcatctaagcaccctcattacaaacgaatctatggtcagaaactccctaaagtttgaagtagatcaaagggaagttaatacgcatattgatatatgttgtcctacgaaaccgggtttggttgtatcaacggttagtacattggagactctaggattagagattgaacaatgtgtcattagctgcttcagtgacttctcattgcaggcttcttgttttgaggttggtgagcagagatacatggttacttcggaagctactaaacaagcactaatcagaaacgcaggttatggaggaagatgtctgtaggggagcttcaaaattgcaatgttttttaatgatgataatattttccggttcttcttattctcttgtgatgagtatgatatttcataaggagatagataaatgggaaaatcaaagg

SEQ ID NO: 79480 - protein, 315 aa, Arabidopsis thaliana
  peptide (1)..(315): Ceres Seq. ID no. 12651466
  misc_feature (148)..(197): Pfam Name: Helix-loop-helix DNA-binding domain Pfam Description: Helix-loop-helix DNA-binding domain
  misc_feature (1)..(315): Homolog of NCBI NO: 15238199 NR Description: bHLH protein; protein id: At5g10570.1, supported cDNA: gi_20127061 [Arabidopsis thaliana] >gi|11357367|pir||T49982
  misc_feature (1)..(315): Homolog of NCBI NO: 20127062 NR Description: putative bHLH transcription factor [Arabidopsis
  misc_feature (116)..(315): Homolog of NCBI NO: 21537346 NR Description: unknown [Arabidopsis thaliana]
  misc_feature (116)..(315): Homolog of NCBI NO: 18424973 NR Description: bHLH protein; protein id: At5g65640.1, supported
  misc_feature (4)..(219): Homolog of NCBI NO: 18424973 NR Description: bHLH protein; protein id: At5g65640.1, supported
  misc_feature (4)..(219): Homolog of NCBI NO: 21537346 NR Description: unknown [Arabidopsis thaliana]
  misc_feature (144)..(313): Homolog of NCBI NO: 22758263 NR Description: Putative bHLH transcription protein [Oryza sativa
  misc_feature (66)..(214): Homolog of NCBI NO: 34907076 NR Description: OSJNBa0093F16.27 [Oryza sativa (japonica
  misc_feature (233)..(309): Homolog of NCBI NO: 34907076 NR Description: OSJNBa0093F16.27 [Oryza sativa (japonica
  misc_feature (237)..(312): Homolog of NCBI NO: 22331357 NR Description: bHLH protein; protein id: At3g26744.1, supported cDNA: gi_19310474, supported by cDNA: gi_19310474 [Arabidopsis >gi|19310475|gb|AAL84972.1| AT3g26744/MLJ15_15 [Arabidopsis
METELTQLRKQESNNLNGVNGGFMAIDQFVPNDWNFDYLCFNNLLQEDDNIDHPSSSSLMNLISQPPPLLHQPPQPSSPLYDSPPLSSAFDYPFLEDIIHSSYSPPPLILPASQENTNNYSPLMEESKSFISIGETNKKRSNKKLEGQPSKNLMAERRRRKRLNDRLSLLRSIVPKITKMDRTSILGDAIDYMKELLDKINKLQEDEQELGSNSHLSTLITNESMVRNSLKFEVDQREVNTHIDICCPTKPGLVVSTVSTLETLGLEIEQCVISCFSDFSLQASCFEVGEQRYMVTSEATKQALIRNAGYGGRCL

SEQ ID NO: 79481 - protein, 292 aa, Arabidopsis thaliana
  peptide (1)..(292): Ceres Seq. ID no. 12651467
  misc_feature (125)..(174): Pfam Name: Helix-loop-helix DNA-binding domain Pfam Description: Helix-loop-helix DNA-binding domain
  misc_feature (1)..(292): Homolog of NCBI NO: 15238199 NR Description: bHLH protein; protein id: At5g10570.1, supported cDNA: gi_20127061 [Arabidopsis thaliana] >gi|11357367|pir||T49982
  misc_feature (1)..(292): Homolog of NCBI NO: 20127062 NR Description: putative bHLH transcription factor [Arabidopsis
  misc_feature (93)..(292): Homolog of NCBI NO: 21537346 NR Description: unknown [Arabidopsis thaliana]
  misc_feature (93)..(292): Homolog of NCBI NO: 18424973 NR Description: bHLH protein; protein id: At5g65640.1, supported
  misc_feature (1)..(196): Homolog of NCBI NO: 18424973 NR Description: bHLH protein; protein id: At5g65640.1, supported
  misc_feature (1)..(196): Homolog of NCBI NO: 21537346 NR Description: unknown [Arabidopsis thaliana]
  misc_feature (121)..(290): Homolog of NCBI NO: 22758263 NR Description: Putative bHLH transcription protein [Oryza sativa
  misc_feature (43)..(191): Homolog of NCBI NO: 34907076 NR Description: OSJNBa0093F16.27 [Oryza sativa (japonica
  misc_feature (210)..(286): Homolog of NCBI NO: 34907076 NR Description: OSJNBa0093F16.27 [Oryza sativa (japonica
  misc_feature (214)..(289): Homolog of NCBI NO: 22331357 NR Description: bHLH protein; protein id: At3g26744.1, supported cDNA: gi_19310474, supported by cDNA: gi_19310474 [Arabidopsis >gi|19310475|gb|AAL84972.1| AT3g26744/MLJ15_15 [Arabidopsis
MAIDQFVPNDWNFDYLCFNNLLQEDDNIDHPSSSSLMNLISQPPPLLHQPPQPSSPLYDSPPLSSAFDYPFLEDIIHSSYSPPPLILPASQENTNNYSPLMEESKSFISIGETNKKRSNKKLEGQPSKNLMAERRRRKRLNDRLSLLRSIVPKITKMDRTSILGDAIDYMKELLDKINKLQEDEQELGSNSHLSTLITNESMVRNSLKFEVDQREVNTHIDICCPTKPGLVVSTVSTLETLGLEIEQCVISCFSDFSLQASCFEVGEQRYMVTSEATKQALIRNAGYGGRCL

SEQ ID NO: 79482 - protein, 256 aa, Arabidopsis thaliana
  peptide (1)..(256): Ceres Seq. ID no. 12651468
  misc_feature (89)..(138): Pfam Name: Helix-loop-helix DNA-binding domain Pfam Description: Helix-loop-helix DNA-binding domain
  misc_feature (1)..(256): Homolog of NCBI NO: 15238199 NR Description: bHLH protein; protein id: At5g10570.1, supported cDNA: gi_20127061 [Arabidopsis thaliana] >gi|11357367|pir||T49982
  misc_feature (1)..(256): Homolog of NCBI NO: 20127062 NR Description: putative bHLH transcription factor [Arabidopsis
  misc_feature (57)..(256): Homolog of NCBI NO: 21537346 NR Description: unknown [Arabidopsis thaliana]
  misc_feature (57)..(256): Homolog of NCBI NO: 18424973 NR Description: bHLH protein; protein id: At5g65640.1, supported
  misc_feature (1)..(160): Homolog of NCBI NO: 18424973 NR Description: bHLH protein; protein id: At5g65640.1, supported
  misc_feature (1)..(160): Homolog of NCBI NO: 21537346 NR Description: unknown [Arabidopsis thaliana]
  misc_feature (85)..(254): Homolog of NCBI NO: 22758263 NR Description: Putative bHLH transcription protein [Oryza sativa
  misc_feature (7)..(155): Homolog of NCBI NO: 34907076 NR Description: OSJNBa0093F16.27 [Oryza sativa (japonica
  misc_feature (174)..(250): Homolog of NCBI NO: 34907076 NR Description: OSJNBa0093F16.27 [Oryza sativa (japonica
  misc_feature (178)..(253): Homolog of NCBI NO: 22331357 NR Description: bHLH protein; protein id: At3g26744.1, supported cDNA: gi_19310474, supported by cDNA: gi_19310474 [Arabidopsis >gi|19310475|gb|AAL84972.1| AT3g26744/MLJ15_15 [Arabidopsis
MNLISQPPPLLHQPPQPSSPLYDSPPLSSAFDYPFLEDIIHSSYSPPPLILPASQENTNNYSPLMEESKSFISIGETNKKRSNKKLEGQPSKNLMAERRRRKRLNDRLSLLRSIVPKITKMDRTSILGDAIDYMKELLDKINKLQEDEQELGSNSHLSTLITNESMVRNSLKFEVDQREVNTHIDICCPTKPGLVVSTVSTLETLGLEIEQCVISCFSDFSLQASCFEVGEQRYMVTSEATKQALIRNAGYGGRCL

SEQ ID NO: 79483 - DNA, 1861 bp, Arabidopsis thaliana
  misc_feature (1)..(1861): Ceres Seq. ID no. 12651469
  misc_feature: MA Experiment ID: 20000184 Result: Down-regulated in Transcription
  misc_feature: MA Experiment 20000184 PARAMETER Experiment Name: At_Shoots__P Parameter: Age (day) Value: 7
  misc_feature: MA Experiment 20000184 PARAMETER Experiment Name: At_Shoots__P Parameter: Tissue Value: Shoots vs. Whole Plant
  misc_feature: MA Experiment ID: 20000227 Result: Down-regulated in Transcription
  misc_feature: MA Experiment 20000227 PARAMETER Experiment Name: At_Root-Tips-vs-Tops_P Parameter: Tissue Value: Root Tips vs. Root Tops
  misc_feature: MA Experiment ID: 20000234 Result: Down-regulated in Transcription
  misc_feature: MA Experiment 20000234 PARAMETER Experiment Name: At_Siliques_P Parameter: Age (day) Value: 21
  misc_feature: MA Experiment 20000234 PARAMETER Experiment Name: At_Siliques_P Parameter: Organism Value: A. thaliana
  misc_feature: MA Experiment 20000234 PARAMETER Experiment Name: At_Siliques_P Parameter: Plant Line Value: WS
  misc_feature: MA Experiment 20000234 PARAMETER Experiment Name: At_Siliques_P Parameter: Tissue Value: Less Than 5mm Siliques vs. Whole Plant
  misc_feature: MA Experiment ID: 20000437 Result: Up-regulated in Transcription
  misc_feature: MA Experiment 20000437 PARAMETER Experiment Name: At_Drought_P Parameter: Age (day) Value: 8
  misc_feature: MA Experiment 20000437 PARAMETER Experiment Name: At_Drought_P Parameter: Organism Value: A. thaliana
  misc_feature: MA Experiment 20000437 PARAMETER Experiment Name: At_Drought_P Parameter: Plant Line Value: WS
  misc_feature: MA Experiment 20000437 PARAMETER Experiment Name: At_Drought_P Parameter: Timepoint (hr) Value: 24
  misc_feature: MA Experiment 20000437 PARAMETER Experiment Name: At_Drought_P Parameter: Tissue Value: Whole Plant
  misc_feature: MA Experiment 20000437 PARAMETER Experiment Name: At_Drought_P Parameter: Treatment Value: Drought vs. No Drought
  misc_feature: MA Experiment ID: 20000438 Result: Down-regulated in Transcription
  misc_feature: MA Experiment 20000438 PARAMETER Experiment Name: At_Shoots__P Parameter: Age (day) Value: 14
  misc_feature: MA Experiment 20000438 PARAMETER Experiment Name: At_Shoots__P Parameter: Tissue Value: Shoots vs. Whole Plant
  misc_feature: MA Experiment ID: 20000794 Result: Up-regulated in Transcription
  misc_feature: MA Experiment 20000794 PARAMETER Experiment Name: At_Petals_P Parameter: Age (day) Value: 23-25 days
  misc_feature: MA Experiment 20000794 PARAMETER Experiment Name: At_Petals_P Parameter: Plant Line Value: WS
  misc_feature: MA Experiment 20000794 PARAMETER Experiment Name: At_Petals_P Parameter: Tissue Value: Petals vs. Whole plant
  misc_feature: MA Experiment ID: 20001905 Result: Up-regulated in Transcription
  misc_feature: MA Experiment 20001905 PARAMETER Experiment Name: At_Drought_Reproduction_P Parameter: Age (day) Value: 40
  misc_feature: MA Experiment 20001905 PARAMETER Experiment Name: At_Drought_Reproduction_P Parameter: Organism Value: A. thaliana
  misc_feature: MA Experiment 20001905 PARAMETER Experiment Name: At_Drought_Reproduction_P Parameter: Plant Line Value: WS
  misc_feature: MA Experiment 20001905 PARAMETER Experiment Name: At_Drought_Reproduction_P Parameter: Timepoint (day) Value: 10
  misc_feature: MA Experiment 20001905 PARAMETER Experiment Name: At_Drought_Reproduction_P Parameter: Tissue Value: Rosettes
  misc_feature: MA Experiment 20001905 PARAMETER Experiment Name: At_Drought_Reproduction_P Parameter: Treatment Value: Drought vs. No Drought
  misc_feature: MA Experiment ID: 20001906 Result: Up-regulated in Transcription
  misc_feature: MA Experiment 20001906 PARAMETER Experiment Name: At_Drought_Reproduction_P Parameter: Age (day) Value: 35
  misc_feature: MA Experiment 20001906 PARAMETER Experiment Name: At_Drought_Reproduction_P Parameter: Organism Value: A. thaliana
  misc_feature: MA Experiment 20001906 PARAMETER Experiment Name: At_Drought_Reproduction_P Parameter: Plant Line Value: WS
  misc_feature: MA Experiment 20001906 PARAMETER Experiment Name: At_Drought_Reproduction_P Parameter: Timepoint (day) Value: 5
  misc_feature: MA Experiment 20001906 PARAMETER Experiment Name: At_Drought_Reproduction_P Parameter: Tissue Value: Siliques
  misc_feature: MA Experiment 20001906 PARAMETER Experiment Name: At_Drought_Reproduction_P Parameter: Treatment Value: Drought vs. No Drought
  misc_feature: MA Experiment ID: 20001908 Result: Up-regulated in Transcription
  misc_feature: MA Experiment 20001908 PARAMETER Experiment Name: At_Drought_Reproduction_P Parameter: Age (day) Value: 40
  misc_feature: MA Experiment 20001908 PARAMETER Experiment Name: At_Drought_Reproduction_P Parameter: Organism Value: A. thaliana
  misc_feature: MA Experiment 20001908 PARAMETER Experiment Name: At_Drought_Reproduction_P Parameter: Plant Line Value: WS
  misc_feature: MA Experiment 20001908 PARAMETER Experiment Name: At_Drought_Reproduction_P Parameter: Timepoint (day) Value: 10
  misc_feature: MA Experiment 20001908 PARAMETER Experiment Name: At_Drought_Reproduction_P Parameter: Tissue Value: Siliques
  misc_feature: MA Experiment 20001908 PARAMETER Experiment Name: At_Drought_Reproduction_P Parameter: Treatment Value: Drought vs. No Drought
  misc_feature: MA Experiment ID: 20001911 Result: Up-regulated in Transcription
  misc_feature: MA Experiment 20001911 PARAMETER Experiment Name: At_Drought_Reproduction_P Parameter: Age (day) Value: 40
  misc_feature: MA Experiment 20001911 PARAMETER Experiment Name: At_Drought_Reproduction_P Parameter: Organism Value: A. thaliana
  misc_feature: MA Experiment 20001911 PARAMETER Experiment Name: At_Drought_Reproduction_P Parameter: Plant Line Value: WS
  misc_feature: MA Experiment 20001911 PARAMETER Experiment Name: At_Drought_Reproduction_P Parameter: Timepoint (day) Value: 10
  misc_feature: MA Experiment 20001911 PARAMETER Experiment Name: At_Drought_Reproduction_P Parameter: Tissue Value: Flowers
  misc_feature: MA Experiment 20001911 PARAMETER Experiment Name: At_Drought_Reproduction_P Parameter: Treatment Value: Drought vs. No Drought
gctccacgttttttgttaattctcacagacggcgcagagtaatctctcggcaaaggaaaaaaataaagggaaagtgtttctttgattcatggatggatgtgctggtaaacgatctgttgaccggttggttgtgcctcggaaagccagtggtcttaccctgcgtgagaatatgaacaagacagatggtaagaatgttcctttctgcagccgagttggttgtactgcaaaggtaacttctaccaagagatctcggattggctctacggataacaatacaaaagttggtctgcctccggttccatctaccttaaatagaaaggaaattgttgggagctcatctcgtactcctggtggatttggatacttgagaaagccagccaaagttactgcaagaagacagccgtcatctagtttagacactgaatcttcggaaacgagttgtattcatgatgatccagctgcaacagagcccacacttccacgccaaaagactaaaagagtcacaatcaatgttcatcctcaaagcgctgtctctagagaagttgtaataacaaaggcaggaagctcaagtagaggaaccagcagaattagtcatccaaagtctgaattgggtacccgcgatgctctgacgggtccttctgtttctacatcttctggtaacagtgagcacactgtaagaggcggtttgagtaggcatagattgaggaacttgagctgcaattctgtgtctgatgttcttccaactaactcaaactcagcaacaaaaatcagtgtgactaaaaagaaaaacgctgatggagagagcagcttatctagcaaaggtagtaagactagtgtgttggttccaaaggtaaggaatcaaatttcttctcatggcaatggcgtcacagtttctgataacagaagaaatcgagtagtaccaagtattagggacagcagtactgttgtttcaaatggttgtaggagagctggttattttggtagatcagagcgacttggagctactgcatcctctgctacttctcgacaaatgcctcatcctacaacaccaaccgatcccaatccttctctttcgttttgtccatcaaatatatacagtagtactggacgcgtacatagcaatatgcctggtagccccacggaagctgacccttcaagctctttggtgaaccgggatggtttgagtcactacaacatgaatggaattgcagaggtattgttggccctggaaaggattgaacatgatgaagagcttacatatgagcaactggcttctatagagaccaatctattctcaagtggtatgttcagattctatgatcagcatagagatatgaggcttgacatcgataacatgtcatatgaggagttactagctttgggggataaaatgggtacagtgagcacagctctaagcgaagaagcactctcaagaagccttaagcaaagcatttatcaggagacagatgaaaccggttccatctctctgtataaggatgatgatatcaagtgcagtatttgccaggaagagtatgttgatggagatgaattagggactattccatgtcaacatatgtaccatgtgagctgtgtacaacaatggctgcggatgaagaattggtgcccaatctgcaaaacctctgcggaagaagagaagtcgatttagtgaataatgccaacagcagttttagctttgtgggatgattccaagatgatgcagatacattgctattttcttcaccaagtgcttgtctctacatcatcttgctctctcttctcttttcttttgtacatataacagtatctttcttttgacctaattgggtacaaatgggtaaataagatcaggtgaccattttct

SEQ ID NO: 79484 - protein, 525 aa, Arabidopsis thaliana
  peptide (1)..(525): Ceres Seq. ID no. 12651470
  misc_feature (475)..(515): Pfam Name: Zinc finger, C3HC4 type (RING finger) Pfam Description: Zinc finger, C3HC4 type (RING finger)
  misc_feature (1)..(525): Homolog of NCBI NO: 22326712 NR Description: Pspzf zinc finger protein - like; protein id:
  misc_feature (1)..(525): Homolog of NCBI NO: 20466428 NR Description: Pspzf zinc finger protein-like [Arabidopsis
  misc_feature (28)..(525): Homolog of NCBI NO: 10129643 NR Description: Pspzf zinc finger protein-like [Arabidopsis
  misc_feature (1)..(522): Homolog of NCBI NO: 30689641 NR Description: RING finger-related protein [Arabidopsis thaliana]
  misc_feature (207)..(520): Homolog of NCBI NO: 7486381 NR Description: hypothetical protein F3L17.20 - Arabidopsis >gi|5262756|emb|CAB45904.1| putative protein [Arabidopsis >gi|7270048|emb|CAB79863.1| putative protein [Arabidopsis
  misc_feature (207)..(520): Homolog of NCBI NO: 18417809 NR Description: putative protein; protein id: At4g31450.1, by cDNA: gi_15983461 [Arabidopsis thaliana] AT4g31450/F3L17_20 [Arabidopsis thaliana]
  misc_feature (407)..(519): Homolog of NCBI NO: 38344153 NR Description: OSJNBa0041A02.20 [Oryza sativa (japonica
  misc_feature (265)..(523): Homolog of NCBI NO: 40253261 NR Description: DNA binding zinc finger protein-like [Oryza
  misc_feature (308)..(519): Homolog of NCBI NO: 15226553 NR Description: putative RING zinc finger protein; protein id: [Arabidopsis thaliana] >gi|25411642|pir||B84530 probable RING
  misc_feature (318)..(519): Homolog of NCBI NO: 15235211 NR Description: putative protein; protein id: At4g34040.1
MDGCAGKRSVDRLVVPRKASGLTLRENMNKTDGKNVPFCSRVGCTAKVTSTKRSRIGSTDNNTKVGLPPVPSTLNRKEIVGSSSRTPGGFGYLRKPAKVTARRQPSSSLDTESSETSCIHDDPAATEPTLPRQKTKRVTINVHPQSAVSREVVITKAGSSSRGTSRISHPKSELGTRDALTGPSVSTSSGNSEHTVRGGLSRHRLRNLSCNSVSDVLPTNSNSATKISVTKKKNADGESSLSSKGSKTSVLVPKVRNQISSHGNGVTVSDNRRNRVVPSIRDSSTVVSNGCRRAGYFGRSERLGATASSATSRQMPHPTTPTDPNPSLSFCPSNIYSSTGRVHSNMPGSPTEADPSSSLVNRDGLSHYNMNGIAEVLLALERIEHDEELTYEQLASIETNLFSSGMFRFYDQHRDMRLDIDNMSYEELLALGDKMGTVSTALSEEALSRSLKQSIYQETDETGSISLYKDDDIKCSICQEEYVDGDELGTIPCQHMYHVSCVQQWLRMKNWCPICKTSAEEEKSI

SEQ ID NO: 79485 - protein, 498 aa, Arabidopsis thaliana
  peptide (1)..(498): Ceres Seq. ID no. 12651471
  misc_feature (448)..(488): Pfam Name: Zinc finger, C3HC4 type (RING finger) Pfam Description: Zinc finger, C3HC4 type (RING finger)
  misc_feature (1)..(498): Homolog of NCBI NO: 22326712 NR Description: Pspzf zinc finger protein - like; protein id:
  misc_feature (1)..(498): Homolog of NCBI NO: 20466428 NR Description: Pspzf zinc finger protein-like [Arabidopsis
  misc_feature (1)..(498): Homolog of NCBI NO: 10129643 NR Description: Pspzf zinc finger protein-like [Arabidopsis
  misc_feature (1)..(495): Homolog of NCBI NO: 30689641 NR Description: RING finger-related protein [Arabidopsis thaliana]
  misc_feature (180)..(493): Homolog of NCBI NO: 7486381 NR Description: hypothetical protein F3L17.20 - Arabidopsis >gi|5262756|emb|CAB45904.1| putative protein [Arabidopsis >gi|7270048|emb|CAB79863.1| putative protein [Arabidopsis
  misc_feature (180)..(493): Homolog of NCBI NO: 18417809 NR Description: putative protein; protein id: At4g31450.1, by cDNA: gi_15983461 [Arabidopsis thaliana] AT4g31450/F3L17_20 [Arabidopsis thaliana]
  misc_feature (380)..(492): Homolog of NCBI NO: 38344153 NR Description: OSJNBa0041A02.20 [Oryza sativa (japonica
  misc_feature (238)..(496): Homolog of NCBI NO: 40253261 NR Description: DNA binding zinc finger protein-like [Oryza
  misc_feature (281)..(492): Homolog of NCBI NO: 15226553 NR Description: putative RING zinc finger protein; protein id: [Arabidopsis thaliana] >gi|25411642|pir||B84530 probable RING
  misc_feature (291)..(492): Homolog of NCBI NO: 15235211 NR Description: putative protein; protein id: At4g34040.1
MNKTDGKNVPFCSRVGCTAKVTSTKRSRIGSTDNNTKVGLPPVPSTLNRKEIVGSSSRTPGGFGYLRKPAKVTARRQPSSSLDTESSETSCIHDDPAATEPTLPRQKTKRVTINVHPQSAVSREVVITKAGSSSRGTSRISHPKSELGTRDALTGPSVSTSSGNSEHTVRGGLSRHRLRNLSCNSVSDVLPTNSNSATKISVTKKKNADGESSLSSKGSKTSVLVPKVRNQISSHGNGVTVSDNRRNRVVPSIRDSSTVVSNGCRRAGYFGRSERLGATASSATSRQMPHPTTPTDPNPSLSFCPSNIYSSTGRVHSNMPGSPTEADPSSSLVNRDGLSHYNMNGIAEVLLALERIEHDEELTYEQLASIETNLFSSGMFRFYDQHRDMRLDIDNMSYEELLALGDKMGTVSTALSEEALSRSLKQSIYQETDETGSISLYKDDDIKCSICQEEYVDGDELGTIPCQHMYHVSCVQQWLRMKNWCPICKTSAEEEKSI

SEQ ID NO: 79486 - DNA, 480 bp, Arabidopsis thaliana
  misc_feature (1)..(480): Ceres Seq. ID no. 12651519
  misc_feature: MA Experiment ID: 20000166 Result: Up-regulated in Transcription
  misc_feature: MA Experiment 20000166 PARAMETER Experiment Name: At_100uM_ABA_P Parameter: Age (day) Value: 14
  misc_feature: MA Experiment 20000166 PARAMETER Experiment Name: At_100uM_ABA_P Parameter: Organism Value: A. thaliana
  misc_feature: MA Experiment 20000166 PARAMETER Experiment Name: At_100uM_ABA_P Parameter: Plant Line Value: WS
  misc_feature: MA Experiment 20000166 PARAMETER Experiment Name: At_100uM_ABA_P Parameter: Timepoint (hr) Value: 1
  misc_feature: MA Experiment 20000166 PARAMETER Experiment Name: At_100uM_ABA_P Parameter: Tissue Value: Aerial
  misc_feature: MA Experiment 20000166 PARAMETER Experiment Name: At_100uM_ABA_P Parameter: Treatment Value: 100uM ABA vs. No Treatment
  misc_feature: MA Experiment ID: 20000171 Result: Down-regulated in Transcription
  misc_feature: MA Experiment 20000171 PARAMETER Experiment Name: At_42deg_Heat_P Parameter: Age (day) Value: 14
  misc_feature: MA Experiment 20000171 PARAMETER Experiment Name: At_42deg_Heat_P Parameter: Organism Value: A. thaliana
  misc_feature: MA Experiment 20000171 PARAMETER Experiment Name: At_42deg_Heat_P Parameter: Plant Line Value: WS
  misc_feature: MA Experiment 20000171 PARAMETER Experiment Name: At_42deg_Heat_P Parameter: Temperature (deg C) Value: 42 vs. 22
  misc_feature: MA Experiment 20000171 PARAMETER Experiment Name: At_42deg_Heat_P Parameter: Timepoint (hr) Value: 1
  misc_feature: MA Experiment 20000171 PARAMETER Experiment Name: At_42deg_Heat_P Parameter: Tissue Value: Aerial
  misc_feature: MA Experiment ID: 20000173 Result: Down-regulated in Transcription
  misc_feature: MA Experiment 20000173 PARAMETER Experiment Name: At_42deg_Heat_P Parameter: Age (day) Value: 14
  misc_feature: MA Experiment 20000173 PARAMETER Experiment Name: At_42deg_Heat_P Parameter: Organism Value: A. thaliana
  misc_feature: MA Experiment 20000173 PARAMETER Experiment Name: At_42deg_Heat_P Parameter: Plant Line Value: WS
  misc_feature: MA Experiment 20000173 PARAMETER Experiment Name: At_42deg_Heat_P Parameter: Temperature (deg C) Value: 42 vs. 22
  misc_feature: MA Experiment 20000173 PARAMETER Experiment Name: At_42deg_Heat_P Parameter: Timepoint (hr) Value: 6
  misc_feature: MA Experiment 20000173 PARAMETER Experiment Name: At_42deg_Heat_P Parameter: Tissue Value: Aerial
  misc_feature: MA Experiment ID: 20000179 Result: Down-regulated in Transcription
  misc_feature: MA Experiment 20000179 PARAMETER Experiment Name: At_Germinating_Seeds_P Parameter: Age (hr) Value: 6 vs. 0
  misc_feature: MA Experiment 20000179 PARAMETER Experiment Name: At_Germinating_Seeds_P Parameter: Tissue Value: Germinating Seeds
  misc_feature: MA Experiment ID: 20000180 Result: Down-regulated in Transcription
  misc_feature: MA Experiment 20000180 PARAMETER Experiment Name: At_Germinating_Seeds_P Parameter: Age (hr) Value: 24 vs. 0
  misc_feature: MA Experiment 20000180 PARAMETER Experiment Name: At_Germinating_Seeds_P Parameter: Tissue Value: Germinating Seeds
  misc_feature: MA Experiment ID: 20000185 Result: Down-regulated in Transcription
  misc_feature: MA Experiment 20000185 PARAMETER Experiment Name: At_Roots__P Parameter: Age (day) Value: 7 vs. 21
  misc_feature: MA Experiment 20000185 PARAMETER Experiment Name: At_Roots__P Parameter: Organism Value: A. thaliana
  misc_feature: MA Experiment 20000185 PARAMETER Experiment Name: At_Roots__P Parameter: Tissue Value: Roots vs. Whole Plant
  misc_feature: MA Experiment ID: 20000267 Result: Up-regulated in Transcription
  misc_feature: MA Experiment 20000267 PARAMETER Experiment Name: At_Drought_P Parameter: Age (day) Value: 7
  misc_feature: MA Experiment 20000267 PARAMETER Experiment Name: At_Drought_P Parameter: Organism Value: A. thaliana
  misc_feature: MA Experiment 20000267 PARAMETER Experiment Name: At_Drought_P Parameter: Plant Line Value: WS
  misc_feature: MA Experiment 20000267 PARAMETER Experiment Name: At_Drought_P Parameter: Timepoint (hr) Value: 6
  misc_feature: MA Experiment 20000267 PARAMETER Experiment Name: At_Drought_P Parameter: Tissue Value: Whole Plant
  misc_feature: MA Experiment 20000267 PARAMETER Experiment Name: At_Drought_P Parameter: Treatment Value: Drought vs. No Drought
  misc_feature: MA Experiment ID: 20000268 Result: Up-regulated in Transcription
  misc_feature: MA Experiment 20000268 PARAMETER Experiment Name: At_100mM_NaCl__P Parameter: Age (day) Value: 14
  misc_feature: MA Experiment 20000268 PARAMETER Experiment Name: At_100mM_NaCl__P Parameter: Organism Value: A. thaliana
  misc_feature: MA Experiment 20000268 PARAMETER Experiment Name: At_100mM_NaCl__P Parameter: Plant Line Value: WS
  misc_feature: MA Experiment 20000268 PARAMETER Experiment Name: At_100mM_NaCl__P Parameter: Timepoint (hr) Value: 6
  misc_feature: MA Experiment 20000268 PARAMETER Experiment Name: At_100mM_NaCl__P Parameter: Tissue Value: Whole Plant
  misc_feature: MA Experiment 20000268 PARAMETER Experiment Name: At_100mM_NaCl__P Parameter: Treatment Value: 100mM NaCl vs. No Treatment
  misc_feature: MA Experiment ID: 20000436 Result: Up-regulated in Transcription
  misc_feature: MA Experiment 20000436 PARAMETER Experiment Name: At_Drought_P Parameter: Age (day) Value: 7
  misc_feature: MA Experiment 20000436 PARAMETER Experiment Name: At_Drought_P Parameter: Organism Value: A. thaliana
  misc_feature: MA Experiment 20000436 PARAMETER Experiment Name: At_Drought_P Parameter: Plant Line Value: WS
  misc_feature: MA Experiment 20000436 PARAMETER Experiment Name: At_Drought_P Parameter: Timepoint (hr) Value: 12
  misc_feature: MA Experiment 20000436 PARAMETER Experiment Name: At_Drought_P Parameter: Tissue Value: Whole Plant
  misc_feature: MA Experiment 20000436 PARAMETER Experiment Name: At_Drought_P Parameter: Treatment Value: Drought vs. No Drought
  misc_feature: MA Experiment ID: 20000439 Result: Down-regulated in Transcription
  misc_feature: MA Experiment 20000439 PARAMETER Experiment Name: At_Roots__P Parameter: Age (day) Value: 14 vs. 21
  misc_feature: MA Experiment 20000439 PARAMETER Experiment Name: At_Roots__P Parameter: Organism Value: A. thaliana
  misc_feature: MA Experiment 20000439 PARAMETER Experiment Name: At_Roots__P Parameter: Tissue Value: Roots vs. Whole Plant
  misc_feature: MA Experiment ID: 20000452 Result: Up-regulated in Transcription
  misc_feature: MA Experiment 20000452 PARAMETER Experiment Name: At_CS6879_Shoots-Roots_P Parameter: Age (day) Value: 14
  misc_feature: MA Experiment 20000452 PARAMETER Experiment Name: At_CS6879_Shoots-Roots_P Parameter: Organism Value: A. thaliana
  misc_feature: MA Experiment 20000452 PARAMETER Experiment Name: At_CS6879_Shoots-Roots_P Parameter: Plant Line Value: CS6879 vs. WS
  misc_feature: MA Experiment 20000452 PARAMETER Experiment Name: At_CS6879_Shoots-Roots_P Parameter: Tissue Value: Shoots
  misc_feature: MA Experiment ID: 20000453 Result: Up-regulated in Transcription
  misc_feature: MA Experiment 20000453 PARAMETER Experiment Name: At_100uM_ABA_P Parameter: Age (day) Value: 15
  misc_feature: MA Experiment 20000453 PARAMETER Experiment Name: At_100uM_ABA_P Parameter: Organism Value: A. thaliana
  misc_feature: MA Experiment 20000453 PARAMETER Experiment Name: At_100uM_ABA_P Parameter: Plant Line Value: WS
  misc_feature: MA Experiment 20000453 PARAMETER Experiment Name: At_100uM_ABA_P Parameter: Timepoint (hr) Value: 24
  misc_feature: MA Experiment 20000453 PARAMETER Experiment Name: At_100uM_ABA_P Parameter: Tissue Value: Aerial
  misc_feature: MA Experiment 20000453 PARAMETER Experiment Name: At_100uM_ABA_P Parameter: Treatment Value: 100uM ABA vs. No Treatment
  misc_feature: MA Experiment ID: 20000606 Result: Down-regulated in Transcription
  misc_feature: MA Experiment 20000606 PARAMETER Experiment Name: At_CS8548_Mutant_P Parameter: Age (day) Value: 14
  misc_feature: MA Experiment 20000606 PARAMETER Experiment Name: At_CS8548_Mutant_P Parameter: Plant Line Value: CS8548 vs. wt
  misc_feature: MA Experiment 20000606 PARAMETER Experiment Name: At_CS8548_Mutant_P Parameter: Tissue Value: Whole Plant
  misc_feature: MA Experiment ID: 20001450 Result: Up-regulated in Transcription
  misc_feature: MA Experiment 20001450 PARAMETER Experiment Name: At_Far-red-induction_P Parameter: Age (day) Value: 7
  misc_feature: MA Experiment 20001450 PARAMETER Experiment Name: At_Far-red-induction_P Parameter: Light Value: Far-red vs. White
  misc_feature: MA Experiment 20001450 PARAMETER Experiment Name: At_Far-red-induction_P Parameter: Organism Value: A. thaliana
  misc_feature: MA Experiment 20001450 PARAMETER Experiment Name: At_Far-red-induction_P Parameter: Plant Line Value: Columbia
  misc_feature: MA Experiment 20001450 PARAMETER Experiment Name: At_Far-red-induction_P Parameter: Timepoint (hr) Value: 8
  misc_feature: MA Experiment 20001450 PARAMETER Experiment Name: At_Far-red-induction_P Parameter: Tissue Value: Whole Plant
  misc_feature: MA Experiment ID: 20001451 Result: Up-regulated in Transcription
  misc_feature: MA Experiment 20001451 PARAMETER Experiment Name: At_Far-red-induction_P Parameter: Age (day) Value: 7
  misc_feature: MA Experiment 20001451 PARAMETER Experiment Name: At_Far-red-induction_P Parameter: Light Value: Far-red vs. White
  misc_feature: MA Experiment 20001451 PARAMETER Experiment Name: At_Far-red-induction_P Parameter: Organism Value: A. thaliana
  misc_feature: MA Experiment 20001451 PARAMETER Experiment Name: At_Far-red-induction_P Parameter: Plant Line Value: Columbia
  misc_feature: MA Experiment 20001451 PARAMETER Experiment Name: At_Far-red-induction_P Parameter: Timepoint (hr) Value: 24
  misc_feature: MA Experiment 20001451 PARAMETER Experiment Name: At_Far-red-induction_P Parameter: Tissue Value: Whole Plant
  misc_feature: MA Experiment ID: 20001557 Result: Down-regulated in Transcription
  misc_feature: MA Experiment 20001557 PARAMETER Experiment Name: At_Drought_Soil_Dry_P Parameter: Age (day) Value: 27
  misc_feature: MA Experiment 20001557 PARAMETER Experiment Name: At_Drought_Soil_Dry_P Parameter: Organism Value: A. thaliana
  misc_feature: MA Experiment 20001557 PARAMETER Experiment Name: At_Drought_Soil_Dry_P Parameter: Plant Line Value: WS
  misc_feature: MA Experiment 20001557 PARAMETER Experiment Name: At_Drought_Soil_Dry_P Parameter: Post Timepoint (hr) Value: 3
  misc_feature: MA Experiment 20001557 PARAMETER Experiment Name: At_Drought_Soil_Dry_P Parameter: Post-Treatment Value: Re-Water vs. No Drought
  misc_feature: MA Experiment 20001557 PARAMETER Experiment Name: At_Drought_Soil_Dry_P Parameter: Timepoint (day) Value: 13
  misc_feature: MA Experiment 20001557 PARAMETER Experiment Name: At_Drought_Soil_Dry_P Parameter: Treatment Value: Drought vs. No Drought
  misc_feature: MA Experiment ID: 20001558 Result: Down-regulated in Transcription
  misc_feature: MA Experiment 20001558 PARAMETER Experiment Name: At_Drought_Soil_Dry_P Parameter: Age (day) Value: 27
  misc_feature: MA Experiment 20001558 PARAMETER Experiment Name: At_Drought_Soil_Dry_P Parameter: Organism Value: A. thaliana
  misc_feature: MA Experiment 20001558 PARAMETER Experiment Name: At_Drought_Soil_Dry_P Parameter: Plant Line Value: WS
  misc_feature: MA Experiment 20001558 PARAMETER Experiment Name: At_Drought_Soil_Dry_P Parameter: Post Timepoint (hr) Value: 6
  misc_feature: MA Experiment 20001558 PARAMETER Experiment Name: At_Drought_Soil_Dry_P Parameter: Post-Treatment Value: Re-Water vs. No Drought
  misc_feature: MA Experiment 20001558 PARAMETER Experiment Name: At_Drought_Soil_Dry_P Parameter: Timepoint (day) Value: 13
  misc_feature: MA Experiment 20001558 PARAMETER Experiment Name: At_Drought_Soil_Dry_P Parameter: Treatment Value: Drought vs. No Drought
  misc_feature: MA Experiment ID: 20001560 Result: Down-regulated in Transcription
  misc_feature: MA Experiment 20001560 PARAMETER Experiment Name: At_Drought_Soil_Dry_P Parameter: Age (day) Value: 28
  misc_feature: MA Experiment 20001560 PARAMETER Experiment Name: At_Drought_Soil_Dry_P Parameter: Organism Value: A. thaliana
  misc_feature: MA Experiment 20001560 PARAMETER Experiment Name: At_Drought_Soil_Dry_P Parameter: Plant Line Value: WS
  misc_feature: MA Experiment 20001560 PARAMETER Experiment Name: At_Drought_Soil_Dry_P Parameter: Post Timepoint (hr) Value: None
  misc_feature: MA Experiment 20001560 PARAMETER Experiment Name: At_Drought_Soil_Dry_P Parameter: Post-Treatment Value: None
  misc_feature: MA Experiment 20001560 PARAMETER Experiment Name: At_Drought_Soil_Dry_P Parameter: Timepoint (day) Value: 14
  misc_feature: MA Experiment 20001560 PARAMETER Experiment Name: At_Drought_Soil_Dry_P Parameter: Treatment Value: Drought vs. No Drought
  misc_feature: MA Experiment ID: 20001911 Result: Up-regulated in Transcription
  misc_feature: MA Experiment 20001911 PARAMETER Experiment Name: At_Drought_Reproduction_P Parameter: Age (day) Value: 40
  misc_feature: MA Experiment 20001911 PARAMETER Experiment Name: At_Drought_Reproduction_P Parameter: Organism Value: A. thaliana
  misc_feature: MA Experiment 20001911 PARAMETER Experiment Name: At_Drought_Reproduction_P Parameter: Plant Line Value: WS
  misc_feature: MA Experiment 20001911 PARAMETER Experiment Name: At_Drought_Reproduction_P Parameter: Timepoint (day) Value: 10
  misc_feature: MA Experiment 20001911 PARAMETER Experiment Name: At_Drought_Reproduction_P Parameter: Tissue Value: Flowers
  misc_feature: MA Experiment 20001911 PARAMETER Experiment Name: At_Drought_Reproduction_P Parameter: Treatment Value: Drought vs. No Drought
atgcatcgactgctactggaatcccacggcggcgggaacgagacgagcggaagcggcgggggagatgggtacacgagggacatgaacttcgacgcaaacatggtgatcatacttgcggctcttctctgcgcgctgatactagcgcttgggctgaattcgattctccggtgcgcgatgcgatgcggtttcgggttatcatcctctgcggcggcggggacggtggccgacagagctggattaaagaagagagaactgaagaagtttccagtagctgagtacgggtcgggggaagtgaagatagcggcgacggagtgcgcaatctgtctgggggaattcgcggacggcgagagagtgcgagtactgccgccgtgtaatcacagtttccacatgtcatgcatcgacacgtggcttgtctctcactcttcatgtcccaattgtcggcattcactcatcgaggtccacgtggcggggtctgagtga

SEQ ID NO: 79487 - protein, 159 aa, Arabidopsis thaliana
  peptide (1)..(159): Ceres Seq. ID no. 12651520
  misc_feature (105)..(146): Pfam Name: Zinc finger, C3HC4 type (RING finger) Pfam Description: Zinc finger, C3HC4 type (RING finger)
  misc_feature (1)..(159): Homolog of NCBI NO: 15241087 NR Description: putative protein; protein id: At5g01880.1
  misc_feature (1)..(151): Homolog of NCBI NO: 15228395 NR Description: putative RING zinc finger protein; protein id: [Arabidopsis thaliana] >gi|6630539|gb|AAF19558.1|AC011708_1 RING zinc finger protein [Arabidopsis thaliana]
  misc_feature (21)..(152): Homolog of NCBI NO: 15239062 NR Description: RING zinc finger protein-like; protein id:
  misc_feature (8)..(151): Homolog of NCBI NO: 34907826 NR Description: P0485B12.26 [Oryza sativa (japonica
  misc_feature (3)..(152): Homolog of NCBI NO: 15222073 NR Description: RING-H2 finger protein RHA3a, putative; protein
  misc_feature (24)..(157): Homolog of NCBI NO: 9293902 NR Description: contains similarity to RING zinc finger
  misc_feature (10)..(150): Homolog of NCBI NO: 32488364 NR Description: OSJNBb0108J11.16 [Oryza sativa (japonica
  misc_feature (29)..(152): Homolog of NCBI NO: 17016985 NR Description: RING-H2 zinc finger protein [Cucumis melo]
  misc_feature (31)..(153): Homolog of NCBI NO: 7489432 NR Description: probable ring finger protein - barley
  misc_feature (25)..(152): Homolog of NCBI NO: 15222069 NR Description: RING-H2 finger protein RHA3a, putative; protein
MHRLLLESHGGGNETSGSGGGDGYTRDMNFDANMVIILAALLCALILALGLNSILRCAMRCGFGLSSSAAAGTVADRAGLKKRELKKFPVAEYGSGEVKIAATECAICLGEFADGERVRVLPPCNHSFHMSCIDTWLVSHSSCPNCRHSLIEVHVAGSE

SEQ ID NO: 79488 - protein, 132 aa, Arabidopsis thaliana
  peptide (1)..(132): Ceres Seq. ID no. 12651521
  misc_feature (78)..(119): Pfam Name: Zinc finger, C3HC4 type (RING finger) Pfam Description: Zinc finger, C3HC4 type (RING finger)
  misc_feature (1)..(132): Homolog of NCBI NO: 15241087 NR Description: putative protein; protein id: At5g01880.1
  misc_feature (1)..(124): Homolog of NCBI NO: 15228395 NR Description: putative RING zinc finger protein; protein id: [Arabidopsis thaliana] >gi|6630539|gb|AAF19558.1|AC011708_1 RING zinc finger protein [Arabidopsis thaliana]
  misc_feature (1)..(125): Homolog of NCBI NO: 15239062 NR Description: RING zinc finger protein-like; protein id:
  misc_feature (1)..(124): Homolog of NCBI NO: 34907826 NR Description: P0485B12.26 [Oryza sativa (japonica
  misc_feature (1)..(125): Homolog of NCBI NO: 15222073 NR Description: RING-H2 finger protein RHA3a, putative; protein
  misc_feature (1)..(130): Homolog of NCBI NO: 9293902 NR Description: contains similarity to RING zinc finger
  misc_feature (1)..(123): Homolog of NCBI NO: 32488364 NR Description: OSJNBb0108J11.16 [Oryza sativa (japonica
  misc_feature (2)..(125): Homolog of NCBI NO: 17016985 NR Description: RING-H2 zinc finger protein [Cucumis melo]
  misc_feature (4)..(126): Homolog of NCBI NO: 7489432 NR Description: probable ring finger protein - barley
  misc_feature (1)..(125): Homolog of NCBI NO: 15222069 NR Description: RING-H2 finger protein RHA3a, putative; protein
MNFDANMVIILAALLCALILALGLNSILRCAMRCGFGLSSSAAAGTVADRAGLKKRELKKFPVAEYGSGEVKIAATECAICLGEFADGERVRVLPPCNHSFHMSCIDTWLVSHSSCPNCRHSLIEVHVAGSE

SEQ ID NO: 79489 - protein, 126 aa, Arabidopsis thaliana
  peptide (1)..(126): Ceres Seq. ID no. 12651522
  misc_feature (72)..(113): Pfam Name: Zinc finger, C3HC4 type (RING finger) Pfam Description: Zinc finger, C3HC4 type (RING finger)
  misc_feature (1)..(126): Homolog of NCBI NO: 15241087 NR Description: putative protein; protein id: At5g01880.1
  misc_feature (1)..(118): Homolog of NCBI NO: 15228395 NR Description: putative RING zinc finger protein; protein id: [Arabidopsis thaliana] >gi|6630539|gb|AAF19558.1|AC011708_1 RING zinc finger protein [Arabidopsis thaliana]
  misc_feature (1)..(119): Homolog of NCBI NO: 15239062 NR Description: RING zinc finger protein-like; protein id:
  misc_feature (1)..(118): Homolog of NCBI NO: 34907826 NR Description: P0485B12.26 [Oryza sativa (japonica
  misc_feature (1)..(119): Homolog of NCBI NO: 15222073 NR Description: RING-H2 finger protein RHA3a, putative; protein
  misc_feature (1)..(124): Homolog of NCBI NO: 9293902 NR Description: contains similarity to RING zinc finger
  misc_feature (1)..(117): Homolog of NCBI NO: 32488364 NR Description: OSJNBb0108J11.16 [Oryza sativa (japonica
  misc_feature (1)..(119): Homolog of NCBI NO: 17016985 NR Description: RING-H2 zinc finger protein [Cucumis melo]
  misc_feature (1)..(120): Homolog of NCBI NO: 7489432 NR Description: probable ring finger protein - barley
  misc_feature (1)..(119): Homolog of NCBI NO: 7770352 NR Description: F27J15.3 [Arabidopsis thaliana]
MVIILAALLCALILALGLNSILRCAMRCGFGLSSSAAAGTVADRAGLKKRELKKFPVAEYGSGEVKIAATECAICLGEFADGERVRVLPPCNHSFHMSCIDTWLVSHSSCPNCRHSLIEVHVAGSE

SEQ ID NO: 79490 - DNA, 619 bp, Arabidopsis thaliana
  misc_feature (1)..(619): Ceres Seq. ID no. 12651535
  misc_feature: MA Experiment ID: 20000180 Result: Up-regulated in Transcription
  misc_feature: MA Experiment 20000180 PARAMETER Experiment Name: At_Germinating_Seeds_P Parameter: Age (hr) Value: 24 vs. 0
  misc_feature: MA Experiment 20000180 PARAMETER Experiment Name: At_Germinating_Seeds_P Parameter: Tissue Value: Germinating Seeds
  misc_feature: MA Experiment ID: 20000184 Result: Up-regulated in Transcription
  misc_feature: MA Experiment 20000184 PARAMETER Experiment Name: At_Shoots__P Parameter: Age (day) Value: 7
  misc_feature: MA Experiment 20000184 PARAMETER Experiment Name: At_Shoots__P Parameter: Tissue Value: Shoots vs. Whole Plant
  misc_feature: MA Experiment ID: 20000185 Result: Down-regulated in Transcription
  misc_feature: MA Experiment 20000185 PARAMETER Experiment Name: At_Roots__P Parameter: Age (day) Value: 7 vs. 21
  misc_feature: MA Experiment 20000185 PARAMETER Experiment Name: At_Roots__P Parameter: Organism Value: A. thaliana
  misc_feature: MA Experiment 20000185 PARAMETER Experiment Name: At_Roots__P Parameter: Tissue Value: Roots vs. Whole Plant
  misc_feature: MA Experiment ID: 20000234 Result: Up-regulated in Transcription
  misc_feature: MA Experiment 20000234 PARAMETER Experiment Name: At_Siliques_P Parameter: Age (day) Value: 21
  misc_feature: MA Experiment 20000234 PARAMETER Experiment Name: At_Siliques_P Parameter: Organism Value: A. thaliana
  misc_feature: MA Experiment 20000234 PARAMETER Experiment Name: At_Siliques_P Parameter: Plant Line Value: WS
  misc_feature: MA Experiment 20000234 PARAMETER Experiment Name: At_Siliques_P Parameter: Tissue Value: Less Than 5mm Siliques vs. Whole Plant
  misc_feature: MA Experiment ID: 20000235 Result: Up-regulated in Transcription
  misc_feature: MA Experiment 20000235 PARAMETER Experiment Name: At_Siliques_P Parameter: Age (day) Value: 21
  misc_feature: MA Experiment 20000235 PARAMETER Experiment Name: At_Siliques_P Parameter: Organism Value: A. thaliana
  misc_feature: MA Experiment 20000235 PARAMETER Experiment Name: At_Siliques_P Parameter: Plant Line Value: WS
  misc_feature: MA Experiment 20000235 PARAMETER Experiment Name: At_Siliques_P Parameter: Tissue Value: 5-10mm Siliques vs. Whole Plant
  misc_feature: MA Experiment ID: 20000437 Result: Down-regulated in Transcription
  misc_feature: MA Experiment 20000437 PARAMETER Experiment Name: At_Drought_P Parameter: Age (day) Value: 8
  misc_feature: MA Experiment 20000437 PARAMETER Experiment Name: At_Drought_P Parameter: Organism Value: A. thaliana
  misc_feature: MA Experiment 20000437 PARAMETER Experiment Name: At_Drought_P Parameter: Plant Line Value: WS
  misc_feature: MA Experiment 20000437 PARAMETER Experiment Name: At_Drought_P Parameter: Timepoint (hr) Value: 24
  misc_feature: MA Experiment 20000437 PARAMETER Experiment Name: At_Drought_P Parameter: Tissue Value: Whole Plant
  misc_feature: MA Experiment 20000437 PARAMETER Experiment Name: At_Drought_P Parameter: Treatment Value: Drought vs. No Drought
  misc_feature: MA Experiment ID: 20000438 Result: Up-regulated in Transcription
  misc_feature: MA Experiment 20000438 PARAMETER Experiment Name: At_Shoots__P Parameter: Age (day) Value: 14
  misc_feature: MA Experiment 20000438 PARAMETER Experiment Name: At_Shoots__P Parameter: Tissue Value: Shoots vs. Whole Plant
  misc_feature: MA Experiment ID: 20000439 Result: Down-regulated in Transcription
  misc_feature: MA Experiment 20000439 PARAMETER Experiment Name: At_Roots__P Parameter: Age (day) Value: 14 vs. 21
  misc_feature: MA Experiment 20000439 PARAMETER Experiment Name: At_Roots__P Parameter: Organism Value: A. thaliana
  misc_feature: MA Experiment 20000439 PARAMETER Experiment Name: At_Roots__P Parameter: Tissue Value: Roots vs. Whole Plant
  misc_feature: MA Experiment ID: 20000460 Result: Down-regulated in Transcription
  misc_feature: MA Experiment 20000460 PARAMETER Experiment Name: At_10percent_PEG_P Parameter: Age (day) Value: 12
  misc_feature: MA Experiment 20000460 PARAMETER Experiment Name: At_10percent_PEG_P Parameter: Organism Value: A. thaliana
  misc_feature: MA Experiment 20000460 PARAMETER Experiment Name: At_10percent_PEG_P Parameter: Plant Line Value: WS
  misc_feature: MA Experiment 20000460 PARAMETER Experiment Name: At_10percent_PEG_P Parameter: Timepoint (day) Value: 12
  misc_feature: MA Experiment 20000460 PARAMETER Experiment Name: At_10percent_PEG_P Parameter: Tissue Value: Whole Plant
  misc_feature: MA Experiment 20000460 PARAMETER Experiment Name: At_10percent_PEG_P Parameter: Treatment Value: 10percent PEG vs. No Treatment
  misc_feature: MA Experiment ID: 20000794 Result: Down-regulated in Transcription
  misc_feature: MA Experiment 20000794 PARAMETER Experiment Name: At_Petals_P Parameter: Age (day) Value: 23-25 days
  misc_feature: MA Experiment 20000794 PARAMETER Experiment Name: At_Petals_P Parameter: Plant Line Value: WS
  misc_feature: MA Experiment 20000794 PARAMETER Experiment Name: At_Petals_P Parameter: Tissue Value: Petals vs. Whole plant
  misc_feature: MA Experiment ID: 20001247 Result: Up-regulated in Transcription
  misc_feature: MA Experiment 20001247 PARAMETER Experiment Name: At_Far-red-induction_P Parameter: Age (day) Value: 7
  misc_feature: MA Experiment 20001247 PARAMETER Experiment Name: At_Far-red-induction_P Parameter: Light Value: Far-red vs. White
  misc_feature: MA Experiment 20001247 PARAMETER Experiment Name: At_Far-red-induction_P Parameter: Organism Value: A. thaliana
  misc_feature: MA Experiment 20001247 PARAMETER Experiment Name: At_Far-red-induction_P Parameter: Plant Line Value: Columbia
  misc_feature: MA Experiment 20001247 PARAMETER Experiment Name: At_Far-red-induction_P Parameter: Timepoint (hr) Value: 1
  misc_feature: MA Experiment 20001247 PARAMETER Experiment Name: At_Far-red-induction_P Parameter: Tissue Value: Whole Plant
  misc_feature: MA Experiment ID: 20001248 Result: Down-regulated in Transcription
  misc_feature: MA Experiment 20001248 PARAMETER Experiment Name: At_Far-red-induction_P Parameter: Age (day) Value: 7
  misc_feature: MA Experiment 20001248 PARAMETER Experiment Name: At_Far-red-induction_P Parameter: Light Value: Far-red vs. White
  misc_feature: MA Experiment 20001248 PARAMETER Experiment Name: At_Far-red-induction_P Parameter: Organism Value: A. thaliana
  misc_feature: MA Experiment 20001248 PARAMETER Experiment Name: At_Far-red-induction_P Parameter: Plant Line Value: Columbia
  misc_feature: MA Experiment 20001248 PARAMETER Experiment Name: At_Far-red-induction_P Parameter: Timepoint (hr) Value: 4
  misc_feature: MA Experiment 20001248 PARAMETER Experiment Name: At_Far-red-induction_P Parameter: Tissue Value: Whole Plant
  misc_feature: MA Experiment ID: 20001559 Result: Down-regulated in Transcription
  misc_feature: MA Experiment 20001559 PARAMETER Experiment Name: At_Drought_Soil_Dry_P Parameter: Age (day) Value: 28
  misc_feature: MA Experiment 20001559 PARAMETER Experiment Name: At_Drought_Soil_Dry_P Parameter: Organism Value: A. thaliana
  misc_feature: MA Experiment 20001559 PARAMETER Experiment Name: At_Drought_Soil_Dry_P Parameter: Plant Line Value: WS
  misc_feature: MA Experiment 20001559 PARAMETER Experiment Name: At_Drought_Soil_Dry_P Parameter: Post Timepoint (hr) Value: 29
  misc_feature: MA Experiment 20001559 PARAMETER Experiment Name: At_Drought_Soil_Dry_P Parameter: Post-Treatment Value: Re-Water vs. No Drought
  misc_feature: MA Experiment 20001559 PARAMETER Experiment Name: At_Drought_Soil_Dry_P Parameter: Timepoint (day) Value: 14
  misc_feature: MA Experiment 20001559 PARAMETER Experiment Name: At_Drought_Soil_Dry_P Parameter: Treatment Value: Drought vs. No Drought
  misc_feature: MA Experiment ID: 20001757 Result: Up-regulated in Transcription
  misc_feature: MA Experiment 20001757 PARAMETER Experiment Name: At_50mM_NH4NO3_L-to-H_P Parameter: Timepoint (hr) Value: 6
  misc_feature: MA Experiment 20001757 PARAMETER Experiment Name: At_50mM_NH4NO3_L-to-H_P Parameter: Tissue Value: Leaf
  misc_feature: MA Experiment 20001757 PARAMETER Experiment Name: At_50mM_NH4NO3_L-to-H_P Parameter: Treatment Value: 50mM NH4NO3 vs 100mM Mannitol
ataatcctcaaaaatctcaactttatctcccaaaacacaaaacaaaaaaaaatggcttccactgctctctcaagcgccatcgtcggaacttcattcatccgtcgttccccagctccaatcagtctccgttcccttccatcagccaacacacaatccctcttcggtctcaaatcaggcaccgctcgtggtggacgtgtcacagccatggctacatacaaggtgagctagaggttgagtgtgacgacgacgtctacgttcttgatgctgctgaggaagctggaatcgatttgccttactcttgccgtgctggttcttgttcgagctgtgctggtaaagttgtgtctggatctgttgatcagtctgaccagagtttccttgatgatgaacagattggtgaagggtttgttctcacttgtgctgcttaccctacctctgatgttaccattgaaacccacaaagaagaagacattgtttaagcctcacctactcaccagcttttgatggtttaaaaatcatgtctttataaatttcacattttgggttgagtttgttgttactaaaaactattgttatctgttgttattgttcctggtttggctcaccatcaatcgatgacatt

SEQ ID NO: 79491 - protein, 157 aa, Arabidopsis thaliana
  peptide (1)..(157): Ceres Seq. ID no. 12651536
  misc_feature (72)..(144): Pfam Name: 2Fe-2S iron-sulfur cluster binding domain Pfam Description: 2Fe-2S iron-sulfur cluster binding domain
  misc_feature (72)..(157): Homolog of NCBI NO: 15219837 NR Description: ferrodoxin precursor; protein id: At1g60950.1, by cDNA: gi_11908075, supported by cDNA: gi_12642889, supported cDNA: gi_13265544, supported by cDNA: gi_20260269 [Arabidopsis
  misc_feature (72)..(157): Homolog of NCBI NO: 15220256 NR Description: ferredoxin precusor isolog; protein id: supported by cDNA: 20637., supported by cDNA: gi_16604415
  misc_feature (72)..(127): Homolog of NCBI NO: 16604416 NR Description: At1g10960/T19D16_12 [Arabidopsis thaliana]
  misc_feature (73)..(156): Homolog of NCBI NO: 119937 NR Description: Ferredoxin I, chloroplast precursor (Fd I)
  misc_feature (72)..(157): Homolog of NCBI NO: 81707 NR Description: ferredoxin [2Fe-2S] A, leaf - radish
  misc_feature (72)..(157): Homolog of NCBI NO: 947124 NR Description: ferredoxin component a1 [Raphanus sativus var.
  misc_feature (72)..(157): Homolog of NCBI NO: 119959 NR Description: FERREDOXIN, LEAF L-A
  misc_feature (72)..(156): Homolog of NCBI NO: 364015 NR Description: ferredoxin LFdA
  misc_feature (72)..(157): Homolog of NCBI NO: 119980 NR Description: FERREDOXIN >gi|65745|pir||FERP ferredoxin
  misc_feature (73)..(157): Homolog of NCBI NO: 631998 NR Description: ferredoxin [2Fe-2S] - parsley
NPQKSQLYLPKHKTKKNGFHCSLKRHRRNFIHPSFPSSNQSPFPSISQHTIPLRSQIRHRSWWTCHSHGYIQGELEVECDDDVYVLDAAEEAGIDLPYSCRAGSCSSCAGKVVSGSVDQSDQSFLDDEQIGEGFVLTCAAYPTSDVTIETHKEEDIV

SEQ ID NO: 79492 - protein, 79 aa, Arabidopsis thaliana
  peptide (1)..(79): Ceres Seq. ID no. 12651537
MLLRKLESICLTLAVLVLVRAVLVKLCLDLLISLTRVSLMMNRLVKGLFSLVLLTLPLMLPLKPTKKKTLFKPHLLTSF

SEQ ID NO: 79493 - DNA, 1520 bp, Arabidopsis thaliana
  misc_feature (1)..(1520): Ceres Seq. ID no. 12651552
  misc_feature: MA Experiment ID: 108434 Result: Down-regulated in Transcription
  misc_feature: MA Experiment 108434 PARAMETER Experiment Name: At_Root_Tips_cDNA_P Parameter: Tissue Value: Root Tips
  misc_feature: MA Experiment ID: 108463 Result: Up-regulated in Transcription
  misc_feature: MA Experiment 108463 PARAMETER Experiment Name: At_Germinating_Seeds_cDNA_P Parameter: Age (day) Value: 3 vs. 0
  misc_feature: MA Experiment 108463 PARAMETER Experiment Name: At_Germinating_Seeds_cDNA_P Parameter: Tissue Value: Germinating Seeds
  misc_feature: MA Experiment ID: 108464 Result: Up-regulated in Transcription
  misc_feature: MA Experiment 108464 PARAMETER Experiment Name: At_Germinating_Seeds_cDNA_P Parameter: Age (day) Value: 4 vs. 0
  misc_feature: MA Experiment 108464 PARAMETER Experiment Name: At_Germinating_Seeds_cDNA_P Parameter: Tissue Value: Germinating Seeds
  misc_feature: MA Experiment ID: 108579 Result: Up-regulated in Transcription
  misc_feature: MA Experiment 108579 PARAMETER Experiment Name: At_4deg_Cold_cDNA_P Parameter: Temperature (deg C) Value: 4 vs. 22
  misc_feature: MA Experiment 108579 PARAMETER Experiment Name: At_4deg_Cold_cDNA_P Parameter: Timepoint (hr) Value: 6
  misc_feature: MA Experiment 108579 PARAMETER Experiment Name: At_4deg_Cold_cDNA_P Parameter: Tissue Value: Aerial
  misc_feature: MA Experiment ID: 20000144 Result: Up-regulated in Transcription
  misc_feature: MA Experiment 20000144 PARAMETER Experiment Name: At_42deg_Heat_cDNA_P Parameter: Temperature (deg C) Value: 42 vs. 22
  misc_feature: MA Experiment 20000144 PARAMETER Experiment Name: At_42deg_Heat_cDNA_P Parameter: Timepoint (hr) Value: 1
  misc_feature: MA Experiment 20000144 PARAMETER Experiment Name: At_42deg_Heat_cDNA_P Parameter: Tissue Value: Aerial
  misc_feature: MA Experiment ID: 20000173 Result: Down-regulated in Transcription
  misc_feature: MA Experiment 20000173 PARAMETER Experiment Name: At_42deg_Heat_P Parameter: Age (day) Value: 14
  misc_feature: MA Experiment 20000173 PARAMETER Experiment Name: At_42deg_Heat_P Parameter: Organism Value: A. thaliana
  misc_feature: MA Experiment 20000173 PARAMETER Experiment Name: At_42deg_Heat_P Parameter: Plant Line Value: WS
  misc_feature: MA Experiment 20000173 PARAMETER Experiment Name: At_42deg_Heat_P Parameter: Temperature (deg C) Value: 42 vs. 22
  misc_feature: MA Experiment 20000173 PARAMETER Experiment Name: At_42deg_Heat_P Parameter: Timepoint (hr) Value: 6
  misc_feature: MA Experiment 20000173 PARAMETER Experiment Name: At_42deg_Heat_P Parameter: Tissue Value: Aerial
  misc_feature: MA Experiment ID: 20000184 Result: Down-regulated in Transcription
  misc_feature: MA Experiment 20000184 PARAMETER Experiment Name: At_Shoots__P Parameter: Age (day) Value: 7
  misc_feature: MA Experiment 20000184 PARAMETER Experiment Name: At_Shoots__P Parameter: Tissue Value: Shoots vs. Whole Plant
  misc_feature: MA Experiment ID: 20000224 Result: Up-regulated in Transcription
  misc_feature: MA Experiment ID: 20000227 Result: Down-regulated in Transcription
  misc_feature: MA Experiment 20000227 PARAMETER Experiment Name: At_Root-Tips-vs-Tops_P Parameter: Tissue Value: Root Tips vs. Root Tops
  misc_feature: MA Experiment ID: 20000234 Result: Down-regulated in Transcription
  misc_feature: MA Experiment 20000234 PARAMETER Experiment Name: At_Siliques_P Parameter: Age (day) Value: 21
  misc_feature: MA Experiment 20000234 PARAMETER Experiment Name: At_Siliques_P Parameter: Organism Value: A. thaliana
  misc_feature: MA Experiment 20000234 PARAMETER Experiment Name: At_Siliques_P Parameter: Plant Line Value: WS
  misc_feature: MA Experiment 20000234 PARAMETER Experiment Name: At_Siliques_P Parameter: Tissue Value: Less Than 5mm Siliques vs. Whole Plant
  misc_feature: MA Experiment ID: 20000235 Result: Down-regulated in Transcription
  misc_feature: MA Experiment 20000235 PARAMETER Experiment Name: At_Siliques_P Parameter: Age (day) Value: 21
  misc_feature: MA Experiment 20000235 PARAMETER Experiment Name: At_Siliques_P Parameter: Organism Value: A. thaliana
  misc_feature: MA Experiment 20000235 PARAMETER Experiment Name: At_Siliques_P Parameter: Plant Line Value: WS
  misc_feature: MA Experiment 20000235 PARAMETER Experiment Name: At_Siliques_P Parameter: Tissue Value: 5-10mm Siliques vs. Whole Plant
  misc_feature: MA Experiment ID: 20000265 Result: Down-regulated in Transcription
  misc_feature: MA Experiment 20000265 PARAMETER Experiment Name: At_Open_Flower_P Parameter: Age (day) Value: 21
  misc_feature: MA Experiment 20000265 PARAMETER Experiment Name: At_Open_Flower_P Parameter: Plant Line Value: WS
  misc_feature: MA Experiment 20000265 PARAMETER Experiment Name: At_Open_Flower_P Parameter: Tissue Value: Closed Flower vs. Whole Plant
  misc_feature: MA Experiment ID: 20000286 Result: Down-regulated in Transcription
  misc_feature: MA Experiment 20000286 PARAMETER Experiment Name: At_Open_Flower_P Parameter: Age (day) Value: 21
  misc_feature: MA Experiment 20000286 PARAMETER Experiment Name: At_Open_Flower_P Parameter: Plant Line Value: WS
  misc_feature: MA Experiment 20000286 PARAMETER Experiment Name: At_Open_Flower_P Parameter: Tissue Value: Half Open vs. Whole Plant
  misc_feature: MA Experiment ID: 20000437 Result: Up-regulated in Transcription
  misc_feature: MA Experiment 20000437 PARAMETER Experiment Name: At_Drought_P Parameter: Age (day) Value: 8
  misc_feature: MA Experiment 20000437 PARAMETER Experiment Name: At_Drought_P Parameter: Organism Value: A. thaliana
  misc_feature: MA Experiment 20000437 PARAMETER Experiment Name: At_Drought_P Parameter: Plant Line Value: WS
  misc_feature: MA Experiment 20000437 PARAMETER Experiment Name: At_Drought_P Parameter: Timepoint (hr) Value: 24
  misc_feature: MA Experiment 20000437 PARAMETER Experiment Name: At_Drought_P Parameter: Tissue Value: Whole Plant
  misc_feature: MA Experiment 20000437 PARAMETER Experiment Name: At_Drought_P Parameter: Treatment Value: Drought vs. No Drought
  misc_feature: MA Experiment ID: 20000495 Result: Up-regulated in Transcription
  misc_feature: MA Experiment 20000495 PARAMETER Experiment Name: At_Guard_Cells_P Parameter: Harvest Date Value: 8/2/2002
  misc_feature: MA Experiment 20000495 PARAMETER Experiment Name: At_Guard_Cells_P Parameter: Organism Value: A. thaliana
  misc_feature: MA Experiment 20000495 PARAMETER Experiment Name: At_Guard_Cells_P Parameter: Tissue Value: Guard Cells vs. Leaves
  misc_feature: MA Experiment ID: 20000496 Result: Up-regulated in Transcription
  misc_feature: MA Experiment 20000496 PARAMETER Experiment Name: At_Guard_Cells_P Parameter: Harvest Date Value: 7/19/2002
  misc_feature: MA Experiment 20000496 PARAMETER Experiment Name: At_Guard_Cells_P Parameter: Organism Value: Canola
  misc_feature: MA Experiment 20000496 PARAMETER Experiment Name: At_Guard_Cells_P Parameter: Tissue Value: Guard Cells vs. Leaves
acttatgctcttcatatcacatacaacaaactcatatatataaaaactttaaccttcgtatagcaacgatctagtagaaagcttatactaaaactttctgattctcttaatatggcggaggagtttaaagctacggcatcgatttgtggtggcggaggtggcgcgtggtggaactcgccaaggagcgttatgtctccttcggatcatttcttgtcaccatgcttcggagcggctatcacttccaatgattttagctcgcaagagaatcatctcaaatctaggatgacttgtacggacaacaacaacatcgttttcgggcagcgagaggcggattctgacagtggaggaagtaccgtgacgatggactcgacgttgcagatgatgggtctagggttttcctcaaattgttcttcagattggaaccaaaccattttacaagaagacttaaactcaagcttcataaggagctcacaagatcaagatcatggccaaggattcttatccacaactacttcaccttatatacttaatccagcttgttcttcatctccatcaacttcttcgtcctcaagcttgatacgaaccttttacgatcccgaaccaagtccatacaactttgtctccaccacaagtggttcaatcaacgatcctcaactttcttgggctaataagacaaatcctcatcatcaagtagcttatggactaattaacagcttctctaacaacgcaaactctcgacccttttggaattcttcatcaaccactaacttaaacaacacgacgccgagcaattttgtaaccactccgcagataatatctactcgtttggaggacaaaaccaagaatctgaagacaagagctcagagtgagtctttgaagagagcaaaggataatgaatctgcggcgaagaaaccgagagtcaccacgccttcaccgttgccaactttcaaggtgagaaaagagaatctaagggaccagataacttcattacaacaactagtttcacctttcggaaagacagatactgcatctgttctccaagaagctatagagtacatcaagttccttcacgaccaagtcactgttctaagcactccatacatgaaacaaggtgcctcgaaccaacaacaacagcagatatctggtaaatcgaagagtcaagatgaaaatgagaatcacgaactaagaggacatggtctatgtctcgtcccaatatcaagcacgtttccggtggctaacgaaacaacagccgatttttggacaccaacgtttgggggcaacaatttcaggtgattaaagagagagggttgtggttgtcaagacggatgggaacatatgctaaattcagcttggagactctaaagcataacaataatttttaatgtattttcttcttctttcaatattttaaggggggtttattgctgaatttagcatatatgggttgtttttatgttgaataaccttttgttcctgtcattgttcttgaatatatatatatacatatttttgtcgttggt

SEQ ID NO: 79494 - protein, 393 aa, Arabidopsis thaliana; identical to SEQ ID NO: 43463
  peptide (1)..(393): Ceres Seq. ID no. 12651553
  misc_feature (282)..(320): Pfam Name: Helix-loop-helix DNA-binding domain Pfam Description: Helix-loop-helix DNA-binding domain
  misc_feature (1)..(393): Homolog of NCBI NO: 18407276 NR Description: expressed protein; protein id: At1g61660.1, by cDNA: 159557., supported by cDNA: gi_14190498 [Arabidopsis >gi|14190499|gb|AAK55730.1|AF380649_1 At1g61660/T13M11_21
  misc_feature (1)..(393): Homolog of NCBI NO: 21553730 NR Description: unknown [Arabidopsis thaliana]
  misc_feature (1)..(343): Homolog of NCBI NO: 30696595 NR Description: expressed protein [Arabidopsis thaliana]
  misc_feature (58)..(325): Homolog of NCBI NO: 25404333 NR Description: hypothetical protein T13M11.1 [imported] -
  misc_feature (340)..(393): Homolog of NCBI NO: 25404333 NR Description: hypothetical protein T13M11.1 [imported] -
  misc_feature (202)..(393): Homolog of NCBI NO: 9294343 NR Description: gene_id:F3H11.2~unknown protein [Arabidopsis
  misc_feature (202)..(393): Homolog of NCBI NO: 15232315 NR Description: hypothetical protein; protein id: At3g20640.1 thaliana] >gi|26451163|dbj|BAC42685.1| putative bHLH
  misc_feature (252)..(323): Homolog of NCBI NO: 34910130 NR Description: B1070A12.8 [Oryza sativa (japonica
  misc_feature (341)..(393): Homolog of NCBI NO: 34910130 NR Description: B1070A12.8 [Oryza sativa (japonica
  misc_feature (244)..(375): Homolog of NCBI NO: 15234636 NR Description: putative protein; protein id: At4g05170.1

SEQ ID NO: 79495 - protein, 367 aa, Arabidopsis thaliana; identical to SEQ ID NO: 43464
  peptide (1)..(367): Ceres Seq. ID no. 12651554
  misc_feature (256)..(294): Pfam Name: Helix-loop-helix DNA-binding domain Pfam Description: Helix-loop-helix DNA-binding domain
  misc_feature (1)..(367): Homolog of NCBI NO: 18407276 NR Description: expressed protein; protein id: At1g61660.1, by cDNA: 159557., supported by cDNA: gi_14190498 [Arabidopsis >gi|14190499|gb|AAK55730.1|AF380649_1 At1g61660/T13M11_21
  misc_feature (1)..(367): Homolog of NCBI NO: 21553730 NR Description: unknown [Arabidopsis thaliana]
  misc_feature (1)..(317): Homolog of NCBI NO: 30696595 NR Description: expressed protein [Arabidopsis thaliana]
  misc_feature (32)..(299): Homolog of NCBI NO: 25404333 NR Description: hypothetical protein T13M11.1 [imported] -
  misc_feature (314)..(367): Homolog of NCBI NO: 25404333 NR Description: hypothetical protein T13M11.1 [imported] -
  misc_feature (176)..(367): Homolog of NCBI NO: 9294343 NR Description: gene_id:F3H11.2~unknown protein [Arabidopsis
  misc_feature (176)..(367): Homolog of NCBI NO: 15232315 NR Description: hypothetical protein; protein id: At3g20640.1 thaliana] >gi|26451163|dbj|BAC42685.1| putative bHLH
  misc_feature (226)..(297): Homolog of NCBI NO: 34910130 NR Description: B1070A12.8 [Oryza sativa (japonica
  misc_feature (315)..(367): Homolog of NCBI NO: 34910130 NR Description: B1070A12.8 [Oryza sativa (japonica
  misc_feature (218)..(349): Homolog of NCBI NO: 15234636 NR Description: putative protein; protein id: At4g05170.1

SEQ ID NO: 79496 - protein, 336 aa, Arabidopsis thaliana; identical to SEQ ID NO: 43465
  peptide (1)..(336): Ceres Seq. ID no. 12651555
  misc_feature (225)..(263): Pfam Name: Helix-loop-helix DNA-binding domain Pfam Description: Helix-loop-helix DNA-binding domain
  misc_feature (1)..(336): Homolog of NCBI NO: 18407276 NR Description: expressed protein; protein id: At1g61660.1, by cDNA: 159557., supported by cDNA: gi_14190498 [Arabidopsis >gi|14190499|gb|AAK55730.1|AF380649_1 At1g61660/T13M11_21
  misc_feature (1)..(336): Homolog of NCBI NO: 21553730 NR Description: unknown [Arabidopsis thaliana]
  misc_feature (1)..(286): Homolog of NCBI NO: 30696595 NR Description: expressed protein [Arabidopsis thaliana]
  misc_feature (1)..(268): Homolog of NCBI NO: 25404333 NR Description: hypothetical protein T13M11.1 [imported] -
  misc_feature (283)..(336): Homolog of NCBI NO: 25404333 NR Description: hypothetical protein T13M11.1 [imported] -
  misc_feature (145)..(336): Homolog of NCBI NO: 9294343 NR Description: gene_id:F3H11.2~unknown protein [Arabidopsis
  misc_feature (145)..(336): Homolog of NCBI NO: 15232315 NR Description: hypothetical protein; protein id: At3g20640.1 thaliana] >gi|26451163|dbj|BAC42685.1| putative bHLH
  misc_feature (195)..(266): Homolog of NCBI NO: 34910130 NR Description: B1070A12.8 [Oryza sativa (japonica
  misc_feature (284)..(336): Homolog of NCBI NO: 34910130 NR Description: B1070A12.8 [Oryza sativa (japonica
  misc_feature (187)..(318): Homolog of NCBI NO: 15234636 NR Description: putative protein; protein id: At4g05170.1

SEQ ID NO: 79497 - DNA, 686 bp, Arabidopsis thaliana
  misc_feature (1)..(686): Ceres Seq. ID no. 12651560
  misc_feature: MA Experiment ID: 20000173 Result: Down-regulated in Transcription
  misc_feature: MA Experiment 20000173 PARAMETER Experiment Name: At_42deg_Heat_P Parameter: Age (day) Value: 14
  misc_feature: MA Experiment 20000173 PARAMETER Experiment Name: At_42deg_Heat_P Parameter: Organism Value: A. thaliana
  misc_feature: MA Experiment 20000173 PARAMETER Experiment Name: At_42deg_Heat_P Parameter: Plant Line Value: WS
  misc_feature: MA Experiment 20000173 PARAMETER Experiment Name: At_42deg_Heat_P Parameter: Temperature (deg C) Value: 42 vs. 22
  misc_feature: MA Experiment 20000173 PARAMETER Experiment Name: At_42deg_Heat_P Parameter: Timepoint (hr) Value: 6
  misc_feature: MA Experiment 20000173 PARAMETER Experiment Name: At_42deg_Heat_P Parameter: Tissue Value: Aerial
  misc_feature: MA Experiment ID: 20000184 Result: Down-regulated in Transcription
  misc_feature: MA Experiment 20000184 PARAMETER Experiment Name: At_Shoots__P Parameter: Age (day) Value: 7
  misc_feature: MA Experiment 20000184 PARAMETER Experiment Name: At_Shoots__P Parameter: Tissue Value: Shoots vs. Whole Plant
  misc_feature: MA Experiment ID: 20000227 Result: Down-regulated in Transcription
  misc_feature: MA Experiment 20000227 PARAMETER Experiment Name: At_Root-Tips-vs-Tops_P Parameter: Tissue Value: Root Tips vs. Root Tops
  misc_feature: MA Experiment ID: 20000234 Result: Down-regulated in Transcription
  misc_feature: MA Experiment 20000234 PARAMETER Experiment Name: At_Siliques_P Parameter: Age (day) Value: 21
  misc_feature: MA Experiment 20000234 PARAMETER Experiment Name: At_Siliques_P Parameter: Organism Value: A. thaliana
  misc_feature: MA Experiment 20000234 PARAMETER Experiment Name: At_Siliques_P Parameter: Plant Line Value: WS
  misc_feature: MA Experiment 20000234 PARAMETER Experiment Name: At_Siliques_P Parameter: Tissue Value: Less Than 5mm Siliques vs. Whole Plant
  misc_feature: MA Experiment ID: 20000235 Result: Down-regulated in Transcription
  misc_feature: MA Experiment 20000235 PARAMETER Experiment Name: At_Siliques_P Parameter: Age (day) Value: 21
  misc_feature: MA Experiment 20000235 PARAMETER Experiment Name: At_Siliques_P Parameter: Organism Value: A. thaliana
  misc_feature: MA Experiment 20000235 PARAMETER Experiment Name: At_Siliques_P Parameter: Plant Line Value: WS
  misc_feature: MA Experiment 20000235 PARAMETER Experiment Name: At_Siliques_P Parameter: Tissue Value: 5-10mm Siliques vs. Whole Plant
  misc_feature: MA Experiment ID: 20000265 Result: Down-regulated in Transcription
  misc_feature: MA Experiment 20000265 PARAMETER Experiment Name: At_Open_Flower_P Parameter: Age (day) Value: 21
  misc_feature: MA Experiment 20000265 PARAMETER Experiment Name: At_Open_Flower_P Parameter: Plant Line Value: WS
  misc_feature: MA Experiment 20000265 PARAMETER Experiment Name: At_Open_Flower_P Parameter: Tissue Value: Closed Flower vs. Whole Plant
  misc_feature: MA Experiment ID: 20000286 Result: Down-regulated in Transcription
  misc_feature: MA Experiment 20000286 PARAMETER Experiment Name: At_Open_Flower_P Parameter: Age (day) Value: 21
  misc_feature: MA Experiment 20000286 PARAMETER Experiment Name: At_Open_Flower_P Parameter: Plant Line Value: WS
  misc_feature: MA Experiment 20000286 PARAMETER Experiment Name: At_Open_Flower_P Parameter: Tissue Value: Half Open vs. Whole Plant
  misc_feature: MA Experiment ID: 20000437 Result: Up-regulated in Transcription
  misc_feature: MA Experiment 20000437 PARAMETER Experiment Name: At_Drought_P Parameter: Age (day) Value: 8
  misc_feature: MA Experiment 20000437 PARAMETER Experiment Name: At_Drought_P Parameter: Organism Value: A. thaliana
  misc_feature: MA Experiment 20000437 PARAMETER Experiment Name: At_Drought_P Parameter: Plant Line Value: WS
  misc_feature: MA Experiment 20000437 PARAMETER Experiment Name: At_Drought_P Parameter: Timepoint (hr) Value: 24
  misc_feature: MA Experiment 20000437 PARAMETER Experiment Name: At_Drought_P Parameter: Tissue Value: Whole Plant
  misc_feature: MA Experiment 20000437 PARAMETER Experiment Name: At_Drought_P Parameter: Treatment Value: Drought vs. No Drought
  misc_feature: MA Experiment ID: 20000495 Result: Up-regulated in Transcription
  misc_feature: MA Experiment 20000495 PARAMETER Experiment Name: At_Guard_Cells_P Parameter: Harvest Date Value: 8/2/2002
  misc_feature: MA Experiment 20000495 PARAMETER Experiment Name: At_Guard_Cells_P Parameter: Organism Value: A. thaliana
  misc_feature: MA Experiment 20000495 PARAMETER Experiment Name: At_Guard_Cells_P Parameter: Tissue Value: Guard Cells vs. Leaves
  misc_feature: MA Experiment ID: 20000496 Result: Up-regulated in Transcription
  misc_feature: MA Experiment 20000496 PARAMETER Experiment Name: At_Guard_Cells_P Parameter: Harvest Date Value: 7/19/2002
  misc_feature: MA Experiment 20000496 PARAMETER Experiment Name: At_Guard_Cells_P Parameter: Organism Value: Canola
  misc_feature: MA Experiment 20000496 PARAMETER Experiment Name: At_Guard_Cells_P Parameter: Tissue Value: Guard Cells vs. Leaves
ccgttgccaactttcaaggtgagaaaagagaatctaagggaccagataacttcattacaacaactagtttcacctttcggaaagacagatactgcatctgttctccaagaagctatagagtacatcaagttccttcacgaccaagtcactgttctaagcactccatacatgaaacaaggtgcctcgaaccaacaacaacagcaggttcaatacacgatctagtgttttagttttgtccaagttggagtcttcgtgctataatcatggttaaataagtactaatttcagtatggattcatgtagatatctggtaaatcgaagagtcaagatgaaaatgagaatcacgaactaagaggacatggtctatgtctcgtcccaatatcaagcacgtttccggtggctaacgaaacaacagccgatttttggacaccaacgtttgggggcaacaatttcaggtgattaaagagagagggttgtggttgtcaagacggatgggaacatatgctaaattcagcttggagactctaaagcataacaataatttttaatgtattttcttcttctttcaatattttaaggggggtttattgctgaatttagcatatatgggttgtttttatgttgaataaccttttgttcctgtcattgttcttgaatatatatatatacatatttttgtcgttggt

SEQ ID NO: 79498 - protein, 75 aa, Arabidopsis thaliana
  peptide (1)..(75): Ceres Seq. ID no. 12651561
VANFQGEKRESKGPDNFITTTSFTFRKDRYCICSPRSYRVHQVPSRPSHCSKHSIHETRCLEPTTTAGSIHDLVF

SEQ ID NO: 79499 - protein, 73 aa, Arabidopsis thaliana
  peptide (1)..(73): Ceres Seq. ID no. 12651562
  misc_feature (8)..(46): Pfam Name: Helix-loop-helix DNA-binding domain Pfam Description: Helix-loop-helix DNA-binding domain
  misc_feature (1)..(51): Homolog of NCBI NO: 25404333 NR Description: hypothetical protein T13M11.1 [imported] -
  misc_feature (1)..(67): Homolog of NCBI NO: 15232315 NR Description: hypothetical protein; protein id: At3g20640.1 thaliana] >gi|26451163|dbj|BAC42685.1| putative bHLH
  misc_feature (1)..(73): Homolog of NCBI NO: 30696595 NR Description: expressed protein [Arabidopsis thaliana]
  misc_feature (1)..(67): Homolog of NCBI NO: 9294343 NR Description: gene_id:F3H11.2~unknown protein [Arabidopsis
  misc_feature (1)..(69): Homolog of NCBI NO: 18407276 NR Description: expressed protein; protein id: At1g61660.1, by cDNA: 159557., supported by cDNA: gi_14190498 [Arabidopsis >gi|14190499|gb|AAK55730.1|AF380649_1 At1g61660/T13M11_21
  misc_feature (1)..(69): Homolog of NCBI NO: 21553730 NR Description: unknown [Arabidopsis thaliana]
  misc_feature (1)..(49): Homolog of NCBI NO: 34910130 NR Description: B1070A12.8 [Oryza sativa (japonica
  misc_feature (45)..(73): Homolog of NCBI NO: 18407276 NR Description: expressed protein; protein id: At1g61660.1, by cDNA: 159557., supported by cDNA: gi_14190498 [Arabidopsis >gi|14190499|gb|AAK55730.1|AF380649_1 At1g61660/T13M11_21
  misc_feature (45)..(73): Homolog of NCBI NO: 21553730 NR Description: unknown [Arabidopsis thaliana]
  misc_feature (4)..(73): Homolog of NCBI NO: 33111977 NR Description: putative bHLH133 transcription factor
PLPTFKVRKENLRDQITSLQQLVSPFGKTDTASVLQEAIEYIKFLHDQVTVLSTPYMKQGASNQQQQQVQYTI

SEQ ID NO: 79500 - DNA, 2521 bp, Arabidopsis thaliana
  misc_feature (1)..(2521): Ceres Seq. ID no. 12651567
  misc_feature: MA Experiment ID: 20000182 Result: Up-regulated in Transcription
  misc_feature: MA Experiment 20000182 PARAMETER Experiment Name: At_2mM_SA_P Parameter: Age (day) Value: 14
  misc_feature: MA Experiment 20000182 PARAMETER Experiment Name: At_2mM_SA_P Parameter: Organism Value: A. thaliana
  misc_feature: MA Experiment 20000182 PARAMETER Experiment Name: At_2mM_SA_P Parameter: Plant Line Value: WS
  misc_feature: MA Experiment 20000182 PARAMETER Experiment Name: At_2mM_SA_P Parameter: Timepoint (hr) Value: 6
  misc_feature: MA Experiment 20000182 PARAMETER Experiment Name: At_2mM_SA_P Parameter: Tissue Value: Aerial
  misc_feature: MA Experiment 20000182 PARAMETER Experiment Name: At_2mM_SA_P Parameter: Treatment Value: 2mM SA vs. No Treatment
  misc_feature: MA Experiment ID: 20000184 Result: Down-regulated in Transcription
  misc_feature: MA Experiment 20000184 PARAMETER Experiment Name: At_Shoots__P Parameter: Age (day) Value: 7
  misc_feature: MA Experiment 20000184 PARAMETER Experiment Name: At_Shoots__P Parameter: Tissue Value: Shoots vs. Whole Plant
  misc_feature: MA Experiment ID: 20000185 Result: Down-regulated in Transcription
  misc_feature: MA Experiment 20000185 PARAMETER Experiment Name: At_Roots__P Parameter: Age (day) Value: 7 vs. 21
  misc_feature: MA Experiment 20000185 PARAMETER Experiment Name: At_Roots__P Parameter: Organism Value: A. thaliana
  misc_feature: MA Experiment 20000185 PARAMETER Experiment Name: At_Roots__P Parameter: Tissue Value: Roots vs. Whole Plant
  misc_feature: MA Experiment ID: 20000227 Result: Down-regulated in Transcription
  misc_feature: MA Experiment 20000227 PARAMETER Experiment Name: At_Root-Tips-vs-Tops_P Parameter: Tissue Value: Root Tips vs. Root Tops
  misc_feature: MA Experiment ID: 20000234 Result: Down-regulated in Transcription
  misc_feature: MA Experiment 20000234 PARAMETER Experiment Name: At_Siliques_P Parameter: Age (day) Value: 21
  misc_feature: MA Experiment 20000234 PARAMETER Experiment Name: At_Siliques_P Parameter: Organism Value: A. thaliana
  misc_feature: MA Experiment 20000234 PARAMETER Experiment Name: At_Siliques_P Parameter: Plant Line Value: WS
  misc_feature: MA Experiment 20000234 PARAMETER Experiment Name: At_Siliques_P Parameter: Tissue Value: Less Than 5mm Siliques vs. Whole Plant
  misc_feature: MA Experiment ID: 20000264 Result: Down-regulated in Transcription
  misc_feature: MA Experiment 20000264 PARAMETER Experiment Name: At_Open_Flower_P Parameter: Age (day) Value: 21
  misc_feature: MA Experiment 20000264 PARAMETER Experiment Name: At_Open_Flower_P Parameter: Plant Line Value: WS
  misc_feature: MA Experiment 20000264 PARAMETER Experiment Name: At_Open_Flower_P Parameter: Tissue Value: Open Flower vs. Whole Plant
  misc_feature: MA Experiment ID: 20000265 Result: Down-regulated in Transcription
  misc_feature: MA Experiment 20000265 PARAMETER Experiment Name: At_Open_Flower_P Parameter: Age (day) Value: 21
  misc_feature: MA Experiment 20000265 PARAMETER Experiment Name: At_Open_Flower_P Parameter: Plant Line Value: WS
  misc_feature: MA Experiment 20000265 PARAMETER Experiment Name: At_Open_Flower_P Parameter: Tissue Value: Closed Flower vs. Whole Plant
  misc_feature: MA Experiment ID: 20000286 Result: Down-regulated in Transcription
  misc_feature: MA Experiment 20000286 PARAMETER Experiment Name: At_Open_Flower_P Parameter: Age (day) Value: 21
  misc_feature: MA Experiment 20000286 PARAMETER Experiment Name: At_Open_Flower_P Parameter: Plant Line Value: WS
  misc_feature: MA Experiment 20000286 PARAMETER Experiment Name: At_Open_Flower_P Parameter: Tissue Value: Half Open vs. Whole Plant
  misc_feature: MA Experiment ID: 20000438 Result: Down-regulated in Transcription
  misc_feature: MA Experiment 20000438 PARAMETER Experiment Name: At_Shoots__P Parameter: Age (day) Value: 14
  misc_feature: MA Experiment 20000438 PARAMETER Experiment Name: At_Shoots__P Parameter: Tissue Value: Shoots vs. Whole Plant
  misc_feature: MA Experiment ID: 20000439 Result: Down-regulated in Transcription
  misc_feature: MA Experiment 20000439 PARAMETER Experiment Name: At_Roots__P Parameter: Age (day) Value: 14 vs. 21
  misc_feature: MA Experiment 20000439 PARAMETER Experiment Name: At_Roots__P Parameter: Organism Value: A. thaliana
  misc_feature: MA Experiment 20000439 PARAMETER Experiment Name: At_Roots__P Parameter: Tissue Value: Roots vs. Whole Plant
  misc_feature: MA Experiment ID: 20000527 Result: Up-regulated in Transcription
  misc_feature: MA Experiment 20000527 PARAMETER Experiment Name: At_10percent_PEG_P Parameter: Age (day) Value: 20
  misc_feature: MA Experiment 20000527 PARAMETER Experiment Name: At_10percent_PEG_P Parameter: Organism Value: A. thaliana
  misc_feature: MA Experiment 20000527 PARAMETER Experiment Name: At_10percent_PEG_P Parameter: Plant Line Value: WS
  misc_feature: MA Experiment 20000527 PARAMETER Experiment Name: At_10percent_PEG_P Parameter: Timepoint (day) Value: 20
  misc_feature: MA Experiment 20000527 PARAMETER Experiment Name: At_10percent_PEG_P Parameter: Tissue Value: Whole Plant
  misc_feature: MA Experiment 20000527 PARAMETER Experiment Name: At_10percent_PEG_P Parameter: Treatment Value: 10percent PEG vs. No Treatment
  misc_feature: MA Experiment ID: 20000573 Result: Up-regulated in Transcription
  misc_feature: MA Experiment 20000573 PARAMETER Experiment Name: At_100uM_ABA_Mutants__P Parameter: Organism Value: A. thaliana
  misc_feature: MA Experiment 20000573 PARAMETER Experiment Name: At_100uM_ABA_Mutants__P Parameter: Plant Line Value: CS22 vs. Ler wt
  misc_feature: MA Experiment 20000573 PARAMETER Experiment Name: At_100uM_ABA_Mutants__P Parameter: Timepoint (hr) Value: N/A
  misc_feature: MA Experiment 20000573 PARAMETER Experiment Name: At_100uM_ABA_Mutants__P Parameter: Tissue Value: Whole Plant
  misc_feature: MA Experiment 20000573 PARAMETER Experiment Name: At_100uM_ABA_Mutants__P Parameter: Treatment Value: None
  misc_feature: MA Experiment ID: 20000574 Result: Up-regulated in Transcription
  misc_feature: MA Experiment 20000574 PARAMETER Experiment Name: At_100uM_ABA_Mutants__P Parameter: Organism Value: A. thaliana
  misc_feature: MA Experiment 20000574 PARAMETER Experiment Name: At_100uM_ABA_Mutants__P Parameter: Plant Line Value: CS23 vs. Ler wt
  misc_feature: MA Experiment 20000574 PARAMETER Experiment Name: At_100uM_ABA_Mutants__P Parameter: Timepoint (hr) Value: N/A
  misc_feature: MA Experiment 20000574 PARAMETER Experiment Name: At_100uM_ABA_Mutants__P Parameter: Tissue Value: Whole Plant
  misc_feature: MA Experiment 20000574 PARAMETER Experiment Name: At_100uM_ABA_Mutants__P Parameter: Treatment Value: None
  misc_feature: MA Experiment ID: 20000794 Result: Down-regulated in Transcription
  misc_feature: MA Experiment 20000794 PARAMETER Experiment Name: At_Petals_P Parameter: Age (day) Value: 23-25 days
  misc_feature: MA Experiment 20000794 PARAMETER Experiment Name: At_Petals_P Parameter: Plant Line Value: WS
  misc_feature: MA Experiment 20000794 PARAMETER Experiment Name: At_Petals_P Parameter: Tissue Value: Petals vs. Whole plant
  misc_feature: MA Experiment ID: 20001247 Result: Up-regulated in Transcription
  misc_feature: MA Experiment 20001247 PARAMETER Experiment Name: At_Far-red-induction_P Parameter: Age (day) Value: 7
  misc_feature: MA Experiment 20001247 PARAMETER Experiment Name: At_Far-red-induction_P Parameter: Light Value: Far-red vs. White
  misc_feature: MA Experiment 20001247 PARAMETER Experiment Name: At_Far-red-induction_P Parameter: Organism Value: A. thaliana
  misc_feature: MA Experiment 20001247 PARAMETER Experiment Name: At_Far-red-induction_P Parameter: Plant Line Value: Columbia
  misc_feature: MA Experiment 20001247 PARAMETER Experiment Name: At_Far-red-induction_P Parameter: Timepoint (hr) Value: 1
  misc_feature: MA Experiment 20001247 PARAMETER Experiment Name: At_Far-red-induction_P Parameter: Tissue Value: Whole Plant
  misc_feature: MA Experiment ID: 20001555 Result: Up-regulated in Transcription
  misc_feature: MA Experiment 20001555 PARAMETER Experiment Name: At_Drought_Soil_Dry_P Parameter: Age (day) Value: 24
  misc_feature: MA Experiment 20001555 PARAMETER Experiment Name: At_Drought_Soil_Dry_P Parameter: Organism Value: A. thaliana
  misc_feature: MA Experiment 20001555 PARAMETER Experiment Name: At_Drought_Soil_Dry_P Parameter: Plant Line Value: WS
  misc_feature: MA Experiment 20001555 PARAMETER Experiment Name: At_Drought_Soil_Dry_P Parameter: Post Timepoint (hr) Value: None
  misc_feature: MA Experiment 20001555 PARAMETER Experiment Name: At_Drought_Soil_Dry_P Parameter: Post-Treatment Value: None
  misc_feature: MA Experiment 20001555 PARAMETER Experiment Name: At_Drought_Soil_Dry_P Parameter: Timepoint (day) Value: 10
  misc_feature: MA Experiment 20001555 PARAMETER Experiment Name: At_Drought_Soil_Dry_P Parameter: Treatment Value: Drought vs. No Drought
  misc_feature: MA Experiment ID: 20001556 Result: Up-regulated in Transcription
  misc_feature: MA Experiment 20001556 PARAMETER Experiment Name: At_Drought_Soil_Dry_P Parameter: Age (day) Value: 26
  misc_feature: MA Experiment 20001556 PARAMETER Experiment Name: At_Drought_Soil_Dry_P Parameter: Organism Value: A. thaliana
  misc_feature: MA Experiment 20001556 PARAMETER Experiment Name: At_Drought_Soil_Dry_P Parameter: Plant Line Value: WS
  misc_feature: MA Experiment 20001556 PARAMETER Experiment Name: At_Drought_Soil_Dry_P Parameter: Post Timepoint (hr) Value: None
  misc_feature: MA Experiment 20001556 PARAMETER Experiment Name: At_Drought_Soil_Dry_P Parameter: Post-Treatment Value: None
  misc_feature: MA Experiment 20001556 PARAMETER Experiment Name: At_Drought_Soil_Dry_P Parameter: Timepoint (day) Value: 12
  misc_feature: MA Experiment 20001556 PARAMETER Experiment Name: At_Drought_Soil_Dry_P Parameter: Treatment Value: Drought vs. No Drought
  misc_feature: MA Experiment ID: 20001558 Result: Up-regulated in Transcription
  misc_feature: MA Experiment 20001558 PARAMETER Experiment Name: At_Drought_Soil_Dry_P Parameter: Age (day) Value: 27
  misc_feature: MA Experiment 20001558 PARAMETER Experiment Name: At_Drought_Soil_Dry_P Parameter: Organism Value: A. thaliana
  misc_feature: MA Experiment 20001558 PARAMETER Experiment Name: At_Drought_Soil_Dry_P Parameter: Plant Line Value: WS
  misc_feature: MA Experiment 20001558 PARAMETER Experiment Name: At_Drought_Soil_Dry_P Parameter: Post Timepoint (hr) Value: 6
  misc_feature: MA Experiment 20001558 PARAMETER Experiment Name: At_Drought_Soil_Dry_P Parameter: Post-Treatment Value: Re-Water vs. No Drought
  misc_feature: MA Experiment 20001558 PARAMETER Experiment Name: At_Drought_Soil_Dry_P Parameter: Timepoint (day) Value: 13
  misc_feature: MA Experiment 20001558 PARAMETER Experiment Name: At_Drought_Soil_Dry_P Parameter: Treatment Value: Drought vs. No Drought
  misc_feature: MA Experiment ID: 20001773 Result: Up-regulated in Transcription
  misc_feature: MA Experiment 20001773 PARAMETER Experiment Name: At_Far-red-enriched-adult_P Parameter: Age (day) Value: 30
  misc_feature: MA Experiment 20001773 PARAMETER Experiment Name: At_Far-red-enriched-adult_P Parameter: Light Value: Far-red enriched vs. White
  misc_feature: MA Experiment 20001773 PARAMETER Experiment Name: At_Far-red-enriched-adult_P Parameter: Organism Value: A. thaliana
  misc_feature: MA Experiment 20001773 PARAMETER Experiment Name: At_Far-red-enriched-adult_P Parameter: Plant Line Value: Columbia
  misc_feature: MA Experiment 20001773 PARAMETER Experiment Name: At_Far-red-enriched-adult_P Parameter: Timepoint (hr) Value: 48
  misc_feature: MA Experiment 20001773 PARAMETER Experiment Name: At_Far-red-enriched-adult_P Parameter: Tissue Value: Aerial
  misc_feature: MA Experiment ID: 20001904 Result: Up-regulated in Transcription
  misc_feature: MA Experiment 20001904 PARAMETER Experiment Name: At_Drought_Reproduction_P Parameter: Age (day) Value: 37
  misc_feature: MA Experiment 20001904 PARAMETER Experiment Name: At_Drought_Reproduction_P Parameter: Organism Value: A. thaliana
  misc_feature: MA Experiment 20001904 PARAMETER Experiment Name: At_Drought_Reproduction_P Parameter: Plant Line Value: WS
  misc_feature: MA Experiment 20001904 PARAMETER Experiment Name: At_Drought_Reproduction_P Parameter: Timepoint (day) Value: 7
  misc_feature: MA Experiment 20001904 PARAMETER Experiment Name: At_Drought_Reproduction_P Parameter: Tissue Value: Rosettes
  misc_feature: MA Experiment 20001904 PARAMETER Experiment Name: At_Drought_Reproduction_P Parameter: Treatment Value: Drought vs. No Drought
  misc_feature: MA Experiment ID: 20001905 Result: Up-regulated in Transcription
  misc_feature: MA Experiment 20001905 PARAMETER Experiment Name: At_Drought_Reproduction_P Parameter: Age (day) Value: 40
  misc_feature: MA Experiment 20001905 PARAMETER Experiment Name: At_Drought_Reproduction_P Parameter: Organism Value: A. thaliana
  misc_feature: MA Experiment 20001905 PARAMETER Experiment Name: At_Drought_Reproduction_P Parameter: Plant Line Value: WS
  misc_feature: MA Experiment 20001905 PARAMETER Experiment Name: At_Drought_Reproduction_P Parameter: Timepoint (day) Value: 10
  misc_feature: MA Experiment 20001905 PARAMETER Experiment Name: At_Drought_Reproduction_P Parameter: Tissue Value: Rosettes
  misc_feature: MA Experiment 20001905 PARAMETER Experiment Name: At_Drought_Reproduction_P Parameter: Treatment Value: Drought vs. No Drought
  misc_feature: MA Experiment ID: 20001910 Result: Up-regulated in Transcription
  misc_feature: MA Experiment 20001910 PARAMETER Experiment Name: At_Drought_Reproduction_P Parameter: Age (day) Value: 37
  misc_feature: MA Experiment 20001910 PARAMETER Experiment Name: At_Drought_Reproduction_P Parameter: Organism Value: A. thaliana
  misc_feature: MA Experiment 20001910 PARAMETER Experiment Name: At_Drought_Reproduction_P Parameter: Plant Line Value: WS
  misc_feature: MA Experiment 20001910 PARAMETER Experiment Name: At_Drought_Reproduction_P Parameter: Timepoint (day) Value: 7
  misc_feature: MA Experiment 20001910 PARAMETER Experiment Name: At_Drought_Reproduction_P Parameter: Tissue Value: Flowers
  misc_feature: MA Experiment 20001910 PARAMETER Experiment Name: At_Drought_Reproduction_P Parameter: Treatment Value: Drought vs. No Drought
  misc_feature: MA Experiment ID: 20001911 Result: Up-regulated in Transcription
  misc_feature: MA Experiment 20001911 PARAMETER Experiment Name: At_Drought_Reproduction_P Parameter: Age (day) Value: 40
  misc_feature: MA Experiment 20001911 PARAMETER Experiment Name: At_Drought_Reproduction_P Parameter: Organism Value: A. thaliana
  misc_feature: MA Experiment 20001911 PARAMETER Experiment Name: At_Drought_Reproduction_P Parameter: Plant Line Value: WS
  misc_feature: MA Experiment 20001911 PARAMETER Experiment Name: At_Drought_Reproduction_P Parameter: Timepoint (day) Value: 10
  misc_feature: MA Experiment 20001911 PARAMETER Experiment Name: At_Drought_Reproduction_P Parameter: Tissue Value: Flowers
  misc_feature: MA Experiment 20001911 PARAMETER Experiment Name: At_Drought_Reproduction_P Parameter: Treatment Value: Drought vs. No Drought
acaagagaatcaagaacaatgaaaaatttaaccagtttcgtaattgttatcttactacaaagcttattgtttcatgtatatggtcgtcatcaaagttcttcgaagaacattttagtagattcatctccatttccttctgatttcctctttggtacagcttcttccgcttaccagtatgaaggtgcgttcttgactgatggaaaaagtttgaacaattgggatgtctttacgcataaaaatcctggtatgtattttattttggtttccatttggtttattttctatttgaaatagtttaagattagtttaagatttttatttttttttaattcacttattctattgacaagtatatatattggaactgcagggaaaatacttgacaagaacaatgcagatagagctgtggaccaatataatcgatttttggttattttcttatgataattatttctttctatttttgttcttgtcaacttcttttatcatattatattctcatattatttgatgttgttatttattttatattatcttctatgcttaggaggacatccaattaatgtcttttcttggagtgaacagttataggttttcaatttcttggtgtagaatcttacctagtaagtccttctttagttaaatcagcagtattattaatactacattgcattgcatggtaaaaaaaagaaaatattcgattgcatctcatatactaaccagagttgataaattaaaatactgaaactcaatcgacgaatagttatttagatttagcttattatttgtgagacaggaggaagatttggagagattaattatttggggataaagtattacaacatatttatcgatgctctcattagtagaggtacttttttgtctttccggtttataataatttaagtttttttttaaaatattgtaatctcataaagttaatgaaaatacataattgtatcaactaatcactatccagggattaaaccatttgtgacgttgaaccatgtcgactatcctcaagaactcgaggaccggtttcaaagttggttaaaccccgagatgcagaaggaatttggttatttagccgatatatgtttcaagcattttggaaaccgagttaaatactggaccacgcttaacgaaccaaatcaacaattaatcttaggctatctaacaggtaaatttccaccctctcgttgctcctcgccatacgggaactgtagccaggggaattcagaaaccgaacctttcatagccgcacataacatgatccttgcacacgcaaaagcggttaacatatacaagaccaaatatcagaaagaacaaaagggaagcattggcattgtggtacaaacatcatggtttgaacccattagtgattccaatgcggataaagaagctgctgagagagctcaatcattttactctaattggtatgttatattactatatatgttgagatcatatttgtagatatgaagtatagtacttcacccacatatggaatatatattgttttatctatttgtattctaacatgtactaggattctagatcccgttatatatgggaaatatccaaaagaaatggtagatattcttggaccagccttgccacaattttcgagcaatgaagtgaagaacttagagaagtcgagggcagatttcgttggtattaatcactatacaagttacttcattcaagattgtttgacctctgcttgtaatactggacatggagcttttaaggccgaaggatatgctctcaagttagaccggaaaggcaatgttactataggagaacttgtaagtacattcattcagtttcttatattcaatattttacgactatattcaaatgttttagtaaattttattgtttattgaccatgtttctattgttagaccgatgtaaattggcagcatattgatcccacaggattccacaagatgctgaattatttaaaagataggtacccaaacatgccaatgttcataactgaaaacggtacaagacctcaaatttgatcaatgatcgagtcatcaaccatatttgaaattatcatgaaaaattattattaatggcttgaaggttttggagacttgcaaaaacctgaaacaacggataaagaacttctaaatgatacaaaaaggatccaatacatgagtggatacttagaagctttacaagcagcaatgagggatggagcaaatgtgaagggttattttgtgtggtcactattagacaattttgagtggttgttcggatacaaggttcggtttggtctattccatgtggatctaacaactcttaaaaggtcaccgaaacaatcagcttcatggtacaaaaattatatcgaagaacacgtgaatcgaagagatatcgtagataattattaaacacatttatttttaattcgtattcactgccaaagaaagtcaaaaattacaaaagcatttaaaattgatacttatcattgttgttgattgttgaatgattaaatttgtcttttcctcct

SEQ ID NO: 79501 - protein, 137 aa, Arabidopsis thaliana
  peptide (1)..(137): Ceres Seq. ID no. 12651568
  misc_feature (1)..(125): Homolog of NCBI NO: 15220627 NR Description: glycosyl hydrolase family 1; protein id:
  misc_feature (1)..(125): Homolog of NCBI NO: 30696622 NR Description: glycosyl hydrolase family 1 [Arabidopsis thaliana]
  misc_feature (1)..(125): Homolog of NCBI NO: 7435450 NR Description: beta-glucosidase homolog F8K4.3 - Arabidopsis
  misc_feature (1)..(125): Homolog of NCBI NO: 30696625 NR Description: glycosyl hydrolase family 1 [Arabidopsis thaliana]
  misc_feature (1)..(127): Homolog of NCBI NO: 22328863 NR Description: glycosyl hydrolase family 1; protein id:
  misc_feature (1)..(130): Homolog of NCBI NO: 38345324 NR Description: OSJNBa0004N05.21 [Oryza sativa (japonica
  misc_feature (1)..(127): Homolog of NCBI NO: 38345329 NR Description: OSJNBa0004N05.26 [Oryza sativa (japonica
  misc_feature (1)..(127): Homolog of NCBI NO: 38345327 NR Description: OSJNBa0004N05.24 [Oryza sativa (japonica
  misc_feature (1)..(122): Homolog of NCBI NO: 7435447 NR Description: beta-glucosidase homolog F17L22.220 - Arabidopsis
  misc_feature (1)..(127): Homolog of NCBI NO: 17226270 NR Description: beta-mannosidase enzyme [Lycopersicon esculentum]
MQKEFGYLADICFKHFGNRVKYWTTLNEPNQQLILGYLTGKFPPSRCSSPYGNCSQGNSETEPFIAAHNMILAHAKAVNIYKTKYQKEQKGSIGIVVQTSWFEPISDSNADKEAAERAQSFYSNWYVILLYMLRSYL

SEQ ID NO: 79502 - protein, 136 aa, Arabidopsis thaliana
  peptide (1)..(136): Ceres Seq. ID no. 12651569
  misc_feature (25)..(110): Homolog of NCBI NO: 15220627 NR Description: glycosyl hydrolase family 1; protein id:
  misc_feature (25)..(132): Homolog of NCBI NO: 30696622 NR Description: glycosyl hydrolase family 1 [Arabidopsis thaliana]
  misc_feature (25)..(132): Homolog of NCBI NO: 7435450 NR Description: beta-glucosidase homolog F8K4.3 - Arabidopsis
  misc_feature (25)..(132): Homolog of NCBI NO: 30696625 NR Description: glycosyl hydrolase family 1 [Arabidopsis thaliana]
  misc_feature (23)..(129): Homolog of NCBI NO: 22328863 NR Description: glycosyl hydrolase family 1; protein id:
  misc_feature (26)..(109): Homolog of NCBI NO: 38345324 NR Description: OSJNBa0004N05.21 [Oryza sativa (japonica
  misc_feature (26)..(129): Homolog of NCBI NO: 38345329 NR Description: OSJNBa0004N05.26 [Oryza sativa (japonica
  misc_feature (26)..(119): Homolog of NCBI NO: 38345327 NR Description: OSJNBa0004N05.24 [Oryza sativa (japonica
  misc_feature (3)..(129): Homolog of NCBI NO: 7435447 NR Description: beta-glucosidase homolog F17L22.220 - Arabidopsis
  misc_feature (26)..(119): Homolog of NCBI NO: 17226270 NR Description: beta-mannosidase enzyme [Lycopersicon esculentum]
MKYSTSPTYGIYIVLSICILTCTRILDPVIYGKYPKEMVDILGPALPQFSSNEVKNLEKSRADFVGINHYTSYFIQDCLTSACNTGHGAFKAEGYALKLDRKGNVTIGELVSTFIQFLIFNILRLYSNVLVNFIVY

SEQ ID NO: 79503 - protein, 99 aa, Arabidopsis thaliana
  peptide (1)..(99): Ceres Seq. ID no. 12651570
  misc_feature (1)..(73): Homolog of NCBI NO: 15220627 NR Description: glycosyl hydrolase family 1; protein id:
  misc_feature (1)..(95): Homolog of NCBI NO: 30696622 NR Description: glycosyl hydrolase family 1 [Arabidopsis thaliana]
  misc_feature (1)..(95): Homolog of NCBI NO: 7435450 NR Description: beta-glucosidase homolog F8K4.3 - Arabidopsis
  misc_feature (1)..(95): Homolog of NCBI NO: 30696625 NR Description: glycosyl hydrolase family 1 [Arabidopsis thaliana]
  misc_feature (1)..(92): Homolog of NCBI NO: 22328863 NR Description: glycosyl hydrolase family 1; protein id:
  misc_feature (1)..(72): Homolog of NCBI NO: 38345324 NR Description: OSJNBa0004N05.21 [Oryza sativa (japonica
  misc_feature (1)..(92): Homolog of NCBI NO: 38345329 NR Description: OSJNBa0004N05.26 [Oryza sativa (japonica
  misc_feature (1)..(82): Homolog of NCBI NO: 38345327 NR Description: OSJNBa0004N05.24 [Oryza sativa (japonica
  misc_feature (1)..(92): Homolog of NCBI NO: 7435447 NR Description: beta-glucosidase homolog F17L22.220 - Arabidopsis
  misc_feature (1)..(82): Homolog of NCBI NO: 17226270 NR Description: beta-mannosidase enzyme [Lycopersicon esculentum]
MVDILGPALPQFSSNEVKNLEKSRADFVGINHYTSYFIQDCLTSACNTGHGAFKAEGYALKLDRKGNVTIGELVSTFIQFLIFNILRLYSNVLVNFIVY

SEQ ID NO: 79504 - DNA, 1584 bp, Arabidopsis thaliana
  misc_feature (1)..(1584): Ceres Seq. ID no. 12651581
  misc_feature: MA Experiment ID: 108434 Result: Up-regulated in Transcription
  misc_feature: MA Experiment 108434 PARAMETER Experiment Name: At_Root_Tips_cDNA_P Parameter: Tissue Value: Root Tips
  misc_feature: MA Experiment ID: 108461 Result: Down-regulated in Transcription
  misc_feature: MA Experiment 108461 PARAMETER Experiment Name: At_Germinating_Seeds_cDNA_P Parameter: Age (day) Value: 1 vs. 0
  misc_feature: MA Experiment 108461 PARAMETER Experiment Name: At_Germinating_Seeds_cDNA_P Parameter: Tissue Value: Germinating Seeds
  misc_feature: MA Experiment ID: 108462 Result: Down-regulated in Transcription
  misc_feature: MA Experiment 108462 PARAMETER Experiment Name: At_Germinating_Seeds_cDNA_P Parameter: Age (day) Value: 2 vs. 0
  misc_feature: MA Experiment 108462 PARAMETER Experiment Name: At_Germinating_Seeds_cDNA_P Parameter: Tissue Value: Germinating Seeds
  misc_feature: MA Experiment ID: 108463 Result: Down-regulated in Transcription
  misc_feature: MA Experiment 108463 PARAMETER Experiment Name: At_Germinating_Seeds_cDNA_P Parameter: Age (day) Value: 3 vs. 0
  misc_feature: MA Experiment 108463 PARAMETER Experiment Name: At_Germinating_Seeds_cDNA_P Parameter: Tissue Value: Germinating Seeds
  misc_feature: MA Experiment ID: 20000180 Result: Down-regulated in Transcription
  misc_feature: MA Experiment 20000180 PARAMETER Experiment Name: At_Germinating_Seeds_P Parameter: Age (hr) Value: 24 vs. 0
  misc_feature: MA Experiment 20000180 PARAMETER Experiment Name: At_Germinating_Seeds_P Parameter: Tissue Value: Germinating Seeds
ataccaattggcaaatcattagggtttatgaaattttgagtgattttcagagaagtttgaggatgactgtgtgattctacttctcgaattgaaatagatagttgggtcataatcgcatatccttgtcttctgtcatgtattctctgattcgccatggaagaagtttggtcgagttacagaaatggcgtcatttgagagttttagtgcaaaaggcgtctcctttgtccaattccttctcctctgcttctgctgcgcgtttgagtcctagagttggtcgaaaaggtaagagctttacagtctcttacctcgttgattcattgggtttacccaaaaagctcgctgaatcggtctcaaggaaggttagcttcgaggacaaggacaaccctgactctgttctgaatcttttgagaagtcatgggttcactgattctcagatctccaccatcgttacggattatccacaattgcttgtagctgatgctgagaaatcacttgctcccaagcttcagtttttgcagtctagaggagcttcaagctctgagctcactgagattgtttctacagttcctaaaatcttgggaaagagaggccacaaaactatcagcgtattctatgatttcatcaaagaaactttacttgataagagttccaagtccgaaaagtcatgtcaaccttttccacagggtaatctggagaacaagatcagaaatttatctgttttgagagaattggggatgcctcacaagttgttattccccttgctcatctcttgtgacgtacctgtcttcggtaaagaaaaatttgaagaatccctcaagaaagttgttgagatgggttttgatccatccacctcaaagtttgtggaagctttgtgcgttgttcaaagattgagcgacaaaaacatagaagataaagtcaatgcgtataaaaggttaggctttgatgtggaatatgtatggacagtgttcaagaggtggccaaactttctgacacactcggagaagaagatattgaacaccattgaaacatttctaggcctagggttcagcagagatgagtttagcgtgttaattaagcgctttcctcagggcattggattatccgcggagatggttaaaaagaagactgagtttttggtaaagaagatgaattggccactaaaggctcttgtttcaaaccctgcggtgcttggatacagcctagagaagaggactgtcccaaggggtaacgtagttcaagctctcatctccaagggattgatcggaagtgaactcccttcgatatcgcgtgtcttcgtatgtaccgatcaggtgttcttaaacaggtatgtgaagaggcatgaggacaagcagctggagactgagttgatggctatctatcgtgcttcatagatcacaaggctgatcaaggattttggtttctatctttaaatatctgaaatcctcaatttagactttagttctcaatttcatatcgatccaaactgtttgtctctctctatagatgcttgaaattgtaagttttgaatccattttctgctatattactgaagttaaattccaaattctttgtgaccttgttcgg

SEQ ID NO: 79505 - protein, 418 aa, Arabidopsis thaliana
  peptide (1)..(418): Ceres Seq. ID no. 12651582
  misc_feature (88)..(396): Pfam Name: mTERF Pfam Description: mTERF
  misc_feature (1)..(418): Homolog of NCBI NO: 15220664 NR Description: hypothetical protein; protein id: At1g61980.1
  misc_feature (1)..(418): Homolog of NCBI NO: 15220662 NR Description: hypothetical protein; protein id: At1g61970.1
  misc_feature (1)..(415): Homolog of NCBI NO: 15220713 NR Description: hypothetical protein; protein id: At1g62120.1
  misc_feature (1)..(399): Homolog of NCBI NO: 25404361 NR Description: hypothetical protein F19K23.6 [imported] - thaliana >gi|2160138|gb|AAB60760.1| F19K23.6 gene product
  misc_feature (1)..(415): Homolog of NCBI NO: 15220666 NR Description: hypothetical protein; protein id: At1g61990.1, by cDNA: gi_18087609 [Arabidopsis thaliana]
  misc_feature (19)..(415): Homolog of NCBI NO: 15220672 NR Description: hypothetical protein; protein id: At1g62010.1
  misc_feature (1)..(334): Homolog of NCBI NO: 25345734 NR Description: hypothetical protein F19K23.4 [imported] - thaliana >gi|2160136|gb|AAB60758.1| F19K23.4 gene product
  misc_feature (1)..(334): Homolog of NCBI NO: 15220660 NR Description: hypothetical protein; protein id: At1g61960.1
  misc_feature (1)..(334): Homolog of NCBI NO: 26450011 NR Description: unknown protein [Arabidopsis thaliana]
  misc_feature (1)..(334): Homolog of NCBI NO: 30696656 NR Description: expressed protein [Arabidopsis thaliana] unknown protein [Arabidopsis thaliana]
MYSLIRHGRSLVELQKWRHLRVLVQKASPLSNSFSSASAARLSPRVGRKGKSFTVSYLVDSLGLPKKLAESVSRKVSFEDKDNPDSVLNLLRSHGFTDSQISTIVTDYPQLLVADAEKSLAPKLQFLQSRGASSSELTEIVSTVPKILGKRGHKTISVFYDFIKETLLDKSSKSEKSCQPFPQGNLENKIRNLSVLRELGMPHKLLFPLLISCDVPVFGKEKFEESLKKVVEMGFDPSTSKFVEALCVVQRLSDKNIEDKVNAYKRLGFDVEYVWTVFKRWPNFLTHSEKKILNTIETFLGLGFSRDEFSVLIKRFPQGIGLSAEMVKKKTEFLVKKMNWPLKALVSNPAVLGYSLEKRTVPRGNVVQALISKGLIGSELPSISRVFVCTDQVFLNRYVKRHEDKQLETELMAIYRAS

SEQ ID NO: 79506 - protein, 218 aa, Arabidopsis thaliana
  peptide (1)..(218): Ceres Seq. ID no. 12651583
  misc_feature (1)..(196): Pfam Name: mTERF Pfam Description: mTERF
  misc_feature (1)..(218): Homolog of NCBI NO: 15220664 NR Description: hypothetical protein; protein id: At1g61980.1
  misc_feature (1)..(218): Homolog of NCBI NO: 15220662 NR Description: hypothetical protein; protein id: At1g61970.1
  misc_feature (1)..(215): Homolog of NCBI NO: 15220713 NR Description: hypothetical protein; protein id: At1g62120.1
  misc_feature (1)..(199): Homolog of NCBI NO: 25404361 NR Description: hypothetical protein F19K23.6 [imported] - thaliana >gi|2160138|gb|AAB60760.1| F19K23.6 gene product
  misc_feature (1)..(215): Homolog of NCBI NO: 15220666 NR Description: hypothetical protein; protein id: At1g61990.1, by cDNA: gi_18087609 [Arabidopsis thaliana]
  misc_feature (1)..(215): Homolog of NCBI NO: 15220672 NR Description: hypothetical protein; protein id: At1g62010.1
  misc_feature (1)..(134): Homolog of NCBI NO: 25345734 NR Description: hypothetical protein F19K23.4 [imported] - thaliana >gi|2160136|gb|AAB60758.1| F19K23.4 gene product
  misc_feature (1)..(134): Homolog of NCBI NO: 15220660 NR Description: hypothetical protein; protein id: At1g61960.1
  misc_feature (1)..(134): Homolog of NCBI NO: 26450011 NR Description: unknown protein [Arabidopsis thaliana]
  misc_feature (1)..(134): Homolog of NCBI NO: 30696656 NR Description: expressed protein [Arabidopsis thaliana] unknown protein [Arabidopsis thaliana]
MPHKLLFPLLISCDVPVFGKEKFEESLKKVVEMGFDPSTSKFVEALCVVQRLSDKNIEDKVNAYKRLGFDVEYVWTVFKRWPNFLTHSEKKILNTIETFLGLGFSRDEFSVLIKRFPQGIGLSAEMVKKKTEFLVKKMNWPLKALVSNPAVLGYSLEKRTVPRGNVVQALISKGLIGSELPSISRVFVCTDQVFLNRYVKRHEDKQLETELMAIYRAS

SEQ ID NO: 79507 - DNA, 1907 bp, Arabidopsis thaliana
  misc_feature (1)..(1907): Ceres Seq. ID no. 12651584
  misc_feature: MA Experiment ID: 20000173 Result: Down-regulated in Transcription
  misc_feature: MA Experiment 20000173 PARAMETER Experiment Name: At_42deg_Heat_P Parameter: Age (day) Value: 14
  misc_feature: MA Experiment 20000173 PARAMETER Experiment Name: At_42deg_Heat_P Parameter: Organism Value: A. thaliana
  misc_feature: MA Experiment 20000173 PARAMETER Experiment Name: At_42deg_Heat_P Parameter: Plant Line Value: WS
  misc_feature: MA Experiment 20000173 PARAMETER Experiment Name: At_42deg_Heat_P Parameter: Temperature (deg C) Value: 42 vs. 22
  misc_feature: MA Experiment 20000173 PARAMETER Experiment Name: At_42deg_Heat_P Parameter: Timepoint (hr) Value: 6
  misc_feature: MA Experiment 20000173 PARAMETER Experiment Name: At_42deg_Heat_P Parameter: Tissue Value: Aerial
  misc_feature: MA Experiment ID: 20000180 Result: Up-regulated in Transcription
  misc_feature: MA Experiment 20000180 PARAMETER Experiment Name: At_Germinating_Seeds_P Parameter: Age (hr) Value: 24 vs. 0
  misc_feature: MA Experiment 20000180 PARAMETER Experiment Name: At_Germinating_Seeds_P Parameter: Tissue Value: Germinating Seeds
  misc_feature: MA Experiment ID: 20000794 Result: Up-regulated in Transcription
  misc_feature: MA Experiment 20000794 PARAMETER Experiment Name: At_Petals_P Parameter: Age (day) Value: 23-25 days
  misc_feature: MA Experiment 20000794 PARAMETER Experiment Name: At_Petals_P Parameter: Plant Line Value: WS
  misc_feature: MA Experiment 20000794 PARAMETER Experiment Name: At_Petals_P Parameter: Tissue Value: Petals vs. Whole plant
atttgcttttctcaatagctttaaaatggtgaattcgaatgaagaagacgaaaggagaattcttgacgttgaagaatctcttcttacacaggaggaagtgaacaatcacttgaccggattgtcttctacagctgaagatggttctattgacatttatggaaacccaccatcgaagaagaagacaggaaactggaaagcttgtccctttattcttggaaacgaatgttgtgagagattagcttactatggaattgccaagaatctaatcacttactacacaagtgaattacacgagtccaatgtttctgcagctagtgacgttatgatttggcaaggaacttgctatatcacacctctcattggagctgttatagctgattcttactggggaagatactggaccattgcttctttctctgctatttatttcattggaatggctttgttgacactctcggcttcacttccggttttaaagccagcggcatgtgctggcgttgctgcggctctatgctcaccagcaacaacggttcagtatgcggttttctttacagggctttaccttattgctcttggtactggaggtatcaaaccatgtgtatcatcttttggtgctgatcagtttgatgatactgacccgagggaacgagttagaaaagcttctttctttaactggttttacttctccatcaacattggttcatttatctcatccactttgttagtttgggttcaagaaaatgtcgggtggggactcggtttcttgattcccaccgtgtttatgggagtctctattgcgagtttcttcattggaactccgctttatcggtttcagaaaccgggaggtagtccgattactagagtttgccaagttcttgtagctgcataccgtaaattgaagcttaatctccctgaagatatctcatttctgtatgaaacacgagagaaaaactccatgattgctggaagcaggaagattcaacacactgacggttacaagtttcttgacaaagctgctgttatctcagaatatgaatctaaatccggtgctttttccaacccatggaagctatgtactgtaactcaagtcgaagaagttaagactctaatccgtatgtttccaatctgggcctcggggatcgtctactcggtcctatattcacagatttccactctattcgtgcaacaaggacggtccatgaaccgaataatccgttctttcgagatccctcctgcttcattcggggttttcgacacacttatcgtgctcatatccatcccaatatatgaccgtttcctcgtaccctttgtaagacggttcacagggataccaaaagggttaactgatctgcagcgaatgggcattggtctttttctctctgtcctaagcattgcagctgcagctattgttgagacagtgcggttgcagcttgctcaagactttgttgcaatgagcatattttggcagatccctcagtacatactaatgggaatagcagaggtctttttcttcattggtcgagttgagtttttctatgatgaatctcctgatgcaatgagaagtgtatgcagcgctttggcactactcaataccgcagtcggaagctacctgagctcgttgatcctcactcttgtggcgtatttcacagctcttggaggtaaagatggttgggttccagacgaccttaataaaggacatcttgactacttcttctggcttttggtctctcttggacttgtcaacattcctgtttatgccttgatttgtgttaagcacacaaagaagaaggctttgtaagctatttttgtaacaagctatgttgttttggttcatcatattcatggtatactctgtatattgtaatctgtactagtagattttcttaaaaatatgaataatgtttccg

SEQ ID NO: 79508 - protein, 598 aa, Arabidopsis thaliana
  peptide (1)..(598): Ceres Seq. ID no. 12651585
  misc_feature (132)..(531): Pfam Name: POT family Pfam Description: POT family
  misc_feature (9)..(598): Homolog of NCBI NO: 30696666 NR Description: oligopeptide transporter -related [Arabidopsis >gi|16604436|gb|AAL24224.1| At1g62200/F19K23_13 [Arabidopsis
  misc_feature (27)..(598): Homolog of NCBI NO: 25404366 NR Description: hypothetical protein F19K23.13 [imported] - thaliana >gi|2160144|gb|AAB60766.1| Strong similarity to
  misc_feature (15)..(597): Homolog of NCBI NO: 15226861 NR Description: histidine transport protein (PTR2-B); protein id: supported by cDNA: gi_13937184, supported by cDNA: gi_633939
  misc_feature (15)..(597): Homolog of NCBI NO: 1076331 NR Description: histidine transport protein - Arabidopsis thaliana
  misc_feature (15)..(306): Homolog of NCBI NO: 15226856 NR Description: putative peptide/amino acid transporter; protein At2g02020.1 [Arabidopsis thaliana] >gi|25410951|pir||A84432
  misc_feature (341)..(596): Homolog of NCBI NO: 15226856 NR Description: putative peptide/amino acid transporter; protein At2g02020.1 [Arabidopsis thaliana] >gi|25410951|pir||A84432
  misc_feature (46)..(597): Homolog of NCBI NO: 4102839 NR Description: LeOPT1 [Lycopersicon esculentum]
  misc_feature (9)..(597): Homolog of NCBI NO: 15076661 NR Description: peptide transporter [Oryza sativa (japonica >gi|15076663|dbj|BAB62327.1| peptide transporter [Oryza sativa
  misc_feature (15)..(570): Homolog of NCBI NO: 6635838 NR Description: amino acid/peptide transporter [Prunus dulcis]
  misc_feature (45)..(598): Homolog of NCBI NO: 15232435 NR Description: peptide transport - like protein; protein id: supported by cDNA: 117581., supported by cDNA: gi_13430485,
FAFLNSFKMVNSNEEDERRILDVEESLLTQEEVNNHLTGLSSTAEDGSIDIYGNPPSKKKTGNWKACPFILGNECCERLAYYGIAKNLITYYTSELHESNVSAASDVMIWQGTCYITPLIGAVIADSYWGRYWTIASFSAIYFIGMALLTLSASLPVLKPAACAGVAAALCSPATTVQYAVFFTGLYLIALGTGGIKPCVSSFGADQFDDTDPRERVRKASFFNWFYFSINIGSFISSTLLVWVQENVGWGLGFLIPTVFMGVSIASFFIGTPLYRFQKPGGSPITRVCQVLVAAYRKLKLNLPEDISFLYETREKNSMIAGSRKIQHTDGYKFLDKAAVISEYESKSGAFSNPWKLCTVTQVEEVKTLIRMFPIWASGIVYSVLYSQISTLFVQQGRSMNRIIRSFEIPPASFGVFDTLIVLISIPIYDRFLVPFVRRFTGIPKGLTDLQRMGIGLFLSVLSIAAAAIVETVRLQLAQDFVAMSIFWQIPQYILMGIAEVFFFIGRVEFFYDESPDAMRSVCSALALLNTAVGSYLSSLILTLVAYFTALGGKDGWVPDDLNKGHLDYFFWLLVSLGLVNIPVYALICVKHTKKKAL

SEQ ID NO: 79509 - protein, 590 aa, Arabidopsis thaliana
  peptide (1)..(590): Ceres Seq. ID no. 12651586
  misc_feature (124)..(523): Pfam Name: POT family Pfam Description: POT family
  misc_feature (1)..(590): Homolog of NCBI NO: 30696666 NR Description: oligopeptide transporter -related [Arabidopsis >gi|16604436|gb|AAL24224.1| At1g62200/F19K23_13 [Arabidopsis
  misc_feature (19)..(590): Homolog of NCBI NO: 25404366 NR Description: hypothetical protein F19K23.13 [imported] - thaliana >gi|2160144|gb|AAB60766.1| Strong similarity to
  misc_feature (7)..(589): Homolog of NCBI NO: 15226861 NR Description: histidine transport protein (PTR2-B); protein id: supported by cDNA: gi_13937184, supported by cDNA: gi_633939
  misc_feature (7)..(589): Homolog of NCBI NO: 1076331 NR Description: histidine transport protein - Arabidopsis thaliana
  misc_feature (7)..(298): Homolog of NCBI NO: 15226856 NR Description: putative peptide/amino acid transporter; protein At2g02020.1 [Arabidopsis thaliana] >gi|25410951|pir||A84432
  misc_feature (333)..(588): Homolog of NCBI NO: 15226856 NR Description: putative peptide/amino acid transporter; protein At2g02020.1 [Arabidopsis thaliana] >gi|25410951|pir||A84432
  misc_feature (38)..(589): Homolog of NCBI NO: 4102839 NR Description: LeOPT1 [Lycopersicon esculentum]
  misc_feature (1)..(589): Homolog of NCBI NO: 15076661 NR Description: peptide transporter [Oryza sativa (japonica >gi|15076663|dbj|BAB62327.1| peptide transporter [Oryza sativa
  misc_feature (7)..(562): Homolog of NCBI NO: 6635838 NR Description: amino acid/peptide transporter [Prunus dulcis]
  misc_feature (37)..(590): Homolog of NCBI NO: 15232435 NR Description: peptide transport - like protein; protein id: supported by cDNA: 117581., supported by cDNA: gi_13430485,
MVNSNEEDERRILDVEESLLTQEEVNNHLTGLSSTAEDGSIDIYGNPPSKKKTGNWKACPFILGNECCERLAYYGIAKNLITYYTSELHESNVSAASDVMIWQGTCYITPLIGAVIADSYWGRYWTIASFSAIYFIGMALLTLSASLPVLKPAACAGVAAALCSPATTVQYAVFFTGLYLIALGTGGIKPCVSSFGADQFDDTDPRERVRKASFFNWFYFSINIGSFISSTLLVWVQENVGWGLGFLIPTVFMGVSIASFFIGTPLYRFQKPGGSPITRVCQVLVAAYRKLKLNLPEDISFLYETREKNSMIAGSRKIQHTDGYKFLDKAAVISEYESKSGAFSNPWKLCTVTQVEEVKTLIRMFPIWASGIVYSVLYSQISTLFVQQGRSMNRIIRSFEIPPASFGVFDTLIVLISIPIYDRFLVPFVRRFTGIPKGLTDLQRMGIGLFLSVLSIAAAAIVETVRLQLAQDFVAMSIFWQIPQYILMGIAEVFFFIGRVEFFYDESPDAMRSVCSALALLNTAVGSYLSSLILTLVAYFTALGGKDGWVPDDLNKGHLDYFFWLLVSLGLVNIPVYALICVKHTKKKAL

SEQ ID NO: 79510 - protein, 491 aa, Arabidopsis thaliana
  peptide (1)..(491): Ceres Seq. ID no. 12651587
  misc_feature (25)..(424): Pfam Name: POT family Pfam Description: POT family
  misc_feature (1)..(491): Homolog of NCBI NO: 30696666 NR Description: oligopeptide transporter -related [Arabidopsis >gi|16604436|gb|AAL24224.1| At1g62200/F19K23_13 [Arabidopsis
  misc_feature (1)..(491): Homolog of NCBI NO: 25404366 NR Description: hypothetical protein F19K23.13 [imported] - thaliana >gi|2160144|gb|AAB60766.1| Strong similarity to
  misc_feature (1)..(490): Homolog of NCBI NO: 15226861 NR Description: histidine transport protein (PTR2-B); protein id: supported by cDNA: gi_13937184, supported by cDNA: gi_633939
  misc_feature (1)..(490): Homolog of NCBI NO: 1076331 NR Description: histidine transport protein - Arabidopsis thaliana
  misc_feature (1)..(199): Homolog of NCBI NO: 15226856 NR Description: putative peptide/amino acid transporter; protein At2g02020.1 [Arabidopsis thaliana] >gi|25410951|pir||A84432
  misc_feature (234)..(489): Homolog of NCBI NO: 15226856 NR Description: putative peptide/amino acid transporter; protein At2g02020.1 [Arabidopsis thaliana] >gi|25410951|pir||A84432
  misc_feature (1)..(490): Homolog of NCBI NO: 4102839 NR Description: LeOPT1 [Lycopersicon esculentum]
  misc_feature (1)..(490): Homolog of NCBI NO: 15076661 NR Description: peptide transporter [Oryza sativa (japonica >gi|15076663|dbj|BAB62327.1| peptide transporter [Oryza sativa
  misc_feature (1)..(463): Homolog of NCBI NO: 6635838 NR Description: amino acid/peptide transporter [Prunus dulcis]
  misc_feature (1)..(491): Homolog of NCBI NO: 15232435 NR Description: peptide transport - like protein; protein id: supported by cDNA: 117581., supported by cDNA: gi_13430485,
MIWQGTCYITPLIGAVIADSYWGRYWTIASFSAIYFIGMALLTLSASLPVLKPAACAGVAAALCSPATTVQYAVFFTGLYLIALGTGGIKPCVSSFGADQFDDTDPRERVRKASFFNWFYFSINIGSFISSTLLVWVQENVGWGLGFLIPTVFMGVSIASFFIGTPLYRFQKPGGSPITRVCQVLVAAYRKLKLNLPEDISFLYETREKNSMIAGSRKIQHTDGYKFLDKAAVISEYESKSGAFSNPWKLCTVTQVEEVKTLIRMFPIWASGIVYSVLYSQISTLFVQQGRSMNRIIRSFEIPPASFGVFDTLIVLISIPIYDRFLVPFVRRFTGIPKGLTDLQRMGIGLFLSVLSIAAAAIVETVRLQLAQDFVAMSIFWQIPQYILMGIAEVFFFIGRVEFFYDESPDAMRSVCSALALLNTAVGSYLSSLILTLVAYFTALGGKDGWVPDDLNKGHLDYFFWLLVSLGLVNIPVYALICVKHTKKKAL

SEQ ID NO: 79511 - DNA, 1958 bp, Arabidopsis thaliana
  misc_feature (1)..(1958): Ceres Seq. ID no. 12651610
  misc_feature: MA Experiment ID: 20000169 Result: Up-regulated in Transcription
  misc_feature: MA Experiment 20000169 PARAMETER Experiment Name: At_100uM_ABA_P Parameter: Age (day) Value: 14
  misc_feature: MA Experiment 20000169 PARAMETER Experiment Name: At_100uM_ABA_P Parameter: Organism Value: A. thaliana
  misc_feature: MA Experiment 20000169 PARAMETER Experiment Name: At_100uM_ABA_P Parameter: Plant Line Value: WS
  misc_feature: MA Experiment 20000169 PARAMETER Experiment Name: At_100uM_ABA_P Parameter: Timepoint (hr) Value: 6
  misc_feature: MA Experiment 20000169 PARAMETER Experiment Name: At_100uM_ABA_P Parameter: Tissue Value: Aerial
  misc_feature: MA Experiment 20000169 PARAMETER Experiment Name: At_100uM_ABA_P Parameter: Treatment Value: 100uM ABA vs. No Treatment
  misc_feature: MA Experiment ID: 20000179 Result: Up-regulated in Transcription
  misc_feature: MA Experiment 20000179 PARAMETER Experiment Name: At_Germinating_Seeds_P Parameter: Age (hr) Value: 6 vs. 0
  misc_feature: MA Experiment 20000179 PARAMETER Experiment Name: At_Germinating_Seeds_P Parameter: Tissue Value: Germinating Seeds
  misc_feature: MA Experiment ID: 20000180 Result: Up-regulated in Transcription
  misc_feature: MA Experiment 20000180 PARAMETER Experiment Name: At_Germinating_Seeds_P Parameter: Age (hr) Value: 24 vs. 0
  misc_feature: MA Experiment 20000180 PARAMETER Experiment Name: At_Germinating_Seeds_P Parameter: Tissue Value: Germinating Seeds
  misc_feature: MA Experiment ID: 20000184 Result: Down-regulated in Transcription
  misc_feature: MA Experiment 20000184 PARAMETER Experiment Name: At_Shoots__P Parameter: Age (day) Value: 7
  misc_feature: MA Experiment 20000184 PARAMETER Experiment Name: At_Shoots__P Parameter: Tissue Value: Shoots vs. Whole Plant
  misc_feature: MA Experiment ID: 20000227 Result: Down-regulated in Transcription
  misc_feature: MA Experiment 20000227 PARAMETER Experiment Name: At_Root-Tips-vs-Tops_P Parameter: Tissue Value: Root Tips vs. Root Tops
  misc_feature: MA Experiment ID: 20000265 Result: Up-regulated in Transcription
  misc_feature: MA Experiment 20000265 PARAMETER Experiment Name: At_Open_Flower_P Parameter: Age (day) Value: 21
  misc_feature: MA Experiment 20000265 PARAMETER Experiment Name: At_Open_Flower_P Parameter: Plant Line Value: WS
  misc_feature: MA Experiment 20000265 PARAMETER Experiment Name: At_Open_Flower_P Parameter: Tissue Value: Closed Flower vs. Whole Plant
  misc_feature: MA Experiment ID: 20000286 Result: Up-regulated in Transcription
  misc_feature: MA Experiment 20000286 PARAMETER Experiment Name: At_Open_Flower_P Parameter: Age (day) Value: 21
  misc_feature: MA Experiment 20000286 PARAMETER Experiment Name: At_Open_Flower_P Parameter: Plant Line Value: WS
  misc_feature: MA Experiment 20000286 PARAMETER Experiment Name: At_Open_Flower_P Parameter: Tissue Value: Half Open vs. Whole Plant
  misc_feature: MA Experiment ID: 20000436 Result: Up-regulated in Transcription
  misc_feature: MA Experiment 20000436 PARAMETER Experiment Name: At_Drought_P Parameter: Age (day) Value: 7
  misc_feature: MA Experiment 20000436 PARAMETER Experiment Name: At_Drought_P Parameter: Organism Value: A. thaliana
  misc_feature: MA Experiment 20000436 PARAMETER Experiment Name: At_Drought_P Parameter: Plant Line Value: WS
  misc_feature: MA Experiment 20000436 PARAMETER Experiment Name: At_Drought_P Parameter: Timepoint (hr) Value: 12
  misc_feature: MA Experiment 20000436 PARAMETER Experiment Name: At_Drought_P Parameter: Tissue Value: Whole Plant
  misc_feature: MA Experiment 20000436 PARAMETER Experiment Name: At_Drought_P Parameter: Treatment Value: Drought vs. No Drought
  misc_feature: MA Experiment ID: 20000437 Result: Up-regulated in Transcription
  misc_feature: MA Experiment 20000437 PARAMETER Experiment Name: At_Drought_P Parameter: Age (day) Value: 8
  misc_feature: MA Experiment 20000437 PARAMETER Experiment Name: At_Drought_P Parameter: Organism Value: A. thaliana
  misc_feature: MA Experiment 20000437 PARAMETER Experiment Name: At_Drought_P Parameter: Plant Line Value: WS
  misc_feature: MA Experiment 20000437 PARAMETER Experiment Name: At_Drought_P Parameter: Timepoint (hr) Value: 24
  misc_feature: MA Experiment 20000437 PARAMETER Experiment Name: At_Drought_P Parameter: Tissue Value: Whole Plant
  misc_feature: MA Experiment 20000437 PARAMETER Experiment Name: At_Drought_P Parameter: Treatment Value: Drought vs. No Drought
  misc_feature: MA Experiment ID: 20001451 Result: Down-regulated in Transcription
  misc_feature: MA Experiment 20001451 PARAMETER Experiment Name: At_Far-red-induction_P Parameter: Age (day) Value: 7
  misc_feature: MA Experiment 20001451 PARAMETER Experiment Name: At_Far-red-induction_P Parameter: Light Value: Far-red vs. White
  misc_feature: MA Experiment 20001451 PARAMETER Experiment Name: At_Far-red-induction_P Parameter: Organism Value: A. thaliana
  misc_feature: MA Experiment 20001451 PARAMETER Experiment Name: At_Far-red-induction_P Parameter: Plant Line Value: Columbia
  misc_feature: MA Experiment 20001451 PARAMETER Experiment Name: At_Far-red-induction_P Parameter: Timepoint (hr) Value: 24
  misc_feature: MA Experiment 20001451 PARAMETER Experiment Name: At_Far-red-induction_P Parameter: Tissue Value: Whole Plant
  misc_feature: MA Experiment ID: 20001554 Result: Up-regulated in Transcription
  misc_feature: MA Experiment 20001554 PARAMETER Experiment Name: At_Drought_Soil_Dry_P Parameter: Age (day) Value: 21
  misc_feature: MA Experiment 20001554 PARAMETER Experiment Name: At_Drought_Soil_Dry_P Parameter: Organism Value: A. thaliana
  misc_feature: MA Experiment 20001554 PARAMETER Experiment Name: At_Drought_Soil_Dry_P Parameter: Plant Line Value: WS
  misc_feature: MA Experiment 20001554 PARAMETER Experiment Name: At_Drought_Soil_Dry_P Parameter: Post Timepoint (hr) Value: None
  misc_feature: MA Experiment 20001554 PARAMETER Experiment Name: At_Drought_Soil_Dry_P Parameter: Post-Treatment Value: None
  misc_feature: MA Experiment 20001554 PARAMETER Experiment Name: At_Drought_Soil_Dry_P Parameter: Timepoint (day) Value: 7
  misc_feature: MA Experiment 20001554 PARAMETER Experiment Name: At_Drought_Soil_Dry_P Parameter: Treatment Value: Drought vs. No Drought
  misc_feature: Pfam Name: adh_short Pfam Description: short chain dehydrogenase
aatgtccattacaaacaacaacagcatcataaatctcatcacgacgaactttcttctctttctccgtcgattcaatcctccacttcccgattccttcctccgccgccggagaaaccttcacaacctccgtctcaaacctaaccatctcctcaatcccaaactccttagcgaaatctttcaaatacgccaaaacttcgccatgactcggaaacctcctcggatctctagacacaccggaacgaaccacgaacgggaaatctctgtatccggtacactctcgtgtaccgttgattcgtagagatctatagacgcttgaatgaacaacggatcgggtcgggtcaacacttaacggatccgattcgacttcatcggtgtagatccaggttcctccgacttgtttttgtttctcgaaaacgaccaccgagtgaccttctcgtcgaagctctcgtgccgctactagacctgcaggtccagcaccgataaccgccacgtggtgtgatctgaagcaggtattgaagcaattggagccatggtgtgaacttaaagataaagtggttcttgtgacaggtgcttcatctggtatagggagagagatctgtcttgatctatgcaaagctggttgtaagattgtagcagcagctcgtcgtgttgatcgtctcaactctctctgttctgaaatcaacagctttggtgcaatcggagtccaagccgcagctcttgagctagacgtttcatcagacgcagacactattcgaaaagcggttaaagaagcttgggaaatctttggaacgatcgatgttttgattaacaatgctggaatcagaggcaatgtcaagtctagtttggatttatcaaaagaagaatgggacaaagtctttagaaccaacttgaccggatcttggttaatatccaaatacgtctgccttttgatgcgtgacgctaagcgtgggggctcggtgattaacgtctcgtcgatctctgggcttcatcgcggtttgttgcgcggtggactagcgtatgcttgttccaaaggtggtgttgacaccatgacgaggatgatggctattgagttagctgtttataagatcagagtgaactcgatcgcacctgggattttcaggtcagagatcacacaaggtcttttccagaaagagtggctcgagaaggtaacggaaaagattgtaccattaaagatgcaacagactgtggatccggggcttacatctctcgttcgctatctcattcacgattcttcccaatatgtcaccgggaatacatacatagtcgattccggagctacactccccggtgtgcccattttttcttctctttctccgtagattcaattctccatttcccgcttccttcttccgccgccggagcaaccttcacaaccgccgtatcaaaccgaatcatctcctcaatcgcaaactccttagcgaaatcttgcaaatacgccaaaacttcaccatgactcggaaacctcctcggatctctagattccgatacatcggaacgaatcacgaacgggaagtccctgtatcccatacactcacgggggagattagttcggagagatccatagacgctcgaatgaacaacggatcgggtcgggtcaacgcttaatggatcgggttcaatatgatcggtgtaaatccaggttcctccgacttgtttttgtctctcgaagacgaccaccgagtgaccttcccgacgaagctctcgcgccgcgactaatccggcggctccggcgccgataactgccacgtggtgtgatctgattggtgataaggaaggcgccattgggtttttttacgagattcgttaacgatggtgaatatactacggcctctttataaatatgtggcccaaaaactcatgaaccacacacaccacgacacaatgttaaaaaaacaaaaacaaattcctgagaaattgtttaaacgctgcgttttatc

SEQ ID NO: 79512 - protein, 136 aa, Arabidopsis thaliana
  peptide (1)..(136): Ceres Seq. ID no. 12651611
  misc_feature: Pfam Name: adh_short Pfam Description: short chain dehydrogenase
  misc_feature (1)..(134): Homolog of NCBI NO: 15221517 NR Description: similar to glucose 1-dehydrogenase (AB000617);
  misc_feature (1)..(136): Homolog of NCBI NO: 15222406 NR Description: reductase, putative; protein id: At1g63380.1
  misc_feature (1)..(134): Homolog of NCBI NO: 18410245 NR Description: oxidoreductase -like protein; protein id: supported by cDNA: gi_15028304, supported by cDNA: gi_19310684 thaliana] >gi|15028305|gb|AAK76629.1| putative oxidoreductase
  misc_feature (1)..(134): Homolog of NCBI NO: 11250516 NR Description: oxidoreductase-like protein - Arabidopsis thaliana
  misc_feature (1)..(134): Homolog of NCBI NO: 15233243 NR Description: beta-ketoacyl-ACP reductase - like protein;
  misc_feature (1)..(134): Homolog of NCBI NO: 15231362 NR Description: dehydrogenase -like protein; protein id:
  misc_feature (1)..(134): Homolog of NCBI NO: 18398539 NR Description: similar to oxidoreductase -like protein; protein
  misc_feature (1)..(134): Homolog of NCBI NO: 13549123 NR Description: putative short-chain type alcohol dehydrogenase
  misc_feature (1)..(134): Homolog of NCBI NO: 23451057 NR Description: putative short-chain type alcohol dehydrogenase
  misc_feature (1)..(134): Homolog of NCBI NO: 28411870 NR Description: putative 3-ketoacyl-acyl carrier protein
MRDAKRGGSVINVSSISGLHRGLLRGGLAYACSKGGVDTMTRMMAIELAVYKIRVNSIAPGIFRSEITQGLFQKEWLEKVTEKIVPLKMQQTVDPGLTSLVRYLIHDSSQYVTGNTYIVDSGATLPGVPIFSSLSP

SEQ ID NO: 79513 - protein, 98 aa, Arabidopsis thaliana
  peptide (1)..(98): Ceres Seq. ID no. 12651612
  misc_feature: Pfam Name: adh_short Pfam Description: short chain dehydrogenase
MSITNNNSIINLITTNFLLFLRRFNPPLPDSFLRRRRNLHNLRLKPNHLLNPKLLSEIFQIRQNFAMTRKPPRISRHTGTNHEREISVSGTLSCTVDS

SEQ ID NO: 79514 - protein, 97 aa, Arabidopsis thaliana
  peptide (1)..(97): Ceres Seq. ID no. 12651613
  misc_feature: Pfam Name: adh_short Pfam Description: short chain dehydrogenase
  misc_feature (1)..(95): Homolog of NCBI NO: 15221517 NR Description: similar to glucose 1-dehydrogenase (AB000617);
  misc_feature (1)..(97): Homolog of NCBI NO: 15222406 NR Description: reductase, putative; protein id: At1g63380.1
  misc_feature (1)..(95): Homolog of NCBI NO: 18410245 NR Description: oxidoreductase -like protein; protein id: supported by cDNA: gi_15028304, supported by cDNA: gi_19310684 thaliana] >gi|15028305|gb|AAK76629.1| putative oxidoreductase
  misc_feature (1)..(95): Homolog of NCBI NO: 11250516 NR Description: oxidoreductase-like protein - Arabidopsis thaliana
  misc_feature (1)..(95): Homolog of NCBI NO: 15233243 NR Description: beta-ketoacyl-ACP reductase - like protein;
  misc_feature (1)..(95): Homolog of NCBI NO: 15231362 NR Description: dehydrogenase -like protein; protein id:
  misc_feature (1)..(95): Homolog of NCBI NO: 18398539 NR Description: similar to oxidoreductase -like protein; protein
  misc_feature (1)..(95): Homolog of NCBI NO: 13549123 NR Description: putative short-chain type alcohol dehydrogenase
  misc_feature (1)..(95): Homolog of NCBI NO: 23451057 NR Description: putative short-chain type alcohol dehydrogenase
  misc_feature (1)..(95): Homolog of NCBI NO: 28411870 NR Description: putative 3-ketoacyl-acyl carrier protein
MTRMMAIELAVYKIRVNSIAPGIFRSEITQGLFQKEWLEKVTEKIVPLKMQQTVDPGLTSLVRYLIHDSSQYVTGNTYIVDSGATLPGVPIFSSLSP

SEQ ID NO: 79515 - DNA, 931 bp, Arabidopsis thaliana
  misc_feature (1)..(931): Ceres Seq. ID no. 12651622
  misc_feature: MA Experiment ID: 20001248 Result: Down-regulated in Transcription
  misc_feature: MA Experiment 20001248 PARAMETER Experiment Name: At_Far-red-induction_P Parameter: Age (day) Value: 7
  misc_feature: MA Experiment 20001248 PARAMETER Experiment Name: At_Far-red-induction_P Parameter: Light Value: Far-red vs. White
  misc_feature: MA Experiment 20001248 PARAMETER Experiment Name: At_Far-red-induction_P Parameter: Organism Value: A. thaliana
  misc_feature: MA Experiment 20001248 PARAMETER Experiment Name: At_Far-red-induction_P Parameter: Plant Line Value: Columbia
  misc_feature: MA Experiment 20001248 PARAMETER Experiment Name: At_Far-red-induction_P Parameter: Timepoint (hr) Value: 4
  misc_feature: MA Experiment 20001248 PARAMETER Experiment Name: At_Far-red-induction_P Parameter: Tissue Value: Whole Plant
  misc_feature: Pfam Name: RF-1 Pfam Description: Peptidyl-tRNA hydrolase domain
aaaattagggtcgccttcttcttcttcttctctgacatcgtcattttgacatcggaagaatcttcagtgccgagaaagataaacaaaatggcggcaatcagaacgatgacgaacatgattctacgcgagttcatccatcatccacttctccttcactcttcatcgaaatcgtgtcaatctcttttaccatgtctccgtctcactcccctaatttctccaattcactctaattcccggctcgtatccgtccgatgtgcggcatcgacctccggtggaagcggtggtgatcggaaagtctcttcacggttgtcgcaggtgcaacagatgcttcatgaagccgaagagagagctagttccgctggcaatgagcctactcctcaaatcactctagacaatgttacacttaactttgctagaagtggtggtcctggaggccagaatgtgaacaaattgaataccaaagtagatatgcgcttcaatgttaagaacgcgtattggctgagtgacaggatcagagagaaaatcttactgacggagaagaatcggatcaacaaggatggtgaacttgtgatatcttctaccaaaaccagaacgcagaaaggtaacatcgacgatgcacttgaaaaactacaggcgataattgatgcggcttcatatgttccacctccaccatcagaagaacaaaagaagaaaatagtaaagctcgctgcgaaagctgacaataaacgacttaaaagcaaaaaagttctgtcagacaagaaatctgcgagaagaagccgcggtagttacgatgattaaacttaaaaccatacaatggagtccaggttgattctaaagcttttaacttaaaatgattgttattttcttggaatttaatgtaacacaacaatcaaatcatccaataaaaatttgcagtatattggattttatg

SEQ ID NO: 79516 - protein, 265 aa, Arabidopsis thaliana
  peptide (1)..(265): Ceres Seq. ID no. 12651623
  misc_feature: Pfam Name: RF-1 Pfam Description: Peptidyl-tRNA hydrolase domain
  misc_feature (30)..(265): Homolog of NCBI NO: 27754314 NR Description: unknown protein [Arabidopsis thaliana]
  misc_feature (157)..(265): Homolog of NCBI NO: 15221608 NR Description: hypothetical protein; protein id: At1g62850.1
  misc_feature (30)..(130): Homolog of NCBI NO: 22330386 NR Description: unknown protein; protein id: At1g62855.1
  misc_feature (131)..(199): Homolog of NCBI NO: 6630453 NR Description: F23N19.20 [Arabidopsis thaliana]
  misc_feature (236)..(265): Homolog of NCBI NO: 6630453 NR Description: F23N19.20 [Arabidopsis thaliana]
  misc_feature (107)..(258): Homolog of NCBI NO: 19387848 NR Description: immature colon carcinoma transcript 1 [Mus >gi|12833706|dbj|BAB22632.1| unnamed protein product [Mus
  misc_feature (123)..(258): Homolog of NCBI NO: 27690532 NR Description: similar to immature colon carcinoma transcript 1
  misc_feature (128)..(258): Homolog of NCBI NO: 12833859 NR Description: unnamed protein product [Mus musculus]
  misc_feature (128)..(258): Homolog of NCBI NO: 20306641 NR Description: Similar to immature colon carcinoma transcript 1
  misc_feature (116)..(258): Homolog of NCBI NO: 4557657 NR Description: immature colon carcinoma transcript 1 [Homo >gi|6015033|sp|Q14197|ICT1_HUMAN Immature colon carcinoma
KIRVAFFFFFSDIVILTSEESSVPRKINKMAAIRTMTNMILREFIHHPLLLHSSSKSCQSLLPCLRLTPLISPIHSNSRLVSVRCAASTSGGSGGDRKVSSRLSQVQQMLHEAEERASSAGNEPTPQITLDNVTLNFARSGGPGGQNVNKLNTKVDMRFNVKNAYWLSDRIREKILLTEKNRINKDGELVISSTKTRTQKGNIDDALEKLQAIIDAASYVPPPPSEEQKKKIVKLAAKADNKRLKSKKVLSDKKSARRSRGSYDD

SEQ ID NO: 79517 - protein, 236 aa, Arabidopsis thaliana; identical to SEQ ID NO: 26577
  peptide (1)..(236): Ceres Seq. ID no. 12651624
  misc_feature: Pfam Name: RF-1 Pfam Description: Peptidyl-tRNA hydrolase domain
  misc_feature (1)..(236): Homolog of NCBI NO: 27754314 NR Description: unknown protein [Arabidopsis thaliana]
  misc_feature (128)..(236): Homolog of NCBI NO: 15221608 NR Description: hypothetical protein; protein id: At1g62850.1
  misc_feature (1)..(101): Homolog of NCBI NO: 22330386 NR Description: unknown protein; protein id: At1g62855.1
  misc_feature (102)..(170): Homolog of NCBI NO: 6630453 NR Description: F23N19.20 [Arabidopsis thaliana]
  misc_feature (207)..(236): Homolog of NCBI NO: 6630453 NR Description: F23N19.20 [Arabidopsis thaliana]
  misc_feature (78)..(229): Homolog of NCBI NO: 19387848 NR Description: immature colon carcinoma transcript 1 [Mus >gi|12833706|dbj|BAB22632.1| unnamed protein product [Mus
  misc_feature (94)..(229): Homolog of NCBI NO: 27690532 NR Description: similar to immature colon carcinoma transcript 1
  misc_feature (99)..(229): Homolog of NCBI NO: 12833859 NR Description: unnamed protein product [Mus musculus]
  misc_feature (99)..(229): Homolog of NCBI NO: 20306641 NR Description: Similar to immature colon carcinoma transcript 1
  misc_feature (87)..(229): Homolog of NCBI NO: 4557657 NR Description: immature colon carcinoma transcript 1 [Homo >gi|6015033|sp|Q14197|ICT1_HUMAN Immature colon carcinoma

SEQ ID NO: 79518 - protein, 230 aa, Arabidopsis thaliana; identical to SEQ ID NO: 26578
  peptide (1)..(230): Ceres Seq. ID no. 12651625
  misc_feature: Pfam Name: RF-1 Pfam Description: Peptidyl-tRNA hydrolase domain
  misc_feature (1)..(230): Homolog of NCBI NO: 27754314 NR Description: unknown protein [Arabidopsis thaliana]
  misc_feature (122)..(230): Homolog of NCBI NO: 15221608 NR Description: hypothetical protein; protein id: At1g62850.1
  misc_feature (1)..(95): Homolog of NCBI NO: 22330386 NR Description: unknown protein; protein id: At1g62855.1
  misc_feature (96)..(164): Homolog of NCBI NO: 6630453 NR Description: F23N19.20 [Arabidopsis thaliana]
  misc_feature (201)..(230): Homolog of NCBI NO: 6630453 NR Description: F23N19.20 [Arabidopsis thaliana]
  misc_feature (72)..(223): Homolog of NCBI NO: 19387848 NR Description: immature colon carcinoma transcript 1 [Mus >gi|12833706|dbj|BAB22632.1| unnamed protein product [Mus
  misc_feature (88)..(223): Homolog of NCBI NO: 27690532 NR Description: similar to immature colon carcinoma transcript 1
  misc_feature (93)..(223): Homolog of NCBI NO: 12833859 NR Description: unnamed protein product [Mus musculus]
  misc_feature (93)..(223): Homolog of NCBI NO: 20306641 NR Description: Similar to immature colon carcinoma transcript 1
  misc_feature (81)..(223): Homolog of NCBI NO: 4557657 NR Description: immature colon carcinoma transcript 1 [Homo >gi|6015033|sp|Q14197|ICT1_HUMAN Immature colon carcinoma

SEQ ID NO: 79519 - DNA, 1958 bp, Arabidopsis thaliana
  misc_feature (1)..(1958): Ceres Seq. ID no. 12651626
  misc_feature: MA Experiment ID: 20000169 Result: Up-regulated in Transcription
  misc_feature: MA Experiment 20000169 PARAMETER Experiment Name: At_100uM_ABA_P Parameter: Age (day) Value: 14
  misc_feature: MA Experiment 20000169 PARAMETER Experiment Name: At_100uM_ABA_P Parameter: Organism Value: A. thaliana
  misc_feature: MA Experiment 20000169 PARAMETER Experiment Name: At_100uM_ABA_P Parameter: Plant Line Value: WS
  misc_feature: MA Experiment 20000169 PARAMETER Experiment Name: At_100uM_ABA_P Parameter: Timepoint (hr) Value: 6
  misc_feature: MA Experiment 20000169 PARAMETER Experiment Name: At_100uM_ABA_P Parameter: Tissue Value: Aerial
  misc_feature: MA Experiment 20000169 PARAMETER Experiment Name: At_100uM_ABA_P Parameter: Treatment Value: 100uM ABA vs. No Treatment
  misc_feature: MA Experiment ID: 20000179 Result: Up-regulated in Transcription
  misc_feature: MA Experiment 20000179 PARAMETER Experiment Name: At_Germinating_Seeds_P Parameter: Age (hr) Value: 6 vs. 0
  misc_feature: MA Experiment 20000179 PARAMETER Experiment Name: At_Germinating_Seeds_P Parameter: Tissue Value: Germinating Seeds
  misc_feature: MA Experiment ID: 20000180 Result: Up-regulated in Transcription
  misc_feature: MA Experiment 20000180 PARAMETER Experiment Name: At_Germinating_Seeds_P Parameter: Age (hr) Value: 24 vs. 0
  misc_feature: MA Experiment 20000180 PARAMETER Experiment Name: At_Germinating_Seeds_P Parameter: Tissue Value: Germinating Seeds
  misc_feature: MA Experiment ID: 20000184 Result: Down-regulated in Transcription
  misc_feature: MA Experiment 20000184 PARAMETER Experiment Name: At_Shoots__P Parameter: Age (day) Value: 7
  misc_feature: MA Experiment 20000184 PARAMETER Experiment Name: At_Shoots__P Parameter: Tissue Value: Shoots vs. Whole Plant
  misc_feature: MA Experiment ID: 20000227 Result: Down-regulated in Transcription
  misc_feature: MA Experiment 20000227 PARAMETER Experiment Name: At_Root-Tips-vs-Tops_P Parameter: Tissue Value: Root Tips vs. Root Tops
  misc_feature: MA Experiment ID: 20000265 Result: Up-regulated in Transcription
  misc_feature: MA Experiment 20000265 PARAMETER Experiment Name: At_Open_Flower_P Parameter: Age (day) Value: 21
  misc_feature: MA Experiment 20000265 PARAMETER Experiment Name: At_Open_Flower_P Parameter: Plant Line Value: WS
  misc_feature: MA Experiment 20000265 PARAMETER Experiment Name: At_Open_Flower_P Parameter: Tissue Value: Closed Flower vs. Whole Plant
  misc_feature: MA Experiment ID: 20000286 Result: Up-regulated in Transcription
  misc_feature: MA Experiment 20000286 PARAMETER Experiment Name: At_Open_Flower_P Parameter: Age (day) Value: 21
  misc_feature: MA Experiment 20000286 PARAMETER Experiment Name: At_Open_Flower_P Parameter: Plant Line Value: WS
  misc_feature: MA Experiment 20000286 PARAMETER Experiment Name: At_Open_Flower_P Parameter: Tissue Value: Half Open vs. Whole Plant
  misc_feature: MA Experiment ID: 20000436 Result: Up-regulated in Transcription
  misc_feature: MA Experiment 20000436 PARAMETER Experiment Name: At_Drought_P Parameter: Age (day) Value: 7
  misc_feature: MA Experiment 20000436 PARAMETER Experiment Name: At_Drought_P Parameter: Organism Value: A. thaliana
  misc_feature: MA Experiment 20000436 PARAMETER Experiment Name: At_Drought_P Parameter: Plant Line Value: WS
  misc_feature: MA Experiment 20000436 PARAMETER Experiment Name: At_Drought_P Parameter: Timepoint (hr) Value: 12
  misc_feature: MA Experiment 20000436 PARAMETER Experiment Name: At_Drought_P Parameter: Tissue Value: Whole Plant
  misc_feature: MA Experiment 20000436 PARAMETER Experiment Name: At_Drought_P Parameter: Treatment Value: Drought vs. No Drought
  misc_feature: MA Experiment ID: 20000437 Result: Up-regulated in Transcription
  misc_feature: MA Experiment 20000437 PARAMETER Experiment Name: At_Drought_P Parameter: Age (day) Value: 8
  misc_feature: MA Experiment 20000437 PARAMETER Experiment Name: At_Drought_P Parameter: Organism Value: A. thaliana
  misc_feature: MA Experiment 20000437 PARAMETER Experiment Name: At_Drought_P Parameter: Plant Line Value: WS
  misc_feature: MA Experiment 20000437 PARAMETER Experiment Name: At_Drought_P Parameter: Timepoint (hr) Value: 24
  misc_feature: MA Experiment 20000437 PARAMETER Experiment Name: At_Drought_P Parameter: Tissue Value: Whole Plant
  misc_feature: MA Experiment 20000437 PARAMETER Experiment Name: At_Drought_P Parameter: Treatment Value: Drought vs. No Drought
  misc_feature: MA Experiment ID: 20001451 Result: Down-regulated in Transcription
  misc_feature: MA Experiment 20001451 PARAMETER Experiment Name: At_Far-red-induction_P Parameter: Age (day) Value: 7
  misc_feature: MA Experiment 20001451 PARAMETER Experiment Name: At_Far-red-induction_P Parameter: Light Value: Far-red vs. White
  misc_feature: MA Experiment 20001451 PARAMETER Experiment Name: At_Far-red-induction_P Parameter: Organism Value: A. thaliana
  misc_feature: MA Experiment 20001451 PARAMETER Experiment Name: At_Far-red-induction_P Parameter: Plant Line Value: Columbia
  misc_feature: MA Experiment 20001451 PARAMETER Experiment Name: At_Far-red-induction_P Parameter: Timepoint (hr) Value: 24
  misc_feature: MA Experiment 20001451 PARAMETER Experiment Name: At_Far-red-induction_P Parameter: Tissue Value: Whole Plant
  misc_feature: MA Experiment ID: 20001554 Result: Up-regulated in Transcription
  misc_feature: MA Experiment 20001554 PARAMETER Experiment Name: At_Drought_Soil_Dry_P Parameter: Age (day) Value: 21
  misc_feature: MA Experiment 20001554 PARAMETER Experiment Name: At_Drought_Soil_Dry_P Parameter: Organism Value: A. thaliana
  misc_feature: MA Experiment 20001554 PARAMETER Experiment Name: At_Drought_Soil_Dry_P Parameter: Plant Line Value: WS
  misc_feature: MA Experiment 20001554 PARAMETER Experiment Name: At_Drought_Soil_Dry_P Parameter: Post Timepoint (hr) Value: None
  misc_feature: MA Experiment 20001554 PARAMETER Experiment Name: At_Drought_Soil_Dry_P Parameter: Post-Treatment Value: None
  misc_feature: MA Experiment 20001554 PARAMETER Experiment Name: At_Drought_Soil_Dry_P Parameter: Timepoint (day) Value: 7
  misc_feature: MA Experiment 20001554 PARAMETER Experiment Name: At_Drought_Soil_Dry_P Parameter: Treatment Value: Drought vs. No Drought
  misc_feature: Pfam Name: adh_short Pfam Description: short chain dehydrogenase
aatgtccattacaaacaacaacagcatcataaatctcatcacgacgaactttcttctctttctccgtcgattcaatcctccacttcccgattccttcctccgccgccggagaaaccttcacaacctccgtctcaaacctaaccatctcctcaatcccaaactccttagcgaaatctttcaaatacgccaaaacttcgccatgactcggaaacctcctccgatctctagacacaccggaacgaaccacgaacgggaaatctctgtatccggtacactctcgtgtaccgttgattcgtagagatctatagacgcttgaatgaacaacggatcgggtcgggtcaacacttaacggatccgattcgacttcatcggtgtaaatccaggttcctcccacttgtttttgtttctcgaaaacgaccactgagtgaccttctcgtcgaagctctcgtgccgctactagtccggcgggtccagcaccgataaccgccacgtggtgtgatctgaagcaggtattgaagcaattggagccatggtgtgaacttaaagataaagtggttcttgtgacaggtgcttcctctggtatagggagagagatctgtcttgatctatgcaaagctggttgtaagattgtagcagcagctcgtcgtgttgatcgtctcaactctctctgttctgaaatcaacagctttggtgctatcggagtccaagccgtagcacttgagctagacgtttcatcagaagcagacactattcgaaaagcggttaaagaagcttgggaaacctttggaaagatcgatgttttgatcaataatgccggaatcagaggcaatgtcaagtcgagtttggatttgtcagaagaagaatgggacaaagtctttagaaccaacttaaccggatcttggttaatatccaaatacgtctgccttttgatgcgtgacgctgagcgcgggggctcggtgattaacgtctcgtcgatctctgggcttcatcgcggtttgttgcgcggtggactagcgtatgcttgttccaaaggtggtgttgacaccatgacgaggatgatggctattgagttagctgtttataagatcagagtgaactcgatcgcaccggggattttcaggtcagagatcacacaaggtcttttccagaaagagtggctcaagaaggttacggaaaaggttgtaccattaaagatgcaacagactgtggatccggggcttacatctcttgttcgctatctcattcacgattcttctcaatatgtcaccgggaatacatacattgtcgattccggaactacactgcccggtgtgcccattttttcttctctttctccgtagattcaattctccatttcccgcttccttcttccgccgccggagcaaccttcacaaccgccgtatcaaaccgaatcatctcctcgatcgcaaactccttagcgaaatcttgtaaatacgccaaaacttcaccatgactcggaaacctcctcggatctctagattccgatacaccggaacgaaccacgaacgggaagtccctgtatcccatacactcacgggggagattagttcggagagagccataaacgctcgaatgaacaacggatcgggtcgggtcaacgcttaatggatcgggttcgatatgatcggtgtatatccaggttcctccgacttgtttttgtctctcgaagacgaccaccgagtgaccttcccgtcgaagctctcgcgccgctactaatccggcggctccggcgccgataactgccacgtggtgtgatctgattggtgataaggaaggcgccattggtttttttaacgagattcgttaacgatggtgaatatactacggcctttttataaatatgtggcccaaaaactcatgatccacacacaccacgacacaatgttaaaaaaacaaaaacaaattcctgagaaattatctaaacgctgcgttttatc

SEQ ID NO: 79520 - protein, 136 aa, Arabidopsis thaliana
  peptide (1)..(136): Ceres Seq. ID no. 12651627
  misc_feature: Pfam Name: adh_short Pfam Description: short chain dehydrogenase
  misc_feature (1)..(136): Homolog of NCBI NO: 15222406 NR Description: reductase, putative; protein id: At1g63380.1
  misc_feature (1)..(134): Homolog of NCBI NO: 15221517 NR Description: similar to glucose 1-dehydrogenase (AB000617);
  misc_feature (1)..(134): Homolog of NCBI NO: 18410245 NR Description: oxidoreductase -like protein; protein id: supported by cDNA: gi_15028304, supported by cDNA: gi_19310684 thaliana] >gi|15028305|gb|AAK76629.1| putative oxidoreductase
  misc_feature (1)..(134): Homolog of NCBI NO: 11250516 NR Description: oxidoreductase-like protein - Arabidopsis thaliana
  misc_feature (1)..(134): Homolog of NCBI NO: 15233243 NR Description: beta-ketoacyl-ACP reductase - like protein;
  misc_feature (1)..(134): Homolog of NCBI NO: 15231362 NR Description: dehydrogenase -like protein; protein id:
  misc_feature (1)..(134): Homolog of NCBI NO: 18398539 NR Description: similar to oxidoreductase -like protein; protein
  misc_feature (1)..(134): Homolog of NCBI NO: 23451057 NR Description: putative short-chain type alcohol dehydrogenase
  misc_feature (1)..(134): Homolog of NCBI NO: 13549123 NR Description: putative short-chain type alcohol dehydrogenase
  misc_feature (1)..(134): Homolog of NCBI NO: 28411870 NR Description: putative 3-ketoacyl-acyl carrier protein
MRDAERGGSVINVSSISGLHRGLLRGGLAYACSKGGVDTMTRMMAIELAVYKIRVNSIAPGIFRSEITQGLFQKEWLKKVTEKVVPLKMQQTVDPGLTSLVRYLIHDSSQYVTGNTYIVDSGTTLPGVPIFSSLSP

SEQ ID NO: 79521 - protein, 98 aa, Arabidopsis thaliana
  peptide (1)..(98): Ceres Seq. ID no. 12651628
  misc_feature: Pfam Name: adh_short Pfam Description: short chain dehydrogenase
MSITNNNSIINLITTNFLLFLRRFNPPLPDSFLRRRRNLHNLRLKPNHLLNPKLLSEIFQIRQNFAMTRKPPPISRHTGTNHEREISVSGTLSCTVDS

SEQ ID NO: 79522 - protein, 97 aa, Arabidopsis thaliana
  peptide (1)..(97): Ceres Seq. ID no. 12651629
  misc_feature: Pfam Name: adh_short Pfam Description: short chain dehydrogenase
  misc_feature (1)..(97): Homolog of NCBI NO: 15222406 NR Description: reductase, putative; protein id: At1g63380.1
  misc_feature (1)..(95): Homolog of NCBI NO: 15221517 NR Description: similar to glucose 1-dehydrogenase (AB000617);
  misc_feature (1)..(95): Homolog of NCBI NO: 18410245 NR Description: oxidoreductase -like protein; protein id: supported by cDNA: gi_15028304, supported by cDNA: gi_19310684 thaliana] >gi|15028305|gb|AAK76629.1| putative oxidoreductase
  misc_feature (1)..(95): Homolog of NCBI NO: 11250516 NR Description: oxidoreductase-like protein - Arabidopsis thaliana
  misc_feature (1)..(95): Homolog of NCBI NO: 15233243 NR Description: beta-ketoacyl-ACP reductase - like protein;
  misc_feature (1)..(95): Homolog of NCBI NO: 15231362 NR Description: dehydrogenase -like protein; protein id:
  misc_feature (1)..(95): Homolog of NCBI NO: 18398539 NR Description: similar to oxidoreductase -like protein; protein
  misc_feature (1)..(95): Homolog of NCBI NO: 23451057 NR Description: putative short-chain type alcohol dehydrogenase
  misc_feature (1)..(95): Homolog of NCBI NO: 13549123 NR Description: putative short-chain type alcohol dehydrogenase
  misc_feature (1)..(95): Homolog of NCBI NO: 28411870 NR Description: putative 3-ketoacyl-acyl carrier protein
MTRMMAIELAVYKIRVNSIAPGIFRSEITQGLFQKEWLKKVTEKVVPLKMQQTVDPGLTSLVRYLIHDSSQYVTGNTYIVDSGTTLPGVPIFSSLSP

SEQ ID NO: 79523 - DNA, 2277 bp, Arabidopsis thaliana
  misc_feature (1)..(2277): Ceres Seq. ID no. 12651630
  misc_feature: MA Experiment ID: 20000184 Result: Down-regulated in Transcription
  misc_feature: MA Experiment 20000184 PARAMETER Experiment Name: At_Shoots__P Parameter: Age (day) Value: 7
  misc_feature: MA Experiment 20000184 PARAMETER Experiment Name: At_Shoots__P Parameter: Tissue Value: Shoots vs. Whole Plant
  misc_feature: MA Experiment ID: 20000234 Result: Up-regulated in Transcription
  misc_feature: MA Experiment 20000234 PARAMETER Experiment Name: At_Siliques_P Parameter: Age (day) Value: 21
  misc_feature: MA Experiment 20000234 PARAMETER Experiment Name: At_Siliques_P Parameter: Organism Value: A. thaliana
  misc_feature: MA Experiment 20000234 PARAMETER Experiment Name: At_Siliques_P Parameter: Plant Line Value: WS
  misc_feature: MA Experiment 20000234 PARAMETER Experiment Name: At_Siliques_P Parameter: Tissue Value: Less Than 5mm Siliques vs. Whole Plant
  misc_feature: MA Experiment ID: 20000267 Result: Up-regulated in Transcription
  misc_feature: MA Experiment 20000267 PARAMETER Experiment Name: At_Drought_P Parameter: Age (day) Value: 7
  misc_feature: MA Experiment 20000267 PARAMETER Experiment Name: At_Drought_P Parameter: Organism Value: A. thaliana
  misc_feature: MA Experiment 20000267 PARAMETER Experiment Name: At_Drought_P Parameter: Plant Line Value: WS
  misc_feature: MA Experiment 20000267 PARAMETER Experiment Name: At_Drought_P Parameter: Timepoint (hr) Value: 6
  misc_feature: MA Experiment 20000267 PARAMETER Experiment Name: At_Drought_P Parameter: Tissue Value: Whole Plant
  misc_feature: MA Experiment 20000267 PARAMETER Experiment Name: At_Drought_P Parameter: Treatment Value: Drought vs. No Drought
  misc_feature: MA Experiment ID: 20000436 Result: Up-regulated in Transcription
  misc_feature: MA Experiment 20000436 PARAMETER Experiment Name: At_Drought_P Parameter: Age (day) Value: 7
  misc_feature: MA Experiment 20000436 PARAMETER Experiment Name: At_Drought_P Parameter: Organism Value: A. thaliana
  misc_feature: MA Experiment 20000436 PARAMETER Experiment Name: At_Drought_P Parameter: Plant Line Value: WS
  misc_feature: MA Experiment 20000436 PARAMETER Experiment Name: At_Drought_P Parameter: Timepoint (hr) Value: 12
  misc_feature: MA Experiment 20000436 PARAMETER Experiment Name: At_Drought_P Parameter: Tissue Value: Whole Plant
  misc_feature: MA Experiment 20000436 PARAMETER Experiment Name: At_Drought_P Parameter: Treatment Value: Drought vs. No Drought
  misc_feature: MA Experiment ID: 20000437 Result: Up-regulated in Transcription
  misc_feature: MA Experiment 20000437 PARAMETER Experiment Name: At_Drought_P Parameter: Age (day) Value: 8
  misc_feature: MA Experiment 20000437 PARAMETER Experiment Name: At_Drought_P Parameter: Organism Value: A. thaliana
  misc_feature: MA Experiment 20000437 PARAMETER Experiment Name: At_Drought_P Parameter: Plant Line Value: WS
  misc_feature: MA Experiment 20000437 PARAMETER Experiment Name: At_Drought_P Parameter: Timepoint (hr) Value: 24
  misc_feature: MA Experiment 20000437 PARAMETER Experiment Name: At_Drought_P Parameter: Tissue Value: Whole Plant
  misc_feature: MA Experiment 20000437 PARAMETER Experiment Name: At_Drought_P Parameter: Treatment Value: Drought vs. No Drought
  misc_feature: MA Experiment ID: 20000495 Result: Up-regulated in Transcription
  misc_feature: MA Experiment 20000495 PARAMETER Experiment Name: At_Guard_Cells_P Parameter: Harvest Date Value: 8/2/2002
  misc_feature: MA Experiment 20000495 PARAMETER Experiment Name: At_Guard_Cells_P Parameter: Organism Value: A. thaliana
  misc_feature: MA Experiment 20000495 PARAMETER Experiment Name: At_Guard_Cells_P Parameter: Tissue Value: Guard Cells vs. Leaves
  misc_feature: MA Experiment ID: 20000496 Result: Up-regulated in Transcription
  misc_feature: MA Experiment 20000496 PARAMETER Experiment Name: At_Guard_Cells_P Parameter: Harvest Date Value: 7/19/2002
  misc_feature: MA Experiment 20000496 PARAMETER Experiment Name: At_Guard_Cells_P Parameter: Organism Value: Canola
  misc_feature: MA Experiment 20000496 PARAMETER Experiment Name: At_Guard_Cells_P Parameter: Tissue Value: Guard Cells vs. Leaves
aaacctagagctctcacttctcatatcaccaactttaaaacttaccgtccggttatcggaaaactccacgtggcaactttaacgcttcttctcttcctaatcgccgccggtattgccgtcacttcctctctatggcttaacaagacgacaaaagcatttgatcgaccgacattagtagcaacaaaaccagaaccggagctagagccaccgcatgaaaccggagtattggtaaattgcacaagtttcttgaatcaaaaccggtccggttcttgctcaagaacacctctacttaacaagaaaaaaccatctcatcgaccgacaataacaacaataaaaccggtcccggtacgtgtatcagagaagaaatcaccggaggaaaccggaagctcggtagattgctcaagtttcttgaatcaaaaccggtctggttcttgctcaagaacactgcaatcgggttataatcaaaaccaaaccgaatctaaccggtcttgtcctgattacttcaagtggattcacgaggatctaaaaccatggagagaaacagggataacaaaagaaatggtggaaagaggcaaaactacagcacatttcaggttagttattttaaacggcaaggtgttcgtcgaaaactacaagaagtctatacaaactagagatgcgttcacactatgggggattcttcagctgctgagaaagtatccagggaagttacctgacgtggatctcatgtttgactgtgatgatcgaccagtcattagatcggacggttataatatattgaatcgtacggttgagaatgcgccacctccgttgtttagatattgcggtgataggtggacggtggatatcgtctttcctgattggtcattctggggatggtaagtactagaatataatctcttctcactttctccttttttcttcttttgtctgaactctgaagctaacgtgtatggttgttaaggtacacttgtccccacttgatcacatgccggagaaaagttaccgggtccattttttcatttatacacaaatagattctttcgtgattcttaatagattcattttgttgtattatatcttcttaagagtatagtagtatagctagttagtggctaaaattatagtaatttaaagggacgaaaaggtaagtccaaaaacaatattatccctccacgcaatgccactacaatttaaatatgtggttgtaagttgtttatcacttattatgctttaactaaagtgtttcactaaagtaactttaatttcttgtgtcattcaatctttccagcaaaacatgaagtgtaaaaccaaaaccatattggtagtttcataactattcatttaaacatgttttctatcaaattaagttcttattttttgaatgaaattgaaatgaaatggaataattttggtgggtgaaggcaggagataaacataagggagtggagcaaagtgttgaaagaaatggaagaaggaaagaagaagaagaaatttatggaaagagacgcctatgcatattggaaagggaacccttttgttgcatctccttcaagagaagatctcctcacttgcaatttatcctcactacatgattggaatgctagaattttcattcaggattggatatcagaaggacaaagaggatttgagaattcgaatgtagcaaatcaatgcacttacagaactcttcaacctctccaacactattggcccattagggataaagataaatgtagatccatcaaatttgctgttgattggcttaataatcacactcaaaaggctcaagagataggaagagaagcaagtgagttcatgcaaagagatctatcaatggaaaatgtttatgattacatgttccatctgttgaatgaatactccaagcttcttaagtacaagcctcaagttccaaagaatagtgttgagctatgcacagaagccttggtgtgcccttctgaaggggaagatgttaatggggttgataagaaatttatgataggctctttagttagtaggcctcatgcttctggcccatgttcacttcctcctccttttgattccaatggtcttgagaagttccataggaagaaattgaatctcatccggcaagtggagaaatgggaagactcttactggcaaaaggttctgtaaagtgatataatctaaatttgatgatctaagtttagttggggatttttatagtacctttttttatctattggataacgttagattgattataattttgaggaattaaaattctttcttataaac

SEQ ID NO: 79524 - protein, 293 aa, Arabidopsis thaliana
  peptide (1)..(293): Ceres Seq. ID no. 12651631
  misc_feature (159)..(293): Pfam Name: Arabidopsis thaliana protein of unknown function Pfam Description: Arabidopsis thaliana protein of unknown
  misc_feature (1)..(293): Homolog of NCBI NO: 15222413 NR Description: hypothetical protein; protein id: At1g63420.1
  misc_feature (1)..(293): Homolog of NCBI NO: 25404907 NR Description: protein F2K11.20 [imported] - Arabidopsis >gi|6633846|gb|AAF19705.1|AC008047_12 F2K11.20 [Arabidopsis
  misc_feature (107)..(293): Homolog of NCBI NO: 15237842 NR Description: putative protein; protein id: At5g23850.1 thaliana] >gi|10176852|dbj|BAB10058.1| contains similarity to
  misc_feature (118)..(293): Homolog of NCBI NO: 15229061 NR Description: putative protein; protein id: At3g48980.1
  misc_feature (119)..(293): Homolog of NCBI NO: 15233070 NR Description: putative protein; protein id: At3g61270.1
  misc_feature (163)..(293): Homolog of NCBI NO: 38346998 NR Description: OSJNBb0039L24.21 [Oryza sativa (japonica
  misc_feature (187)..(293): Homolog of NCBI NO: 21742339 NR Description: OSJNBb0020O11.18 [Oryza sativa (japonica
  misc_feature (137)..(293): Homolog of NCBI NO: 15233074 NR Description: putative protein; protein id: At3g61290.1
  misc_feature (109)..(293): Homolog of NCBI NO: 7486461 NR Description: hypothetical protein At2g45830 [imported] - thaliana >gi|3386611|gb|AAC28541.1| unknown protein [Arabidopsis
  misc_feature (111)..(293): Homolog of NCBI NO: 15222341 NR Description: hypothetical protein; protein id: At1g07220.1
KPRALTSHITNFKTYRPVIGKLHVATLTLLLFLIAAGIAVTSSLWLNKTTKAFDRPTLVATKPEPELEPPHETGVLVNCTSFLNQNRSGSCSRTPLLNKKKPSHRPTITTIKPVPVRVSEKKSPEETGSSVDCSSFLNQNRSGSCSRTLQSGYNQNQTESNRSCPDYFKWIHEDLKPWRETGITKEMVERGKTTAHFRLVILNGKVFVENYKKSIQTRDAFTLWGILQLLRKYPGKLPDVDLMFDCDDRPVIRSDGYNILNRTVENAPPPLFRYCGDRWTVDIVFPDWSFWGW

SEQ ID NO: 79525 - protein, 228 aa, Arabidopsis thaliana
  peptide (1)..(228): Ceres Seq. ID no. 12651632
  misc_feature (1)..(51): Pfam Name: Arabidopsis thaliana protein of unknown function Pfam Description: Arabidopsis thaliana protein of unknown
  misc_feature (73)..(228): Homolog of NCBI NO: 15222413 NR Description: hypothetical protein; protein id: At1g63420.1
  misc_feature (1)..(97): Homolog of NCBI NO: 15222413 NR Description: hypothetical protein; protein id: At1g63420.1
  misc_feature (73)..(228): Homolog of NCBI NO: 25404907 NR Description: protein F2K11.20 [imported] - Arabidopsis >gi|6633846|gb|AAF19705.1|AC008047_12 F2K11.20 [Arabidopsis
  misc_feature (1)..(51): Homolog of NCBI NO: 25404907 NR Description: protein F2K11.20 [imported] - Arabidopsis >gi|6633846|gb|AAF19705.1|AC008047_12 F2K11.20 [Arabidopsis
  misc_feature (1)..(228): Homolog of NCBI NO: 13937171 NR Description: At1g63420/F2K11_19 [Arabidopsis thaliana]
  misc_feature (73)..(226): Homolog of NCBI NO: 15237842 NR Description: putative protein; protein id: At5g23850.1 thaliana] >gi|10176852|dbj|BAB10058.1| contains similarity to
  misc_feature (1)..(97): Homolog of NCBI NO: 15237842 NR Description: putative protein; protein id: At5g23850.1 thaliana] >gi|10176852|dbj|BAB10058.1| contains similarity to
  misc_feature (73)..(226): Homolog of NCBI NO: 15229061 NR Description: putative protein; protein id: At3g48980.1
  misc_feature (1)..(97): Homolog of NCBI NO: 15229061 NR Description: putative protein; protein id: At3g48980.1
  misc_feature (73)..(227): Homolog of NCBI NO: 15233070 NR Description: putative protein; protein id: At3g61270.1
MEEGKKKKKFMERDAYAYWKGNPFVASPSREDLLTCNLSSLHDWNARIFIQDWISEGQRGFENSNVANQCTYRTLQPLQHYWPIRDKDKCRSIKFAVDWLNNHTQKAQEIGREASEFMQRDLSMENVYDYMFHLLNEYSKLLKYKPQVPKNSVELCTEALVCPSEGEDVNGVDKKFMIGSLVSRPHASGPCSLPPPFDSNGLEKFHRKKLNLIRQVEKWEDSYWQKVL

SEQ ID NO: 79526 - protein, 218 aa, Arabidopsis thaliana
  peptide (1)..(218): Ceres Seq. ID no. 12651633
  misc_feature (63)..(215): Pfam Name: Arabidopsis thaliana protein of unknown function Pfam Description: Arabidopsis thaliana protein of unknown
  misc_feature (63)..(218): Homolog of NCBI NO: 15222413 NR Description: hypothetical protein; protein id: At1g63420.1
  misc_feature (1)..(87): Homolog of NCBI NO: 15222413 NR Description: hypothetical protein; protein id: At1g63420.1
  misc_feature (63)..(218): Homolog of NCBI NO: 25404907 NR Description: protein F2K11.20 [imported] - Arabidopsis >gi|6633846|gb|AAF19705.1|AC008047_12 F2K11.20 [Arabidopsis
  misc_feature (1)..(41): Homolog of NCBI NO: 25404907 NR Description: protein F2K11.20 [imported] - Arabidopsis >gi|6633846|gb|AAF19705.1|AC008047_12 F2K11.20 [Arabidopsis
  misc_feature (1)..(218): Homolog of NCBI NO: 13937171 NR Description: At1g63420/F2K11_19 [Arabidopsis thaliana]
  misc_feature (63)..(216): Homolog of NCBI NO: 15237842 NR Description: putative protein; protein id: At5g23850.1 thaliana] >gi|10176852|dbj|BAB10058.1| contains similarity to
  misc_feature (1)..(87): Homolog of NCBI NO: 15237842 NR Description: putative protein; protein id: At5g23850.1 thaliana] >gi|10176852|dbj|BAB10058.1| contains similarity to
  misc_feature (63)..(216): Homolog of NCBI NO: 15229061 NR Description: putative protein; protein id: At3g48980.1
  misc_feature (1)..(87): Homolog of NCBI NO: 15229061 NR Description: putative protein; protein id: At3g48980.1
  misc_feature (63)..(217): Homolog of NCBI NO: 15233070 NR Description: putative protein; protein id: At3g61270.1
MERDAYAYWKGNPFVASPSREDLLTCNLSSLHDWNARIFIQDWISEGQRGFENSNVANQCTYRTLQPLQHYWPIRDKDKCRSIKFAVDWLNNHTQKAQEIGREASEFMQRDLSMENVYDYMFHLLNEYSKLLKYKPQVPKNSVELCTEALVCPSEGEDVNGVDKKFMIGSLVSRPHASGPCSLPPPFDSNGLEKFHRKKLNLIRQVEKWEDSYWQKVL

SEQ ID NO: 79527 - DNA, 3765 bp, Arabidopsis thaliana
  misc_feature (1)..(3765): Ceres Seq. ID no. 12651701
  misc_feature: MA Experiment ID: 20000307 Result: Up-regulated in Transcription
  misc_feature: MA Experiment 20000307 PARAMETER Experiment Name: At_Germinating_Seeds_Sub_P Parameter: Age (hr) Value: 24 vs. 0
  misc_feature: MA Experiment 20000307 PARAMETER Experiment Name: At_Germinating_Seeds_Sub_P Parameter: Organism Value: A. thaliana
  misc_feature: MA Experiment 20000307 PARAMETER Experiment Name: At_Germinating_Seeds_Sub_P Parameter: Plant Line Value: WS
  misc_feature: MA Experiment 20000307 PARAMETER Experiment Name: At_Germinating_Seeds_Sub_P Parameter: Tissue Value: Germinating Seeds
  misc_feature: MA Experiment ID: 20000314 Result: Up-regulated in Transcription
  misc_feature: MA Experiment 20000314 PARAMETER Experiment Name: At_14day_Shoots-Roots_Sub_P Parameter: Age (day) Value: 14
  misc_feature: MA Experiment 20000314 PARAMETER Experiment Name: At_14day_Shoots-Roots_Sub_P Parameter: Organism Value: A. thaliana
  misc_feature: MA Experiment 20000314 PARAMETER Experiment Name: At_14day_Shoots-Roots_Sub_P Parameter: Plant Line Value: WS
  misc_feature: MA Experiment 20000314 PARAMETER Experiment Name: At_14day_Shoots-Roots_Sub_P Parameter: Tissue Value: Roots vs. Whole Plant
  misc_feature: MA Experiment ID: 20000347 Result: Up-regulated in Transcription
  misc_feature: MA Experiment 20000347 PARAMETER Experiment Name: At_2mM_SA_Sub_P Parameter: Age (day) Value: 14
  misc_feature: MA Experiment 20000347 PARAMETER Experiment Name: At_2mM_SA_Sub_P Parameter: Organism Value: A. thaliana
  misc_feature: MA Experiment 20000347 PARAMETER Experiment Name: At_2mM_SA_Sub_P Parameter: Plant Line Value: WS
  misc_feature: MA Experiment 20000347 PARAMETER Experiment Name: At_2mM_SA_Sub_P Parameter: Timepoint (hr) Value: 6
  misc_feature: MA Experiment 20000347 PARAMETER Experiment Name: At_2mM_SA_Sub_P Parameter: Tissue Value: Aerial
  misc_feature: MA Experiment 20000347 PARAMETER Experiment Name: At_2mM_SA_Sub_P Parameter: Treatment Value: 2mM SA vs. No Treatment
atgggagtcggagatcctcttccacttccgccggaaaagaaccgtcgggaggttaataaaccgccggatattgcgtcgacttcctcctcctccgcttcggcggtgaataatgctcggttgtccgatgctccgattcttttgtttgtttatttccataaggctttccgtgcgcagctagcggagctccagtttctggccggtgatacagtccggtccggttctgatctggccgtggagctccgctctaagtttgagtttcttaagcttgtatataagtatcattccgcagctgaagatgaggttatattttcagcgttggacactcgtgtgaagaacattgtttttaattactcgcttgaacatgatgccacagatgatcttttcacttcagtttttcattggctgaatgttcttgaagaggaacaagggaacagagccgatgtacttcgtgaagttgttttatgcattggaaccattcagtcatccatatgtcaacatatgcttaaagaagaacgacaggtgtttcctttgatgattgagaacttctcctttgaagaacaggcatcgttagtgtggcaattcatttgtagtgttccagtgatggtgctggaagagattttcccatggatgacgtctttactctctcccaaggagaaatctgaagttgagacttgcttcaaagaagttgtcccaaatgaactctctttgcaactggtcataaactcttggctgattgatgacagtcaatcttctttgacggctcttacaaagattatgaaaggagttcagtctgtagaagtgtctgaaaatatgaccaactctcagacaaattcatcatcaagtggtgtgtttcaacgtttttggcagtggagtaaaaaaatgtctttttctagtccaaatacaggacacattttggttcatggtatccatctttggcataatgcaattagaaaagatttggtagacattcaaaaaggactatgccaattgacatttccaagcctttcattggacctcaatgttctggtggttcggctaaacttccttgctgatgtccttatcttttatagcaatgcatttaagacgttcttttacccagtgtttgaagatatggtggatcaacaacactcttcctcttccaaacaattcaccatagatggacatgtggaaaacttcaagaagtcactagaccttgaaactagagcagggagtgacaattttgtcataacccttcaggagaaactggagtctcttatattgacagtagctaagcagttctctatagaggaaacagaggtattcccgatcatcagcaagaactgcaacattgaaatgcagaggcaactactatatagaagcatccatttcctgcctcttggattgcttaagtgtgtcataatgtggttctctgctcagttaccagaagatgaatgtcaatcaattattcactacttaagctctgaagattcctttcccaacaaaccttttgcgcacctcttgttgcagtggtttcgcttcggttattcaggcaaaacaccagttgaaagtttctggaatgagctgtcctttatgttcaaaccaagatgttcttttgaagaggaactcactgaagaagcttctggatctttctttcaacaatcaccgcagaaactattcaaagtatccgatccctattctatggatccacctgctggttacatgaatgagacaccttactcaagtgcgatgaatcagcaaatacttatcccaggaaagctcaggccacttctgcatcttcctgatctttttggtgacaagactattggtgaacacttaactatggacttgaaaccaatcgatctgattttctacttccacaaggcaatgaagaaagatctagactaccttgtacgtggttcagctcggctcgcaacagattatagcttccttggagaatttcaacagcggtttcatcttataaagttcttgtatcagatacattcagatgcagaagatgagattgcatttccagctttggaggcaaagggtaaactacaaaacattagtcagtcatacagtatcgatcacgaactcgaagttgagcacctcaataaagtatcattccttttgaatgagttggcagaattgaacatgctggtactagaccacaagaatgtgaagtatgagaagttgtgtatgagcctccaggatatatgcaaatccattcacaagctattgtctgagcatctccaccgagaagaaactgagctttggtgtttattcagagactgcttcactattgaagaacaagaaaagatcatagcatgcatgcttggaagaataagtggagaaatattgcaagatatgattccatggctaatggaatctttgatccctgatgaacaacatgctgtgatgtccttgtggagacaagcaacaaggaaaactatgtttggtgaatggctaacagaatggtacaattctcatgctgtcgaggaggaaacagaggaagcaaataaggatccatctgagaattcagatccattagacgttgtctggagttatctctttgaaggagctgctgatgagtacaaagggagcatttgcagcaaacctctggaagagacagagttaaaaggtatcatgaataagcctcttggaaaggctgctcctaataacaaggtagaatttggaaacaaagaggagaatcatcttgagatctcaggaagtaaaaaggtgtgtacaggagctgatgaaacgaagtacaaagaacaaactgacagcaacgcgcaagcttttcagatgtcgcataatactagccaatctggccaagacagtagatatgagtgtctgttatcaatgagtcaagaggatgtggaagctacaattcgaagaatatctcgagattcttccctggatcctcagaagaaatcgtatatcattcaaaacttgttaatgagccgttggattgctacacaacggatatataatcttgaaccatccattctctcaagcaatagggaagcagttccggggcagaatccatcttatcgagatcctcacaaactgatctttggttgcaaacactacaagagaagttgcaaacttcttgctccttgttgcaacaagctctacacatgtatacgatgccatgatgaagaggttgatcacttattggatagaaaacagatcacaaagatgatgtgcatgaaatgcatgataattcagccagtaggtgctagttgctcaaatatttcatgtagttcatcaatgggaaaatattactgtaaaatatgcaagttgtttgacgatgatagggaaatctatcattgtccatactgcaatctctgccggctaggaaaaggactgagcatagactactttcattgcatgaaatgtaatgcttgtatgtcgcgactcatagtagaacatgtatgcagagaaaagtgcttagaagataattgtccgatttgtcatgaatacatatttacctcaaattctccggtgaaggctcttccatgcggtcacgtgatgcattcaacatgctttcaggagtacacatgttcgcattacacatgccctatttgcagcaagtcgctcggggatatgcaggtttactttagaatgttagacgcactgcttgcagaacaaaagatgccagatgaatacttaaaccaaactcaggtaatactgtgtaatgactgtggaagaaaggggaatgctccttaccattggctctatcacaagtgttcttcttgtgcctcctacaacaccagacttttctag

SEQ ID NO: 79528 - protein, 1254 aa, Arabidopsis thaliana
  peptide (1)..(1254): Ceres Seq. ID no. 12651702
  misc_feature (1020)..(1096): Pfam Name: CHY zinc finger Pfam Description: CHY zinc finger
  misc_feature (21)..(745): Homolog of NCBI NO: 15221380 NR Description: hypothetical protein; protein id: At1g74770.1
  misc_feature (21)..(487): Homolog of NCBI NO: 9279663 NR Description: gb|AAD55299.1~gene_id:MIE15.8~similar to unknown
  misc_feature (21)..(487): Homolog of NCBI NO: 15229615 NR Description: zinc finger protein, putative; protein id: supported by cDNA: gi_20453198 [Arabidopsis thaliana] AT3g18290/MIE15_8 [Arabidopsis thaliana]
  misc_feature (934)..(1253): Homolog of NCBI NO: 9279663 NR Description: gb|AAD55299.1~gene_id:MIE15.8~similar to unknown
  misc_feature (934)..(1253): Homolog of NCBI NO: 15229615 NR Description: zinc finger protein, putative; protein id: supported by cDNA: gi_20453198 [Arabidopsis thaliana] AT3g18290/MIE15_8 [Arabidopsis thaliana]
  misc_feature (672)..(845): Homolog of NCBI NO: 9279663 NR Description: gb|AAD55299.1~gene_id:MIE15.8~similar to unknown
  misc_feature (672)..(845): Homolog of NCBI NO: 15229615 NR Description: zinc finger protein, putative; protein id: supported by cDNA: gi_20453198 [Arabidopsis thaliana] AT3g18290/MIE15_8 [Arabidopsis thaliana]
  misc_feature (610)..(710): Homolog of NCBI NO: 9279663 NR Description: gb|AAD55299.1~gene_id:MIE15.8~similar to unknown
  misc_feature (610)..(710): Homolog of NCBI NO: 15229615 NR Description: zinc finger protein, putative; protein id: supported by cDNA: gi_20453198 [Arabidopsis thaliana] AT3g18290/MIE15_8 [Arabidopsis thaliana]
  misc_feature (917)..(1253): Homolog of NCBI NO: 34911328 NR Description: putative zinc finger protein [Oryza sativa
MGVGDPLPLPPEKNRREVNKPPDIASTSSSSASAVNNARLSDAPILLFVYFHKAFRAQLAELQFLAGDTVRSGSDLAVELRSKFEFLKLVYKYHSAAEDEVIFSALDTRVKNIVFNYSLEHDATDDLFTSVFHWLNVLEEEQGNRADVLREVVLCIGTIQSSICQHMLKEERQVFPLMIENFSFEEQASLVWQFICSVPVMVLEEIFPWMTSLLSPKEKSEVETCFKEVVPNELSLQLVINSWLIDDSQSSLTALTKIMKGVQSVEVSENMTNSQTNSSSSGVFQRFWQWSKKMSFSSPNTGHILVHGIHLWHNAIRKDLVDIQKGLCQLTFPSLSLDLNVLVVRLNFLADVLIFYSNAFKTFFYPVFEDMVDQQHSSSSKQFTIDGHVENFKKSLDLETRAGSDNFVITLQEKLESLILTVAKQFSIEETEVFPIISKNCNIEMQRQLLYRSIHFLPLGLLKCVIMWFSAQLPEDECQSIIHYLSSEDSFPNKPFAHLLLQWFRFGYSGKTPVESFWNELSFMFKPRCSFEEELTEEASGSFFQQSPQKLFKVSDPYSMDPPAGYMNETPYSSAMNQQILIPGKLRPLLHLPDLFGDKTIGEHLTMDLKPIDLIFYFHKAMKKDLDYLVRGSARLATDYSFLGEFQQRFHLIKFLYQIHSDAEDEIAFPALEAKGKLQNISQSYSIDHELEVEHLNKVSFLLNELAELNMLVLDHKNVKYEKLCMSLQDICKSIHKLLSEHLHREETELWCLFRDCFTIEEQEKIIACMLGRISGEILQDMIPWLMESLIPDEQHAVMSLWRQATRKTMFGEWLTEWYNSHAVEEETEEANKDPSENSDPLDVVWSYLFEGAADEYKGSICSKPLEETELKGIMNKPLGKAAPNNKVEFGNKEENHLEISGSKKVCTGADETKYKEQTDSNAQAFQMSHNTSQSGQDSRYECLLSMSQEDVEATIRRISRDSSLDPQKKSYIIQNLLMSRWIATQRIYNLEPSILSSNREAVPGQNPSYRDPHKLIFGCKHYKRSCKLLAPCCNKLYTCIRCHDEEVDHLLDRKQITKMMCMKCMIIQPVGASCSNISCSSSMGKYYCKICKLFDDDREIYHCPYCNLCRLGKGLSIDYFHCMKCNACMSRLIVEHVCREKCLEDNCPICHEYIFTSNSPVKALPCGHVMHSTCFQEYTCSHYTCPICSKSLGDMQVYFRMLDALLAEQKMPDEYLNQTQVILCNDCGRKGNAPYHWLYHKCSSCASYNTRLF

SEQ ID NO: 79529 - protein, 1088 aa, Arabidopsis thaliana
  peptide (1)..(1088): Ceres Seq. ID no. 12651703
  misc_feature (854)..(930): Pfam Name: CHY zinc finger Pfam Description: CHY zinc finger
  misc_feature (1)..(579): Homolog of NCBI NO: 15221380 NR Description: hypothetical protein; protein id: At1g74770.1
  misc_feature (1)..(321): Homolog of NCBI NO: 9279663 NR Description: gb|AAD55299.1~gene_id:MIE15.8~similar to unknown
  misc_feature (1)..(321): Homolog of NCBI NO: 15229615 NR Description: zinc finger protein, putative; protein id: supported by cDNA: gi_20453198 [Arabidopsis thaliana] AT3g18290/MIE15_8 [Arabidopsis thaliana]
  misc_feature (768)..(1087): Homolog of NCBI NO: 9279663 NR Description: gb|AAD55299.1~gene_id:MIE15.8~similar to unknown
  misc_feature (768)..(1087): Homolog of NCBI NO: 15229615 NR Description: zinc finger protein, putative; protein id: supported by cDNA: gi_20453198 [Arabidopsis thaliana] AT3g18290/MIE15_8 [Arabidopsis thaliana]
  misc_feature (506)..(679): Homolog of NCBI NO: 9279663 NR Description: gb|AAD55299.1~gene_id:MIE15.8~similar to unknown
  misc_feature (506)..(679): Homolog of NCBI NO: 15229615 NR Description: zinc finger protein, putative; protein id: supported by cDNA: gi_20453198 [Arabidopsis thaliana] AT3g18290/MIE15_8 [Arabidopsis thaliana]
  misc_feature (444)..(544): Homolog of NCBI NO: 9279663 NR Description: gb|AAD55299.1~gene_id:MIE15.8~similar to unknown
  misc_feature (444)..(544): Homolog of NCBI NO: 15229615 NR Description: zinc finger protein, putative; protein id: supported by cDNA: gi_20453198 [Arabidopsis thaliana] AT3g18290/MIE15_8 [Arabidopsis thaliana]
  misc_feature (751)..(1087): Homolog of NCBI NO: 34911328 NR Description: putative zinc finger protein [Oryza sativa
MLKEERQVFPLMIENFSFEEQASLVWQFICSVPVMVLEEIFPWMTSLLSPKEKSEVETCFKEVVPNELSLQLVINSWLIDDSQSSLTALTKIMKGVQSVEVSENMTNSQTNSSSSGVFQRFWQWSKKMSFSSPNTGHILVHGIHLWHNAIRKDLVDIQKGLCQLTFPSLSLDLNVLVVRLNFLADVLIFYSNAFKTFFYPVFEDMVDQQHSSSSKQFTIDGHVENFKKSLDLETRAGSDNFVITLQEKLESLILTVAKQFSIEETEVFPIISKNCNIEMQRQLLYRSIHFLPLGLLKCVIMWFSAQLPEDECQSIIHYLSSEDSFPNKPFAHLLLQWFRFGYSGKTPVESFWNELSFMFKPRCSFEEELTEEASGSFFQQSPQKLFKVSDPYSMDPPAGYMNETPYSSAMNQQILIPGKLRPLLHLPDLFGDKTIGEHLTMDLKPIDLIFYFHKAMKKDLDYLVRGSARLATDYSFLGEFQQRFHLIKFLYQIHSDAEDEIAFPALEAKGKLQNISQSYSIDHELEVEHLNKVSFLLNELAELNMLVLDHKNVKYEKLCMSLQDICKSIHKLLSEHLHREETELWCLFRDCFTIEEQEKIIACMLGRISGEILQDMIPWLMESLIPDEQHAVMSLWRQATRKTMFGEWLTEWYNSHAVEEETEEANKDPSENSDPLDVVWSYLFEGAADEYKGSICSKPLEETELKGIMNKPLGKAAPNNKVEFGNKEENHLEISGSKKVCTGADETKYKEQTDSNAQAFQMSHNTSQSGQDSRYECLLSMSQEDVEATIRRISRDSSLDPQKKSYIIQNLLMSRWIATQRIYNLEPSILSSNREAVPGQNPSYRDPHKLIFGCKHYKRSCKLLAPCCNKLYTCIRCHDEEVDHLLDRKQITKMMCMKCMIIQPVGASCSNISCSSSMGKYYCKICKLFDDDREIYHCPYCNLCRLGKGLSIDYFHCMKCNACMSRLIVEHVCREKCLEDNCPICHEYIFTSNSPVKALPCGHVMHSTCFQEYTCSHYTCPICSKSLGDMQVYFRMLDALLAEQKMPDEYLNQTQVILCNDCGRKGNAPYHWLYHKCSSCASYNTRLF

SEQ ID NO: 79530 - protein, 1077 aa, Arabidopsis thaliana
  peptide (1)..(1077): Ceres Seq. ID no. 12651704
  misc_feature (843)..(919): Pfam Name: CHY zinc finger Pfam Description: CHY zinc finger
  misc_feature (1)..(568): Homolog of NCBI NO: 15221380 NR Description: hypothetical protein; protein id: At1g74770.1
  misc_feature (1)..(310): Homolog of NCBI NO: 9279663 NR Description: gb|AAD55299.1~gene_id:MIE15.8~similar to unknown
  misc_feature (1)..(310): Homolog of NCBI NO: 15229615 NR Description: zinc finger protein, putative; protein id: supported by cDNA: gi_20453198 [Arabidopsis thaliana] AT3g18290/MIE15_8 [Arabidopsis thaliana]
  misc_feature (757)..(1076): Homolog of NCBI NO: 9279663 NR Description: gb|AAD55299.1~gene_id:MIE15.8~similar to unknown
  misc_feature (757)..(1076): Homolog of NCBI NO: 15229615 NR Description: zinc finger protein, putative; protein id: supported by cDNA: gi_20453198 [Arabidopsis thaliana] AT3g18290/MIE15_8 [Arabidopsis thaliana]
  misc_feature (495)..(668): Homolog of NCBI NO: 9279663 NR Description: gb|AAD55299.1~gene_id:MIE15.8~similar to unknown
  misc_feature (495)..(668): Homolog of NCBI NO: 15229615 NR Description: zinc finger protein, putative; protein id: supported by cDNA: gi_20453198 [Arabidopsis thaliana] AT3g18290/MIE15_8 [Arabidopsis thaliana]
  misc_feature (433)..(533): Homolog of NCBI NO: 9279663 NR Description: gb|AAD55299.1~gene_id:MIE15.8~similar to unknown
  misc_feature (433)..(533): Homolog of NCBI NO: 15229615 NR Description: zinc finger protein, putative; protein id: supported by cDNA: gi_20453198 [Arabidopsis thaliana] AT3g18290/MIE15_8 [Arabidopsis thaliana]
  misc_feature (740)..(1076): Homolog of NCBI NO: 34911328 NR Description: putative zinc finger protein [Oryza sativa
MIENFSFEEQASLVWQFICSVPVMVLEEIFPWMTSLLSPKEKSEVETCFKEVVPNELSLQLVINSWLIDDSQSSLTALTKIMKGVQSVEVSENMTNSQTNSSSSGVFQRFWQWSKKMSFSSPNTGHILVHGIHLWHNAIRKDLVDIQKGLCQLTFPSLSLDLNVLVVRLNFLADVLIFYSNAFKTFFYPVFEDMVDQQHSSSSKQFTIDGHVENFKKSLDLETRAGSDNFVITLQEKLESLILTVAKQFSIEETEVFPIISKNCNIEMQRQLLYRSIHFLPLGLLKCVIMWFSAQLPEDECQSIIHYLSSEDSFPNKPFAHLLLQWFRFGYSGKTPVESFWNELSFMFKPRCSFEEELTEEASGSFFQQSPQKLFKVSDPYSMDPPAGYMNETPYSSAMNQQILIPGKLRPLLHLPDLFGDKTIGEHLTMDLKPIDLIFYFHKAMKKDLDYLVRGSARLATDYSFLGEFQQRFHLIKFLYQIHSDAEDEIAFPALEAKGKLQNISQSYSIDHELEVEHLNKVSFLLNELAELNMLVLDHKNVKYEKLCMSLQDICKSIHKLLSEHLHREETELWCLFRDCFTIEEQEKIIACMLGRISGEILQDMIPWLMESLIPDEQHAVMSLWRQATRKTMFGEWLTEWYNSHAVEEETEEANKDPSENSDPLDVVWSYLFEGAADEYKGSICSKPLEETELKGIMNKPLGKAAPNNKVEFGNKEENHLEISGSKKVCTGADETKYKEQTDSNAQAFQMSHNTSQSGQDSRYECLLSMSQEDVEATIRRISRDSSLDPQKKSYIIQNLLMSRWIATQRIYNLEPSILSSNREAVPGQNPSYRDPHKLIFGCKHYKRSCKLLAPCCNKLYTCIRCHDEEVDHLLDRKQITKMMCMKCMIIQPVGASCSNISCSSSMGKYYCKICKLFDDDREIYHCPYCNLCRLGKGLSIDYFHCMKCNACMSRLIVEHVCREKCLEDNCPICHEYIFTSNSPVKALPCGHVMHSTCFQEYTCSHYTCPICSKSLGDMQVYFRMLDALLAEQKMPDEYLNQTQVILCNDCGRKGNAPYHWLYHKCSSCASYNTRLF

SEQ ID NO: 79531 - DNA, 1602 bp, Arabidopsis thaliana
  misc_feature (1)..(1602): Ceres Seq. ID no. 12651745
  misc_feature: MA Experiment ID: 20000184 Result: Down-regulated in Transcription
  misc_feature: MA Experiment 20000184 PARAMETER Experiment Name: At_Shoots__P Parameter: Age (day) Value: 7
  misc_feature: MA Experiment 20000184 PARAMETER Experiment Name: At_Shoots__P Parameter: Tissue Value: Shoots vs. Whole Plant
atggtggagaatttgtttccttctcgatttcaatttcatcttcagagacttgacccgaagcgtcgtcttacttctctccttgcttctcacaaaacactcttcacatttctctggatcactgcctttggttccgtctttctatggcagcgaacggcttacatcgaaggcggctctggaactggtcctgtcggaggaaagttcacaattttcggtaagatcaaaccgattcagccaattccccgattgagacctgtggtgtttgatttgaaggattttggaggtgttggagatgggtttacgcttaacactgaagcattcgagagagctgtgatttcaatctctaagcttgggggaagtagcggcggaggtcagctgaatgtgccgcctggacggtggcttacggcgccgtttaatctcactagccatatgactctgtttctcgcagaggattccgagattcttggtgttgaggaacataatttaggagattttgagactttgcgtgatggatgtgtgcgtcttgtttacttaacgtgtcactttaattgtcaggatgagaagtattggcctttaatgccaccattgccttcatatggttacggtagagagcgtccgggacctcgttatgggagcttaatccatggtcaaaacctcaaagatattgtgataactggtcataatggaacaataaacgggcaaggacaatcgtggtggaagaagcatcaaagaagacttctcaactatacgagagggcctttagttcaaattatgtggtctagtgacatagttatcgctaacattacaatgcgtgactcaccgttctggactctgcatccatatgactgcaaaaatgtaacaataaggaatgtcaccatcttggctcctgtaaccggagcaccaaacactgatggaattgatccagattcgtgcgaggatatggtaattgaggactgttacattagcaccggggatgatgcgatcgcgataaagagtggatgggatcagtttgggattgcatatggacgaccttcaacaaacattcttattcgtaatctcgttgttcgctctgttatcagtgctggtgtatcaatcggaagcgaaatgtctggtggaatatctaatgtgacgatcgagaaccttctgatctggaactcacgccgtggaatcagaattaaaacggctccaggacgaggcggttacatcagaaacataacctacaaaaacctaacactagacaatgttcgggttgggatagtgatcaaaacggattacaacgagcatgcagacgataattatgatcggaaagcatacccgatactttcgggattcagtttcgcgggaatccacggacaaggagtgcgagtgccggtccggatccatggaagcgaacagattccggtaaggaatgtgacgtttcgggacatgtccgttgggttaacgtacaagaagaaacatatattccaatgttcgttcgtgaaaggacgagtgttcggttcgatatttcctcgaccttgcgagaattttgatgtttacgacgaggaaggtcgtctggttaagcctgcagctgagtccaatgtggcggacattgactacgacatttga

SEQ ID NO: 79532 - protein, 533 aa, Arabidopsis thaliana
  peptide (1)..(533): Ceres Seq. ID no. 12651746
  misc_feature (184)..(505): Pfam Name: Glycosyl hydrolases family 28 Pfam Description: Glycosyl hydrolases family 28
  misc_feature (1)..(533): Homolog of NCBI NO: 25518077 NR Description: T29M8.4 protein - Arabidopsis thaliana
  misc_feature (184)..(533): Homolog of NCBI NO: 15221958 NR Description: polygalacturonase, putative; protein id:
  misc_feature (1)..(158): Homolog of NCBI NO: 15221958 NR Description: polygalacturonase, putative; protein id:
  misc_feature (184)..(533): Homolog of NCBI NO: 19698861 NR Description: unknown protein [Arabidopsis thaliana]
  misc_feature (1)..(158): Homolog of NCBI NO: 19698861 NR Description: unknown protein [Arabidopsis thaliana]
  misc_feature (184)..(533): Homolog of NCBI NO: 15229188 NR Description: polygalacturonase, putative; protein id: supported by cDNA: gi_15215708 [Arabidopsis thaliana]
  misc_feature (27)..(158): Homolog of NCBI NO: 15229188 NR Description: polygalacturonase, putative; protein id: supported by cDNA: gi_15215708 [Arabidopsis thaliana]
  misc_feature (184)..(533): Homolog of NCBI NO: 23506093 NR Description: At3g42950/F18P9_110 [Arabidopsis thaliana]
  misc_feature (27)..(158): Homolog of NCBI NO: 23506093 NR Description: At3g42950/F18P9_110 [Arabidopsis thaliana]
  misc_feature (185)..(506): Homolog of NCBI NO: 40714685 NR Description: putative polygalacturonase [Oryza sativa
MVENLFPSRFQFHLQRLDPKRRLTSLLASHKTLFTFLWITAFGSVFLWQRTAYIEGGSGTGPVGGKFTIFGKIKPIQPIPRLRPVVFDLKDFGGVGDGFTLNTEAFERAVISISKLGGSSGGGQLNVPPGRWLTAPFNLTSHMTLFLAEDSEILGVEEHNLGDFETLRDGCVRLVYLTCHFNCQDEKYWPLMPPLPSYGYGRERPGPRYGSLIHGQNLKDIVITGHNGTINGQGQSWWKKHQRRLLNYTRGPLVQIMWSSDIVIANITMRDSPFWTLHPYDCKNVTIRNVTILAPVTGAPNTDGIDPDSCEDMVIEDCYISTGDDAIAIKSGWDQFGIAYGRPSTNILIRNLVVRSVISAGVSIGSEMSGGISNVTIENLLIWNSRRGIRIKTAPGRGGYIRNITYKNLTLDNVRVGIVIKTDYNEHADDNYDRKAYPILSGFSFAGIHGQGVRVPVRIHGSEQIPVRNVTFRDMSVGLTYKKKHIFQCSFVKGRVFGSIFPRPCENFDVYDEEGRLVKPAAESNVADIDYDI

SEQ ID NO: 79533 - protein, 391 aa, Arabidopsis thaliana
  peptide (1)..(391): Ceres Seq. ID no. 12651747
  misc_feature (42)..(363): Pfam Name: Glycosyl hydrolases family 28 Pfam Description: Glycosyl hydrolases family 28
  misc_feature (1)..(391): Homolog of NCBI NO: 25518077 NR Description: T29M8.4 protein - Arabidopsis thaliana
  misc_feature (42)..(391): Homolog of NCBI NO: 15221958 NR Description: polygalacturonase, putative; protein id:
  misc_feature (1)..(16): Homolog of NCBI NO: 15221958 NR Description: polygalacturonase, putative; protein id:
  misc_feature (42)..(391): Homolog of NCBI NO: 19698861 NR Description: unknown protein [Arabidopsis thaliana]
  misc_feature (1)..(16): Homolog of NCBI NO: 19698861 NR Description: unknown protein [Arabidopsis thaliana]
  misc_feature (42)..(391): Homolog of NCBI NO: 15229188 NR Description: polygalacturonase, putative; protein id: supported by cDNA: gi_15215708 [Arabidopsis thaliana]
  misc_feature (1)..(16): Homolog of NCBI NO: 15229188 NR Description: polygalacturonase, putative; protein id: supported by cDNA: gi_15215708 [Arabidopsis thaliana]
  misc_feature (42)..(391): Homolog of NCBI NO: 23506093 NR Description: At3g42950/F18P9_110 [Arabidopsis thaliana]
  misc_feature (1)..(16): Homolog of NCBI NO: 23506093 NR Description: At3g42950/F18P9_110 [Arabidopsis thaliana]
  misc_feature (43)..(364): Homolog of NCBI NO: 40714685 NR Description: putative polygalacturonase [Oryza sativa
MTLFLAEDSEILGVEEHNLGDFETLRDGCVRLVYLTCHFNCQDEKYWPLMPPLPSYGYGRERPGPRYGSLIHGQNLKDIVITGHNGTINGQGQSWWKKHQRRLLNYTRGPLVQIMWSSDIVIANITMRDSPFWTLHPYDCKNVTIRNVTILAPVTGAPNTDGIDPDSCEDMVIEDCYISTGDDAIAIKSGWDQFGIAYGRPSTNILIRNLVVRSVISAGVSIGSEMSGGISNVTIENLLIWNSRRGIRIKTAPGRGGYIRNITYKNLTLDNVRVGIVIKTDYNEHADDNYDRKAYPILSGFSFAGIHGQGVRVPVRIHGSEQIPVRNVTFRDMSVGLTYKKKHIFQCSFVKGRVFGSIFPRPCENFDVYDEEGRLVKPAAESNVADIDYDI

SEQ ID NO: 79534 - protein, 342 aa, Arabidopsis thaliana
  peptide (1)..(342): Ceres Seq. ID no. 12651748
  misc_feature (1)..(314): Pfam Name: Glycosyl hydrolases family 28 Pfam Description: Glycosyl hydrolases family 28
  misc_feature (1)..(342): Homolog of NCBI NO: 25518077 NR Description: T29M8.4 protein - Arabidopsis thaliana
  misc_feature (1)..(342): Homolog of NCBI NO: 15221958 NR Description: polygalacturonase, putative; protein id:
  misc_feature (1)..(342): Homolog of NCBI NO: 19698861 NR Description: unknown protein [Arabidopsis thaliana]
  misc_feature (1)..(342): Homolog of NCBI NO: 15229188 NR Description: polygalacturonase, putative; protein id: supported by cDNA: gi_15215708 [Arabidopsis thaliana]
  misc_feature (1)..(342): Homolog of NCBI NO: 23506093 NR Description: At3g42950/F18P9_110 [Arabidopsis thaliana]
  misc_feature (1)..(315): Homolog of NCBI NO: 40714685 NR Description: putative polygalacturonase [Oryza sativa
  misc_feature (1)..(315): Homolog of NCBI NO: 34897760 NR Description: ESTs AU029388(E30287),D49277(S16474) correspond a region of the predicted gene.~Similar to Arabidopsis thaliana
  misc_feature (1)..(314): Homolog of NCBI NO: 34912726 NR Description: putative polygalacturonase [Oryza sativa cultivar- group)] >gi|15623906|dbj|BAB67963.1| putative
  misc_feature (1)..(303): Homolog of NCBI NO: 11263971 NR Description: hypothetical protein T17J13.70 - Arabidopsis >gi|6899921|emb|CAB71871.1| putative protein [Arabidopsis
  misc_feature (1)..(303): Homolog of NCBI NO: 18412253 NR Description: polygalacturonase, putative; protein id: supported by cDNA: gi_13358184 [Arabidopsis thaliana] AT3g62110 [Arabidopsis thaliana] >gi|23397166|gb|AAN31866.1|
MPPLPSYGYGRERPGPRYGSLIHGQNLKDIVITGHNGTINGQGQSWWKKHQRRLLNYTRGPLVQIMWSSDIVIANITMRDSPFWTLHPYDCKNVTIRNVTILAPVTGAPNTDGIDPDSCEDMVIEDCYISTGDDAIAIKSGWDQFGIAYGRPSTNILIRNLVVRSVISAGVSIGSEMSGGISNVTIENLLIWNSRRGIRIKTAPGRGGYIRNITYKNLTLDNVRVGIVIKTDYNEHADDNYDRKAYPILSGFSFAGIHGQGVRVPVRIHGSEQIPVRNVTFRDMSVGLTYKKKHIFQCSFVKGRVFGSIFPRPCENFDVYDEEGRLVKPAAESNVADIDYDI

SEQ ID NO: 79535 - DNA, 903 bp, Arabidopsis thaliana
  misc_feature (1)..(903): Ceres Seq. ID no. 12651770
  misc_feature: MA Experiment ID: 20000180 Result: Up-regulated in Transcription
  misc_feature: MA Experiment 20000180 PARAMETER Experiment Name: At_Germinating_Seeds_P Parameter: Age (hr) Value: 24 vs. 0
  misc_feature: MA Experiment 20000180 PARAMETER Experiment Name: At_Germinating_Seeds_P Parameter: Tissue Value: Germinating Seeds
  misc_feature: MA Experiment ID: 20000184 Result: Down-regulated in Transcription
  misc_feature: MA Experiment 20000184 PARAMETER Experiment Name: At_Shoots__P Parameter: Age (day) Value: 7
  misc_feature: MA Experiment 20000184 PARAMETER Experiment Name: At_Shoots__P Parameter: Tissue Value: Shoots vs. Whole Plant
  misc_feature: MA Experiment ID: 20000185 Result: Down-regulated in Transcription
  misc_feature: MA Experiment 20000185 PARAMETER Experiment Name: At_Roots__P Parameter: Age (day) Value: 7 vs. 21
  misc_feature: MA Experiment 20000185 PARAMETER Experiment Name: At_Roots__P Parameter: Organism Value: A. thaliana
  misc_feature: MA Experiment 20000185 PARAMETER Experiment Name: At_Roots__P Parameter: Tissue Value: Roots vs. Whole Plant
  misc_feature: MA Experiment ID: 20000234 Result: Down-regulated in Transcription
  misc_feature: MA Experiment 20000234 PARAMETER Experiment Name: At_Siliques_P Parameter: Age (day) Value: 21
  misc_feature: MA Experiment 20000234 PARAMETER Experiment Name: At_Siliques_P Parameter: Organism Value: A. thaliana
  misc_feature: MA Experiment 20000234 PARAMETER Experiment Name: At_Siliques_P Parameter: Plant Line Value: WS
  misc_feature: MA Experiment 20000234 PARAMETER Experiment Name: At_Siliques_P Parameter: Tissue Value: Less Than 5mm Siliques vs. Whole Plant
  misc_feature: MA Experiment ID: 20000235 Result: Down-regulated in Transcription
  misc_feature: MA Experiment 20000235 PARAMETER Experiment Name: At_Siliques_P Parameter: Age (day) Value: 21
  misc_feature: MA Experiment 20000235 PARAMETER Experiment Name: At_Siliques_P Parameter: Organism Value: A. thaliana
  misc_feature: MA Experiment 20000235 PARAMETER Experiment Name: At_Siliques_P Parameter: Plant Line Value: WS
  misc_feature: MA Experiment 20000235 PARAMETER Experiment Name: At_Siliques_P Parameter: Tissue Value: 5-10mm Siliques vs. Whole Plant
  misc_feature: MA Experiment ID: 20000265 Result: Down-regulated in Transcription
  misc_feature: MA Experiment 20000265 PARAMETER Experiment Name: At_Open_Flower_P Parameter: Age (day) Value: 21
  misc_feature: MA Experiment 20000265 PARAMETER Experiment Name: At_Open_Flower_P Parameter: Plant Line Value: WS
  misc_feature: MA Experiment 20000265 PARAMETER Experiment Name: At_Open_Flower_P Parameter: Tissue Value: Closed Flower vs. Whole Plant
  misc_feature: MA Experiment ID: 20000267 Result: Up-regulated in Transcription
  misc_feature: MA Experiment 20000267 PARAMETER Experiment Name: At_Drought_P Parameter: Age (day) Value: 7
  misc_feature: MA Experiment 20000267 PARAMETER Experiment Name: At_Drought_P Parameter: Organism Value: A. thaliana
  misc_feature: MA Experiment 20000267 PARAMETER Experiment Name: At_Drought_P Parameter: Plant Line Value: WS
  misc_feature: MA Experiment 20000267 PARAMETER Experiment Name: At_Drought_P Parameter: Timepoint (hr) Value: 6
  misc_feature: MA Experiment 20000267 PARAMETER Experiment Name: At_Drought_P Parameter: Tissue Value: Whole Plant
  misc_feature: MA Experiment 20000267 PARAMETER Experiment Name: At_Drought_P Parameter: Treatment Value: Drought vs. No Drought
  misc_feature: MA Experiment ID: 20000268 Result: Up-regulated in Transcription
  misc_feature: MA Experiment 20000268 PARAMETER Experiment Name: At_100mM_NaCl__P Parameter: Age (day) Value: 14
  misc_feature: MA Experiment 20000268 PARAMETER Experiment Name: At_100mM_NaCl__P Parameter: Organism Value: A. thaliana
  misc_feature: MA Experiment 20000268 PARAMETER Experiment Name: At_100mM_NaCl__P Parameter: Plant Line Value: WS
  misc_feature: MA Experiment 20000268 PARAMETER Experiment Name: At_100mM_NaCl__P Parameter: Timepoint (hr) Value: 6
  misc_feature: MA Experiment 20000268 PARAMETER Experiment Name: At_100mM_NaCl__P Parameter: Tissue Value: Whole Plant
  misc_feature: MA Experiment 20000268 PARAMETER Experiment Name: At_100mM_NaCl__P Parameter: Treatment Value: 100mM NaCl vs. No Treatment
  misc_feature: MA Experiment ID: 20000436 Result: Up-regulated in Transcription
  misc_feature: MA Experiment 20000436 PARAMETER Experiment Name: At_Drought_P Parameter: Age (day) Value: 7
  misc_feature: MA Experiment 20000436 PARAMETER Experiment Name: At_Drought_P Parameter: Organism Value: A. thaliana
  misc_feature: MA Experiment 20000436 PARAMETER Experiment Name: At_Drought_P Parameter: Plant Line Value: WS
  misc_feature: MA Experiment 20000436 PARAMETER Experiment Name: At_Drought_P Parameter: Timepoint (hr) Value: 12
  misc_feature: MA Experiment 20000436 PARAMETER Experiment Name: At_Drought_P Parameter: Tissue Value: Whole Plant
  misc_feature: MA Experiment 20000436 PARAMETER Experiment Name: At_Drought_P Parameter: Treatment Value: Drought vs. No Drought
  misc_feature: MA Experiment ID: 20000437 Result: Up-regulated in Transcription
  misc_feature: MA Experiment 20000437 PARAMETER Experiment Name: At_Drought_P Parameter: Age (day) Value: 8
  misc_feature: MA Experiment 20000437 PARAMETER Experiment Name: At_Drought_P Parameter: Organism Value: A. thaliana
  misc_feature: MA Experiment 20000437 PARAMETER Experiment Name: At_Drought_P Parameter: Plant Line Value: WS
  misc_feature: MA Experiment 20000437 PARAMETER Experiment Name: At_Drought_P Parameter: Timepoint (hr) Value: 24
  misc_feature: MA Experiment 20000437 PARAMETER Experiment Name: At_Drought_P Parameter: Tissue Value: Whole Plant
  misc_feature: MA Experiment 20000437 PARAMETER Experiment Name: At_Drought_P Parameter: Treatment Value: Drought vs. No Drought
  misc_feature: MA Experiment ID: 20000438 Result: Down-regulated in Transcription
  misc_feature: MA Experiment 20000438 PARAMETER Experiment Name: At_Shoots__P Parameter: Age (day) Value: 14
  misc_feature: MA Experiment 20000438 PARAMETER Experiment Name: At_Shoots__P Parameter: Tissue Value: Shoots vs. Whole Plant
  misc_feature: MA Experiment ID: 20000453 Result: Up-regulated in Transcription
  misc_feature: MA Experiment 20000453 PARAMETER Experiment Name: At_100uM_ABA_P Parameter: Age (day) Value: 15
  misc_feature: MA Experiment 20000453 PARAMETER Experiment Name: At_100uM_ABA_P Parameter: Organism Value: A. thaliana
  misc_feature: MA Experiment 20000453 PARAMETER Experiment Name: At_100uM_ABA_P Parameter: Plant Line Value: WS
  misc_feature: MA Experiment 20000453 PARAMETER Experiment Name: At_100uM_ABA_P Parameter: Timepoint (hr) Value: 24
  misc_feature: MA Experiment 20000453 PARAMETER Experiment Name: At_100uM_ABA_P Parameter: Tissue Value: Aerial
  misc_feature: MA Experiment 20000453 PARAMETER Experiment Name: At_100uM_ABA_P Parameter: Treatment Value: 100uM ABA vs. No Treatment
  misc_feature: MA Experiment ID: 20000794 Result: Up-regulated in Transcription
  misc_feature: MA Experiment 20000794 PARAMETER Experiment Name: At_Petals_P Parameter: Age (day) Value: 23-25 days
  misc_feature: MA Experiment 20000794 PARAMETER Experiment Name: At_Petals_P Parameter: Plant Line Value: WS
  misc_feature: MA Experiment 20000794 PARAMETER Experiment Name: At_Petals_P Parameter: Tissue Value: Petals vs. Whole plant
  misc_feature: MA Experiment ID: 20001554 Result: Up-regulated in Transcription
  misc_feature: MA Experiment 20001554 PARAMETER Experiment Name: At_Drought_Soil_Dry_P Parameter: Age (day) Value: 21
  misc_feature: MA Experiment 20001554 PARAMETER Experiment Name: At_Drought_Soil_Dry_P Parameter: Organism Value: A. thaliana
  misc_feature: MA Experiment 20001554 PARAMETER Experiment Name: At_Drought_Soil_Dry_P Parameter: Plant Line Value: WS
  misc_feature: MA Experiment 20001554 PARAMETER Experiment Name: At_Drought_Soil_Dry_P Parameter: Post Timepoint (hr) Value: None
  misc_feature: MA Experiment 20001554 PARAMETER Experiment Name: At_Drought_Soil_Dry_P Parameter: Post-Treatment Value: None
  misc_feature: MA Experiment 20001554 PARAMETER Experiment Name: At_Drought_Soil_Dry_P Parameter: Timepoint (day) Value: 7
  misc_feature: MA Experiment 20001554 PARAMETER Experiment Name: At_Drought_Soil_Dry_P Parameter: Treatment Value: Drought vs. No Drought
  misc_feature: MA Experiment ID: 20001555 Result: Up-regulated in Transcription
  misc_feature: MA Experiment 20001555 PARAMETER Experiment Name: At_Drought_Soil_Dry_P Parameter: Age (day) Value: 24
  misc_feature: MA Experiment 20001555 PARAMETER Experiment Name: At_Drought_Soil_Dry_P Parameter: Organism Value: A. thaliana
  misc_feature: MA Experiment 20001555 PARAMETER Experiment Name: At_Drought_Soil_Dry_P Parameter: Plant Line Value: WS
  misc_feature: MA Experiment 20001555 PARAMETER Experiment Name: At_Drought_Soil_Dry_P Parameter: Post Timepoint (hr) Value: None
  misc_feature: MA Experiment 20001555 PARAMETER Experiment Name: At_Drought_Soil_Dry_P Parameter: Post-Treatment Value: None
  misc_feature: MA Experiment 20001555 PARAMETER Experiment Name: At_Drought_Soil_Dry_P Parameter: Timepoint (day) Value: 10
  misc_feature: MA Experiment 20001555 PARAMETER Experiment Name: At_Drought_Soil_Dry_P Parameter: Treatment Value: Drought vs. No Drought
  misc_feature: MA Experiment ID: 20001556 Result: Up-regulated in Transcription
  misc_feature: MA Experiment 20001556 PARAMETER Experiment Name: At_Drought_Soil_Dry_P Parameter: Age (day) Value: 26
  misc_feature: MA Experiment 20001556 PARAMETER Experiment Name: At_Drought_Soil_Dry_P Parameter: Organism Value: A. thaliana
  misc_feature: MA Experiment 20001556 PARAMETER Experiment Name: At_Drought_Soil_Dry_P Parameter: Plant Line Value: WS
  misc_feature: MA Experiment 20001556 PARAMETER Experiment Name: At_Drought_Soil_Dry_P Parameter: Post Timepoint (hr) Value: None
  misc_feature: MA Experiment 20001556 PARAMETER Experiment Name: At_Drought_Soil_Dry_P Parameter: Post-Treatment Value: None
  misc_feature: MA Experiment 20001556 PARAMETER Experiment Name: At_Drought_Soil_Dry_P Parameter: Timepoint (day) Value: 12
  misc_feature: MA Experiment 20001556 PARAMETER Experiment Name: At_Drought_Soil_Dry_P Parameter: Treatment Value: Drought vs. No Drought
  misc_feature: MA Experiment ID: 20001904 Result: Up-regulated in Transcription
  misc_feature: MA Experiment 20001904 PARAMETER Experiment Name: At_Drought_Reproduction_P Parameter: Age (day) Value: 37
  misc_feature: MA Experiment 20001904 PARAMETER Experiment Name: At_Drought_Reproduction_P Parameter: Organism Value: A. thaliana
  misc_feature: MA Experiment 20001904 PARAMETER Experiment Name: At_Drought_Reproduction_P Parameter: Plant Line Value: WS
  misc_feature: MA Experiment 20001904 PARAMETER Experiment Name: At_Drought_Reproduction_P Parameter: Timepoint (day) Value: 7
  misc_feature: MA Experiment 20001904 PARAMETER Experiment Name: At_Drought_Reproduction_P Parameter: Tissue Value: Rosettes
  misc_feature: MA Experiment 20001904 PARAMETER Experiment Name: At_Drought_Reproduction_P Parameter: Treatment Value: Drought vs. No Drought
  misc_feature: MA Experiment ID: 20001911 Result: Up-regulated in Transcription
  misc_feature: MA Experiment 20001911 PARAMETER Experiment Name: At_Drought_Reproduction_P Parameter: Age (day) Value: 40
  misc_feature: MA Experiment 20001911 PARAMETER Experiment Name: At_Drought_Reproduction_P Parameter: Organism Value: A. thaliana
  misc_feature: MA Experiment 20001911 PARAMETER Experiment Name: At_Drought_Reproduction_P Parameter: Plant Line Value: WS
  misc_feature: MA Experiment 20001911 PARAMETER Experiment Name: At_Drought_Reproduction_P Parameter: Timepoint (day) Value: 10
  misc_feature: MA Experiment 20001911 PARAMETER Experiment Name: At_Drought_Reproduction_P Parameter: Tissue Value: Flowers
  misc_feature: MA Experiment 20001911 PARAMETER Experiment Name: At_Drought_Reproduction_P Parameter: Treatment Value: Drought vs. No Drought
tgtccattccgagaactctctccctcattaattaaaatctttctcagagcaatcttctcacaagtttctaagaatctcaaagcatgaatataagtagaacagaattcgcaaactgtaaaacccttataaatcataaagaagaagtcgaagaagtcgagaaaaagatggaaatagaaataaggagaggtccatggactgtggaagaagacatgaagctcgtcagttacatttctcttcacggtgaaggaagatggaactccctctctcgttctgctggactgaatagaacggggaaaagttgcagattgcggtggctaaattatctccggccggatatccgccgtggagacatatcccttcaagaacaatttatcatccttgaactccattctcgttggggaaatcggtggtcaaagattgctcaacatttaccgggaagaacagataacgagataaagaattattggagaacacgtgttcaaaagcatgcaaaacttctaaaatgtgacgtgaacagcaagcaattcaaagacaccatcaaacatctctggatgcctcgtctcatcgagagaatcgccgccactcaaagtgtccaatttacctctaaccactactcgcctgagaactccagcgtcgccaccgccacgtcatcaacgtcgtcgtctgaggctgtgagatcgagtttctacggtggtgatcaggtggaatttggaacgttggatcatatgacaaatggtggttattggttcaacggcggagatacgtttgaaactttgtgtagttttgacgagctcaacaagtggctcatacagtaggcatttcatgggtttattaatgaatgtaatgtataataaacataaactaatcattcaaaacaaaattaaaggttttccgggttttttt

SEQ ID NO: 79536 - protein, 243 aa, Arabidopsis thaliana
  peptide (1)..(243): Ceres Seq. ID no. 12651771
  misc_feature (34)..(81): Pfam Name: Myb-like DNA-binding domain Pfam Description: Myb-like DNA-binding domain
  misc_feature (1)..(243): Homolog of NCBI NO: 18401993 NR Description: myb family transcription factor; protein id: supported by cDNA: gi_15375307 [Arabidopsis thaliana]
  misc_feature (28)..(243): Homolog of NCBI NO: 25294098 NR Description: hypothetical protein T2J15.9 [imported] -
  misc_feature (29)..(220): Homolog of NCBI NO: 15230731 NR Description: myb family transcription factor (MYB108); protein At3g06490.1 [Arabidopsis thaliana] putative transcription factor MYB108 [Arabidopsis thaliana]
  misc_feature (15)..(205): Homolog of NCBI NO: 7446185 NR Description: dehydration-induced myb-related protein Cpm7 - plantagineum >gi|1002800|gb|AAB58314.1| Cpm7 [Craterostigma
  misc_feature (31)..(205): Homolog of NCBI NO: 7446183 NR Description: ABA-induced myb-related protein Cpm10 -
  misc_feature (15)..(174): Homolog of NCBI NO: 15240518 NR Description: myb family transcription factor; protein id:
  misc_feature (31)..(205): Homolog of NCBI NO: 7446184 NR Description: myb-related protein Cpm5 - Craterostigma
  misc_feature (31)..(185): Homolog of NCBI NO: 19073328 NR Description: typical P-type R2R3 Myb protein [Sorghum bicolor]
  misc_feature (19)..(191): Homolog of NCBI NO: 13177578 NR Description: Myb transcription factor JAMyb [Oryza sativa]
  misc_feature (31)..(197): Homolog of NCBI NO: 34898110 NR Description: putative typical P-type R2R3 Myb protein [Oryza
MNISRTEFANCKTLINHKEEVEEVEKKMEIEIRRGPWTVEEDMKLVSYISLHGEGRWNSLSRSAGLNRTGKSCRLRWLNYLRPDIRRGDISLQEQFIILELHSRWGNRWSKIAQHLPGRTDNEIKNYWRTRVQKHAKLLKCDVNSKQFKDTIKHLWMPRLIERIAATQSVQFTSNHYSPENSSVATATSSTSSSEAVRSSFYGGDQVEFGTLDHMTNGGYWFNGGDTFETLCSFDELNKWLIQ

SEQ ID NO: 79537 - protein, 216 aa, Arabidopsis thaliana
  peptide (1)..(216): Ceres Seq. ID no. 12651772
  misc_feature (7)..(54): Pfam Name: Myb-like DNA-binding domain Pfam Description: Myb-like DNA-binding domain
  misc_feature (1)..(216): Homolog of NCBI NO: 18401993 NR Description: myb family transcription factor; protein id: supported by cDNA: gi_15375307 [Arabidopsis thaliana]
  misc_feature (1)..(216): Homolog of NCBI NO: 25294098 NR Description: hypothetical protein T2J15.9 [imported] -
  misc_feature (2)..(193): Homolog of NCBI NO: 15230731 NR Description: myb family transcription factor (MYB108); protein At3g06490.1 [Arabidopsis thaliana] putative transcription factor MYB108 [Arabidopsis thaliana]
  misc_feature (1)..(178): Homolog of NCBI NO: 7446185 NR Description: dehydration-induced myb-related protein Cpm7 - plantagineum >gi|1002800|gb|AAB58314.1| Cpm7 [Craterostigma
  misc_feature (4)..(178): Homolog of NCBI NO: 7446183 NR Description: ABA-induced myb-related protein Cpm10 -
  misc_feature (1)..(147): Homolog of NCBI NO: 15240518 NR Description: myb family transcription factor; protein id:
  misc_feature (4)..(178): Homolog of NCBI NO: 7446184 NR Description: myb-related protein Cpm5 - Craterostigma
  misc_feature (4)..(158): Homolog of NCBI NO: 19073328 NR Description: typical P-type R2R3 Myb protein [Sorghum bicolor]
  misc_feature (1)..(164): Homolog of NCBI NO: 13177578 NR Description: Myb transcription factor JAMyb [Oryza sativa]
  misc_feature (4)..(170): Homolog of NCBI NO: 34898110 NR Description: putative typical P-type R2R3 Myb protein [Oryza
MEIEIRRGPWTVEEDMKLVSYISLHGEGRWNSLSRSAGLNRTGKSCRLRWLNYLRPDIRRGDISLQEQFIILELHSRWGNRWSKIAQHLPGRTDNEIKNYWRTRVQKHAKLLKCDVNSKQFKDTIKHLWMPRLIERIAATQSVQFTSNHYSPENSSVATATSSTSSSEAVRSSFYGGDQVEFGTLDHMTNGGYWFNGGDTFETLCSFDELNKWLIQ

SEQ ID NO: 79538 - protein, 201 aa, Arabidopsis thaliana
  peptide (1)..(201): Ceres Seq. ID no. 12651773
  misc_feature (1)..(39): Pfam Name: Myb-like DNA-binding domain Pfam Description: Myb-like DNA-binding domain
  misc_feature (1)..(201): Homolog of NCBI NO: 18401993 NR Description: myb family transcription factor; protein id: supported by cDNA: gi_15375307 [Arabidopsis thaliana]
  misc_feature (1)..(201): Homolog of NCBI NO: 25294098 NR Description: hypothetical protein T2J15.9 [imported] -
  misc_feature (1)..(178): Homolog of NCBI NO: 15230731 NR Description: myb family transcription factor (MYB108); protein At3g06490.1 [Arabidopsis thaliana] putative transcription factor MYB108 [Arabidopsis thaliana]
  misc_feature (1)..(163): Homolog of NCBI NO: 7446185 NR Description: dehydration-induced myb-related protein Cpm7 - plantagineum >gi|1002800|gb|AAB58314.1| Cpm7 [Craterostigma
  misc_feature (1)..(163): Homolog of NCBI NO: 7446183 NR Description: ABA-induced myb-related protein Cpm10 -
  misc_feature (1)..(132): Homolog of NCBI NO: 15240518 NR Description: myb family transcription factor; protein id:
  misc_feature (1)..(163): Homolog of NCBI NO: 7446184 NR Description: myb-related protein Cpm5 - Craterostigma
  misc_feature (1)..(143): Homolog of NCBI NO: 19073328 NR Description: typical P-type R2R3 Myb protein [Sorghum bicolor]
  misc_feature (1)..(149): Homolog of NCBI NO: 13177578 NR Description: Myb transcription factor JAMyb [Oryza sativa]
  misc_feature (1)..(155): Homolog of NCBI NO: 34898110 NR Description: putative typical P-type R2R3 Myb protein [Oryza
MKLVSYISLHGEGRWNSLSRSAGLNRTGKSCRLRWLNYLRPDIRRGDISLQEQFIILELHSRWGNRWSKIAQHLPGRTDNEIKNYWRTRVQKHAKLLKCDVNSKQFKDTIKHLWMPRLIERIAATQSVQFTSNHYSPENSSVATATSSTSSSEAVRSSFYGGDQVEFGTLDHMTNGGYWFNGGDTFETLCSFDELNKWLIQ

SEQ ID NO: 79539 - DNA, 1299 bp, Arabidopsis thaliana
  misc_feature (1)..(1299): Ceres Seq. ID no. 12651823
  misc_feature: MA Experiment ID: 20000180 Result: Up-regulated in Transcription
  misc_feature: MA Experiment 20000180 PARAMETER Experiment Name: At_Germinating_Seeds_P Parameter: Age (hr) Value: 24 vs. 0
  misc_feature: MA Experiment 20000180 PARAMETER Experiment Name: At_Germinating_Seeds_P Parameter: Tissue Value: Germinating Seeds
  misc_feature: MA Experiment ID: 20000184 Result: Down-regulated in Transcription
  misc_feature: MA Experiment 20000184 PARAMETER Experiment Name: At_Shoots__P Parameter: Age (day) Value: 7
  misc_feature: MA Experiment 20000184 PARAMETER Experiment Name: At_Shoots__P Parameter: Tissue Value: Shoots vs. Whole Plant
  misc_feature: MA Experiment ID: 20000235 Result: Down-regulated in Transcription
  misc_feature: MA Experiment 20000235 PARAMETER Experiment Name: At_Siliques_P Parameter: Age (day) Value: 21
  misc_feature: MA Experiment 20000235 PARAMETER Experiment Name: At_Siliques_P Parameter: Organism Value: A. thaliana
  misc_feature: MA Experiment 20000235 PARAMETER Experiment Name: At_Siliques_P Parameter: Plant Line Value: WS
  misc_feature: MA Experiment 20000235 PARAMETER Experiment Name: At_Siliques_P Parameter: Tissue Value: 5-10mm Siliques vs. Whole Plant
  misc_feature: MA Experiment ID: 20000437 Result: Down-regulated in Transcription
  misc_feature: MA Experiment 20000437 PARAMETER Experiment Name: At_Drought_P Parameter: Age (day) Value: 8
  misc_feature: MA Experiment 20000437 PARAMETER Experiment Name: At_Drought_P Parameter: Organism Value: A. thaliana
  misc_feature: MA Experiment 20000437 PARAMETER Experiment Name: At_Drought_P Parameter: Plant Line Value: WS
  misc_feature: MA Experiment 20000437 PARAMETER Experiment Name: At_Drought_P Parameter: Timepoint (hr) Value: 24
  misc_feature: MA Experiment 20000437 PARAMETER Experiment Name: At_Drought_P Parameter: Tissue Value: Whole Plant
  misc_feature: MA Experiment 20000437 PARAMETER Experiment Name: At_Drought_P Parameter: Treatment Value: Drought vs. No Drought
  misc_feature: MA Experiment ID: 20000456 Result: Down-regulated in Transcription
  misc_feature: MA Experiment 20000456 PARAMETER Experiment Name: At_100uM_BA_P Parameter: Age (day) Value: 14
  misc_feature: MA Experiment 20000456 PARAMETER Experiment Name: At_100uM_BA_P Parameter: Organism Value: A. thaliana
  misc_feature: MA Experiment 20000456 PARAMETER Experiment Name: At_100uM_BA_P Parameter: Plant Line Value: WS
  misc_feature: MA Experiment 20000456 PARAMETER Experiment Name: At_100uM_BA_P Parameter: Timepoint (hr) Value: 6
  misc_feature: MA Experiment 20000456 PARAMETER Experiment Name: At_100uM_BA_P Parameter: Tissue Value: Aerial
  misc_feature: MA Experiment 20000456 PARAMETER Experiment Name: At_100uM_BA_P Parameter: Treatment Value: 100uM BA vs. No Treatment
  misc_feature: MA Experiment ID: 20000495 Result: Down-regulated in Transcription
  misc_feature: MA Experiment 20000495 PARAMETER Experiment Name: At_Guard_Cells_P Parameter: Harvest Date Value: 8/2/2002
  misc_feature: MA Experiment 20000495 PARAMETER Experiment Name: At_Guard_Cells_P Parameter: Organism Value: A. thaliana
  misc_feature: MA Experiment 20000495 PARAMETER Experiment Name: At_Guard_Cells_P Parameter: Tissue Value: Guard Cells vs. Leaves
  misc_feature: MA Experiment ID: 20000573 Result: Down-regulated in Transcription
  misc_feature: MA Experiment 20000573 PARAMETER Experiment Name: At_100uM_ABA_Mutants__P Parameter: Organism Value: A. thaliana
  misc_feature: MA Experiment 20000573 PARAMETER Experiment Name: At_100uM_ABA_Mutants__P Parameter: Plant Line Value: CS22 vs. Ler wt
  misc_feature: MA Experiment 20000573 PARAMETER Experiment Name: At_100uM_ABA_Mutants__P Parameter: Timepoint (hr) Value: N/A
  misc_feature: MA Experiment 20000573 PARAMETER Experiment Name: At_100uM_ABA_Mutants__P Parameter: Tissue Value: Whole Plant
  misc_feature: MA Experiment 20000573 PARAMETER Experiment Name: At_100uM_ABA_Mutants__P Parameter: Treatment Value: None
  misc_feature: MA Experiment ID: 20001248 Result: Down-regulated in Transcription
  misc_feature: MA Experiment 20001248 PARAMETER Experiment Name: At_Far-red-induction_P Parameter: Age (day) Value: 7
  misc_feature: MA Experiment 20001248 PARAMETER Experiment Name: At_Far-red-induction_P Parameter: Light Value: Far-red vs. White
  misc_feature: MA Experiment 20001248 PARAMETER Experiment Name: At_Far-red-induction_P Parameter: Organism Value: A. thaliana
  misc_feature: MA Experiment 20001248 PARAMETER Experiment Name: At_Far-red-induction_P Parameter: Plant Line Value: Columbia
  misc_feature: MA Experiment 20001248 PARAMETER Experiment Name: At_Far-red-induction_P Parameter: Timepoint (hr) Value: 4
  misc_feature: MA Experiment 20001248 PARAMETER Experiment Name: At_Far-red-induction_P Parameter: Tissue Value: Whole Plant
  misc_feature: MA Experiment ID: 20001905 Result: Up-regulated in Transcription
  misc_feature: MA Experiment 20001905 PARAMETER Experiment Name: At_Drought_Reproduction_P Parameter: Age (day) Value: 40
  misc_feature: MA Experiment 20001905 PARAMETER Experiment Name: At_Drought_Reproduction_P Parameter: Organism Value: A. thaliana
  misc_feature: MA Experiment 20001905 PARAMETER Experiment Name: At_Drought_Reproduction_P Parameter: Plant Line Value: WS
  misc_feature: MA Experiment 20001905 PARAMETER Experiment Name: At_Drought_Reproduction_P Parameter: Timepoint (day) Value: 10
  misc_feature: MA Experiment 20001905 PARAMETER Experiment Name: At_Drought_Reproduction_P Parameter: Tissue Value: Rosettes
  misc_feature: MA Experiment 20001905 PARAMETER Experiment Name: At_Drought_Reproduction_P Parameter: Treatment Value: Drought vs. No Drought
atggtgataaagggaatgcgtgttggtaagtacgagcttgggaggacactcggagagggaaattccgcaaaagttaaatttgctatagatactcttaccggcgaatcattcgccatcaaaatcatcgagaagtcgtgtatcacacgtcttaacgtctcttttcagattaagagagagattcgaacactcaaagttttgaagcatccaaacattgtccgattacatgaggtcttggctagcaaaaccaagatttacatggttctggaatgtgtcactggaggagacttatttgacagaattgtctcgaaaggaaagctttcggaaacacaaggacgaaaaatgtttcagcagttgattgatggagtcagctattgtcataacaagggcgtttttcacagggatctcaagctagagaatgttcttcttgatgcaaagggtcacattaagatcactgattttggccttagtgctctgtctcaacattatagggaagatgggttgctacatacaacttgtggtagtcctaactatgtcgcgcctgaggttctagctaatgagggctatgatggtgcagcatcagatatatggtcatgtggagtaatcttgtatgttattcttacgggatgtctcccttttgatgatgcaaaccttgcagttatttgccggaagatattcaaaggggatcccccaatacctagatggatatcactgggagctaaaactatgatcaagagaatgcttgatcctaatccagtcacgagggtgacaatcgcaggtataaaggctcatgattggtttaaacatgactacactccttcaaactacgatgacgacgatgatgtatacttgatccaagaagatgtttttatgatgaaggaatatgaagaagagaagagccctgattctccaaccattatcaacgcttttcagttgattggaatgtcctcgtttctcgacctctcaggtttctttgagacagagaaattatcagagaggcagataagattcacgtcaaatagtttagctaaagatttgttggagaacatcgaaacgattttcacggagatgggcttttgtttacagaagaaacatgcaaagttaaaagcaatcaaagaagaaagcactcaaaaaaggcaatgcggtttatcggtaacggctgaggttttcgagataagtccgtccctgaatgtggttgaactaagaaaatcacatggcgattcgtctctatataaacagttgtacgagcgattattgaatgagctgggctcatcatcacaagtacaggagcttttagcgtag

SEQ ID NO: 79540 - protein, 432 aa, Arabidopsis thaliana
  peptide (1)..(432): Ceres Seq. ID no. 12651824
  misc_feature (11)..(266): Pfam Name: Protein kinase domain Pfam Description: Protein kinase domain
  misc_feature (1)..(432): Homolog of NCBI NO: 15221136 NR Description: serine threonine kinase, putative; protein id:
  misc_feature (99)..(432): Homolog of NCBI NO: 8778506 NR Description: F21D18.2 [Arabidopsis thaliana]
  misc_feature (1)..(101): Homolog of NCBI NO: 8778506 NR Description: F21D18.2 [Arabidopsis thaliana]
  misc_feature (1)..(413): Homolog of NCBI NO: 25387053 NR Description: hypothetical protein F11A17.18 [imported] - thaliana >gi|8778963|gb|AAD49770.2|AC007932_18 Similar to a serine/threonine kinase from Sorghum bicolor gb|Y12464. It
  misc_feature (4)..(431): Homolog of NCBI NO: 11066952 NR Description: CBL-interacting protein kinase 1 [Arabidopsis
  misc_feature (4)..(431): Homolog of NCBI NO: 18401539 NR Description: expressed protein; protein id: At3g17510.1, by cDNA: gi_11066951, supported by cDNA: gi_20260555 [Arabidopsis
  misc_feature (4)..(431): Homolog of NCBI NO: 20260556 NR Description: unknown protein [Arabidopsis thaliana]
  misc_feature (4)..(413): Homolog of NCBI NO: 9294138 NR Description: serine/threonine kinase [Arabidopsis thaliana]
  misc_feature (8)..(428): Homolog of NCBI NO: 34894358 NR Description: unnamed protein product [Oryza sativa (japonica group)] >gi|8468028|dbj|BAA96628.1| unnamed protein product
  misc_feature (6)..(431): Homolog of NCBI NO: 23237825 NR Description: putative serine/threonine kinase [Oryza sativa
MVIKGMRVGKYELGRTLGEGNSAKVKFAIDTLTGESFAIKIIEKSCITRLNVSFQIKREIRTLKVLKHPNIVRLHEVLASKTKIYMVLECVTGGDLFDRIVSKGKLSETQGRKMFQQLIDGVSYCHNKGVFHRDLKLENVLLDAKGHIKITDFGLSALSQHYREDGLLHTTCGSPNYVAPEVLANEGYDGAASDIWSCGVILYVILTGCLPFDDANLAVICRKIFKGDPPIPRWISLGAKTMIKRMLDPNPVTRVTIAGIKAHDWFKHDYTPSNYDDDDDVYLIQEDVFMMKEYEEEKSPDSPTIINAFQLIGMSSFLDLSGFFETEKLSERQIRFTSNSLAKDLLENIETIFTEMGFCLQKKHAKLKAIKEESTQKRQCGLSVTAEVFEISPSLNVVELRKSHGDSSLYKQLYERLLNELGSSSQVQELLA

SEQ ID NO: 79541 - protein, 427 aa, Arabidopsis thaliana
  peptide (1)..(427): Ceres Seq. ID no. 12651825
  misc_feature (6)..(261): Pfam Name: Protein kinase domain Pfam Description: Protein kinase domain
  misc_feature (1)..(427): Homolog of NCBI NO: 15221136 NR Description: serine threonine kinase, putative; protein id:
  misc_feature (94)..(427): Homolog of NCBI NO: 8778506 NR Description: F21D18.2 [Arabidopsis thaliana]
  misc_feature (1)..(96): Homolog of NCBI NO: 8778506 NR Description: F21D18.2 [Arabidopsis thaliana]
  misc_feature (1)..(408): Homolog of NCBI NO: 25387053 NR Description: hypothetical protein F11A17.18 [imported] - thaliana >gi|8778963|gb|AAD49770.2|AC007932_18 Similar to a serine/threonine kinase from Sorghum bicolor gb|Y12464. It
  misc_feature (1)..(426): Homolog of NCBI NO: 11066952 NR Description: CBL-interacting protein kinase 1 [Arabidopsis
  misc_feature (1)..(426): Homolog of NCBI NO: 18401539 NR Description: expressed protein; protein id: At3g17510.1, by cDNA: gi_11066951, supported by cDNA: gi_20260555 [Arabidopsis
  misc_feature (1)..(426): Homolog of NCBI NO: 20260556 NR Description: unknown protein [Arabidopsis thaliana]
  misc_feature (1)..(408): Homolog of NCBI NO: 9294138 NR Description: serine/threonine kinase [Arabidopsis thaliana]
  misc_feature (3)..(423): Homolog of NCBI NO: 34894358 NR Description: unnamed protein product [Oryza sativa (japonica group)] >gi|8468028|dbj|BAA96628.1| unnamed protein product
  misc_feature (1)..(426): Homolog of NCBI NO: 23237825 NR Description: putative serine/threonine kinase [Oryza sativa
MRVGKYELGRTLGEGNSAKVKFAIDTLTGESFAIKIIEKSCITRLNVSFQIKREIRTLKVLKHPNIVRLHEVLASKTKIYMVLECVTGGDLFDRIVSKGKLSETQGRKMFQQLIDGVSYCHNKGVFHRDLKLENVLLDAKGHIKITDFGLSALSQHYREDGLLHTTCGSPNYVAPEVLANEGYDGAASDIWSCGVILYVILTGCLPFDDANLAVICRKIFKGDPPIPRWISLGAKTMIKRMLDPNPVTRVTIAGIKAHDWFKHDYTPSNYDDDDDVYLIQEDVFMMKEYEEEKSPDSPTIINAFQLIGMSSFLDLSGFFETEKLSERQIRFTSNSLAKDLLENIETIFTEMGFCLQKKHAKLKAIKEESTQKRQCGLSVTAEVFEISPSLNVVELRKSHGDSSLYKQLYERLLNELGSSSQVQELLA

SEQ ID NO: 79542 - protein, 347 aa, Arabidopsis thaliana
  peptide (1)..(347): Ceres Seq. ID no. 12651826
  misc_feature (1)..(181): Pfam Name: Protein kinase domain Pfam Description: Protein kinase domain
  misc_feature (1)..(347): Homolog of NCBI NO: 15221136 NR Description: serine threonine kinase, putative; protein id:
  misc_feature (14)..(347): Homolog of NCBI NO: 8778506 NR Description: F21D18.2 [Arabidopsis thaliana]
  misc_feature (1)..(16): Homolog of NCBI NO: 8778506 NR Description: F21D18.2 [Arabidopsis thaliana]
  misc_feature (1)..(328): Homolog of NCBI NO: 25387053 NR Description: hypothetical protein F11A17.18 [imported] - thaliana >gi|8778963|gb|AAD49770.2|AC007932_18 Similar to a serine/threonine kinase from Sorghum bicolor gb|Y12464. It
  misc_feature (1)..(346): Homolog of NCBI NO: 11066952 NR Description: CBL-interacting protein kinase 1 [Arabidopsis
  misc_feature (1)..(346): Homolog of NCBI NO: 18401539 NR Description: expressed protein; protein id: At3g17510.1, by cDNA: gi_11066951, supported by cDNA: gi_20260555 [Arabidopsis
  misc_feature (1)..(346): Homolog of NCBI NO: 20260556 NR Description: unknown protein [Arabidopsis thaliana]
  misc_feature (1)..(328): Homolog of NCBI NO: 9294138 NR Description: serine/threonine kinase [Arabidopsis thaliana]
  misc_feature (1)..(343): Homolog of NCBI NO: 34894358 NR Description: unnamed protein product [Oryza sativa (japonica group)] >gi|8468028|dbj|BAA96628.1| unnamed protein product
  misc_feature (1)..(346): Homolog of NCBI NO: 23237825 NR Description: putative serine/threonine kinase [Oryza sativa
MVLECVTGGDLFDRIVSKGKLSETQGRKMFQQLIDGVSYCHNKGVFHRDLKLENVLLDAKGHIKITDFGLSALSQHYREDGLLHTTCGSPNYVAPEVLANEGYDGAASDIWSCGVILYVILTGCLPFDDANLAVICRKIFKGDPPIPRWISLGAKTMIKRMLDPNPVTRVTIAGIKAHDWFKHDYTPSNYDDDDDVYLIQEDVFMMKEYEEEKSPDSPTIINAFQLIGMSSFLDLSGFFETEKLSERQIRFTSNSLAKDLLENIETIFTEMGFCLQKKHAKLKAIKEESTQKRQCGLSVTAEVFEISPSLNVVELRKSHGDSSLYKQLYERLLNELGSSSQVQELLA

SEQ ID NO: 79543 - DNA, 858 bp, Arabidopsis thaliana
  misc_feature (1)..(858): Ceres Seq. ID no. 12651831
  misc_feature: MA Experiment ID: 20000184 Result: Down-regulated in Transcription
  misc_feature: MA Experiment 20000184 PARAMETER Experiment Name: At_Shoots__P Parameter: Age (day) Value: 7
  misc_feature: MA Experiment 20000184 PARAMETER Experiment Name: At_Shoots__P Parameter: Tissue Value: Shoots vs. Whole Plant
  misc_feature: MA Experiment ID: 20000234 Result: Down-regulated in Transcription
  misc_feature: MA Experiment 20000234 PARAMETER Experiment Name: At_Siliques_P Parameter: Age (day) Value: 21
  misc_feature: MA Experiment 20000234 PARAMETER Experiment Name: At_Siliques_P Parameter: Organism Value: A. thaliana
  misc_feature: MA Experiment 20000234 PARAMETER Experiment Name: At_Siliques_P Parameter: Plant Line Value: WS
  misc_feature: MA Experiment 20000234 PARAMETER Experiment Name: At_Siliques_P Parameter: Tissue Value: Less Than 5mm Siliques vs. Whole Plant
  misc_feature: MA Experiment ID: 20000235 Result: Down-regulated in Transcription
  misc_feature: MA Experiment 20000235 PARAMETER Experiment Name: At_Siliques_P Parameter: Age (day) Value: 21
  misc_feature: MA Experiment 20000235 PARAMETER Experiment Name: At_Siliques_P Parameter: Organism Value: A. thaliana
  misc_feature: MA Experiment 20000235 PARAMETER Experiment Name: At_Siliques_P Parameter: Plant Line Value: WS
  misc_feature: MA Experiment 20000235 PARAMETER Experiment Name: At_Siliques_P Parameter: Tissue Value: 5-10mm Siliques vs. Whole Plant
  misc_feature: MA Experiment ID: 20000264 Result: Down-regulated in Transcription
  misc_feature: MA Experiment 20000264 PARAMETER Experiment Name: At_Open_Flower_P Parameter: Age (day) Value: 21
  misc_feature: MA Experiment 20000264 PARAMETER Experiment Name: At_Open_Flower_P Parameter: Plant Line Value: WS
  misc_feature: MA Experiment 20000264 PARAMETER Experiment Name: At_Open_Flower_P Parameter: Tissue Value: Open Flower vs. Whole Plant
  misc_feature: MA Experiment ID: 20000265 Result: Down-regulated in Transcription
  misc_feature: MA Experiment 20000265 PARAMETER Experiment Name: At_Open_Flower_P Parameter: Age (day) Value: 21
  misc_feature: MA Experiment 20000265 PARAMETER Experiment Name: At_Open_Flower_P Parameter: Plant Line Value: WS
  misc_feature: MA Experiment 20000265 PARAMETER Experiment Name: At_Open_Flower_P Parameter: Tissue Value: Closed Flower vs. Whole Plant
  misc_feature: MA Experiment ID: 20000286 Result: Down-regulated in Transcription
  misc_feature: MA Experiment 20000286 PARAMETER Experiment Name: At_Open_Flower_P Parameter: Age (day) Value: 21
  misc_feature: MA Experiment 20000286 PARAMETER Experiment Name: At_Open_Flower_P Parameter: Plant Line Value: WS
  misc_feature: MA Experiment 20000286 PARAMETER Experiment Name: At_Open_Flower_P Parameter: Tissue Value: Half Open vs. Whole Plant
  misc_feature: MA Experiment ID: 20000438 Result: Down-regulated in Transcription
  misc_feature: MA Experiment 20000438 PARAMETER Experiment Name: At_Shoots__P Parameter: Age (day) Value: 14
  misc_feature: MA Experiment 20000438 PARAMETER Experiment Name: At_Shoots__P Parameter: Tissue Value: Shoots vs. Whole Plant
  misc_feature: MA Experiment ID: 20000441 Result: Up-regulated in Transcription
  misc_feature: MA Experiment 20000441 PARAMETER Experiment Name: At_1uM_BR-BRZ__P Parameter: Tissue Value: Shoot Apices
  misc_feature: MA Experiment 20000441 PARAMETER Experiment Name: At_1uM_BR-BRZ__P Parameter: Treatment Value: 1uM BR vs. No Treatment
  misc_feature: MA Experiment ID: 20001557 Result: Down-regulated in Transcription
  misc_feature: MA Experiment 20001557 PARAMETER Experiment Name: At_Drought_Soil_Dry_P Parameter: Age (day) Value: 27
  misc_feature: MA Experiment 20001557 PARAMETER Experiment Name: At_Drought_Soil_Dry_P Parameter: Organism Value: A. thaliana
  misc_feature: MA Experiment 20001557 PARAMETER Experiment Name: At_Drought_Soil_Dry_P Parameter: Plant Line Value: WS
  misc_feature: MA Experiment 20001557 PARAMETER Experiment Name: At_Drought_Soil_Dry_P Parameter: Post Timepoint (hr) Value: 3
  misc_feature: MA Experiment 20001557 PARAMETER Experiment Name: At_Drought_Soil_Dry_P Parameter: Post-Treatment Value: Re-Water vs. No Drought
  misc_feature: MA Experiment 20001557 PARAMETER Experiment Name: At_Drought_Soil_Dry_P Parameter: Timepoint (day) Value: 13
  misc_feature: MA Experiment 20001557 PARAMETER Experiment Name: At_Drought_Soil_Dry_P Parameter: Treatment Value: Drought vs. No Drought
  misc_feature: MA Experiment ID: 20001558 Result: Down-regulated in Transcription
  misc_feature: MA Experiment 20001558 PARAMETER Experiment Name: At_Drought_Soil_Dry_P Parameter: Age (day) Value: 27
  misc_feature: MA Experiment 20001558 PARAMETER Experiment Name: At_Drought_Soil_Dry_P Parameter: Organism Value: A. thaliana
  misc_feature: MA Experiment 20001558 PARAMETER Experiment Name: At_Drought_Soil_Dry_P Parameter: Plant Line Value: WS
  misc_feature: MA Experiment 20001558 PARAMETER Experiment Name: At_Drought_Soil_Dry_P Parameter: Post Timepoint (hr) Value: 6
  misc_feature: MA Experiment 20001558 PARAMETER Experiment Name: At_Drought_Soil_Dry_P Parameter: Post-Treatment Value: Re-Water vs. No Drought
  misc_feature: MA Experiment 20001558 PARAMETER Experiment Name: At_Drought_Soil_Dry_P Parameter: Timepoint (day) Value: 13
  misc_feature: MA Experiment 20001558 PARAMETER Experiment Name: At_Drought_Soil_Dry_P Parameter: Treatment Value: Drought vs. No Drought
  misc_feature: MA Experiment ID: 20001560 Result: Down-regulated in Transcription
  misc_feature: MA Experiment 20001560 PARAMETER Experiment Name: At_Drought_Soil_Dry_P Parameter: Age (day) Value: 28
  misc_feature: MA Experiment 20001560 PARAMETER Experiment Name: At_Drought_Soil_Dry_P Parameter: Organism Value: A. thaliana
  misc_feature: MA Experiment 20001560 PARAMETER Experiment Name: At_Drought_Soil_Dry_P Parameter: Plant Line Value: WS
  misc_feature: MA Experiment 20001560 PARAMETER Experiment Name: At_Drought_Soil_Dry_P Parameter: Post Timepoint (hr) Value: None
  misc_feature: MA Experiment 20001560 PARAMETER Experiment Name: At_Drought_Soil_Dry_P Parameter: Post-Treatment Value: None
  misc_feature: MA Experiment 20001560 PARAMETER Experiment Name: At_Drought_Soil_Dry_P Parameter: Timepoint (day) Value: 14
  misc_feature: MA Experiment 20001560 PARAMETER Experiment Name: At_Drought_Soil_Dry_P Parameter: Treatment Value: Drought vs. No Drought
atggagaaggagaagaaggcgttgaagaagaaggcgaaagttcttaaaagtctttctaagaacttggatatgttctctagtatagggtttggtcttgatcctgaagctggtttggttggtgagattcagaccaagacaatctcggaagctacagagatattggttaagcagctggagcagttgaaagcagaggagaagatattgaagaaacagaggaaagaagagaaggctaaagccaaagccatgaagaagatgactgaaatggactctgaatcatcttcttcgtctgaatcaagtgatagtgattgtgataaaggcaaagttgtggacatgagctctttaagaaacaaggctaaaccggttcttgagccgttacaaccagaagccacagtagcaacccttcctaggatccaagaggatgcaatttcttgcaagaacaccagtgaagcattgcagattgctctacaaacatccacaatttttccttcaatggccaatcctggacagacattgaagacggtagaagcggtttcagtggttggattaccattgaatagagtagaagtgtgtatgggagggaagtgtaagagatcaggaggagctttgttgttggatgagtttcaaagggcgatgacgggtttcgaaggatctgctgtggcttgcaagtgcatggggaagtgtcgtgatggcccaaacgttagagttgtgaaggagactgatgctgtgatgactgattcagttaggacaccatccaagaccctttgtgtaggagttggattgcaggatgtggaaactattgtgacaagtttctttgatgaagaatgtagcagagaaggactcggttctgtctcatattga

SEQ ID NO: 79544 - protein, 285 aa, Arabidopsis thaliana; identical to SEQ ID NO: 49788
  peptide (1)..(285): Ceres Seq. ID no. 12651832
  misc_feature (1)..(285): Homolog of NCBI NO: 22330104 NR Description: hypothetical protein; protein id: At1g48300.1, by cDNA: gi_12744986 [Arabidopsis thaliana]
  misc_feature (1)..(285): Homolog of NCBI NO: 25405260 NR Description: hypothetical protein F11A17.15 [imported] - thaliana >gi|5733879|gb|AAD49767.1|AC007932_15 ESTs gb|N97074,
  misc_feature (82)..(285): Homolog of NCBI NO: 30102610 NR Description: At1g48300 [Arabidopsis thaliana]

SEQ ID NO: 79545 - protein, 262 aa, Arabidopsis thaliana; identical to SEQ ID NO: 49789
  peptide (1)..(262): Ceres Seq. ID no. 12651833
  misc_feature (1)..(262): Homolog of NCBI NO: 22330104 NR Description: hypothetical protein; protein id: At1g48300.1, by cDNA: gi_12744986 [Arabidopsis thaliana]
  misc_feature (1)..(262): Homolog of NCBI NO: 25405260 NR Description: hypothetical protein F11A17.15 [imported] - thaliana >gi|5733879|gb|AAD49767.1|AC007932_15 ESTs gb|N97074,
  misc_feature (59)..(262): Homolog of NCBI NO: 30102610 NR Description: At1g48300 [Arabidopsis thaliana]

SEQ ID NO: 79546 - protein, 204 aa, Arabidopsis thaliana
  peptide (1)..(204): Ceres Seq. ID no. 12651834
  misc_feature (1)..(204): Homolog of NCBI NO: 22330104 NR Description: hypothetical protein; protein id: At1g48300.1, by cDNA: gi_12744986 [Arabidopsis thaliana]
  misc_feature (1)..(204): Homolog of NCBI NO: 25405260 NR Description: hypothetical protein F11A17.15 [imported] - thaliana >gi|5733879|gb|AAD49767.1|AC007932_15 ESTs gb|N97074,
  misc_feature (1)..(204): Homolog of NCBI NO: 30102610 NR Description: At1g48300 [Arabidopsis thaliana]
MKKMTEMDSESSSSSESSDSDCDKGKVVDMSSLRNKAKPVLEPLQPEATVATLPRIQEDAISCKNTSEALQIALQTSTIFPSMANPGQTLKTVEAVSVVGLPLNRVEVCMGGKCKRSGGALLLDEFQRAMTGFEGSAVACKCMGKCRDGPNVRVVKETDAVMTDSVRTPSKTLCVGVGLQDVETIVTSFFDEECSREGLGSVSY

SEQ ID NO: 79547 - DNA, 1309 bp, Arabidopsis thaliana
  misc_feature (1)..(1309): Ceres Seq. ID no. 12651843
  misc_feature: MA Experiment ID: 20000184 Result: Down-regulated in Transcription
  misc_feature: MA Experiment 20000184 PARAMETER Experiment Name: At_Shoots__P Parameter: Age (day) Value: 7
  misc_feature: MA Experiment 20000184 PARAMETER Experiment Name: At_Shoots__P Parameter: Tissue Value: Shoots vs. Whole Plant
  misc_feature: MA Experiment ID: 20000264 Result: Down-regulated in Transcription
  misc_feature: MA Experiment 20000264 PARAMETER Experiment Name: At_Open_Flower_P Parameter: Age (day) Value: 21
  misc_feature: MA Experiment 20000264 PARAMETER Experiment Name: At_Open_Flower_P Parameter: Plant Line Value: WS
  misc_feature: MA Experiment 20000264 PARAMETER Experiment Name: At_Open_Flower_P Parameter: Tissue Value: Open Flower vs. Whole Plant
  misc_feature: MA Experiment ID: 20000265 Result: Down-regulated in Transcription
  misc_feature: MA Experiment 20000265 PARAMETER Experiment Name: At_Open_Flower_P Parameter: Age (day) Value: 21
  misc_feature: MA Experiment 20000265 PARAMETER Experiment Name: At_Open_Flower_P Parameter: Plant Line Value: WS
  misc_feature: MA Experiment 20000265 PARAMETER Experiment Name: At_Open_Flower_P Parameter: Tissue Value: Closed Flower vs. Whole Plant
  misc_feature: MA Experiment ID: 20000286 Result: Down-regulated in Transcription
  misc_feature: MA Experiment 20000286 PARAMETER Experiment Name: At_Open_Flower_P Parameter: Age (day) Value: 21
  misc_feature: MA Experiment 20000286 PARAMETER Experiment Name: At_Open_Flower_P Parameter: Plant Line Value: WS
  misc_feature: MA Experiment 20000286 PARAMETER Experiment Name: At_Open_Flower_P Parameter: Tissue Value: Half Open vs. Whole Plant
  misc_feature: MA Experiment ID: 20000451 Result: Up-regulated in Transcription
  misc_feature: MA Experiment 20000451 PARAMETER Experiment Name: At_CS6879_Shoots-Roots_P Parameter: Age (day) Value: 14
  misc_feature: MA Experiment 20000451 PARAMETER Experiment Name: At_CS6879_Shoots-Roots_P Parameter: Organism Value: A. thaliana
  misc_feature: MA Experiment 20000451 PARAMETER Experiment Name: At_CS6879_Shoots-Roots_P Parameter: Plant Line Value: CS6879 vs. WS
  misc_feature: MA Experiment 20000451 PARAMETER Experiment Name: At_CS6879_Shoots-Roots_P Parameter: Tissue Value: Roots
  misc_feature: MA Experiment ID: 20000452 Result: Up-regulated in Transcription
  misc_feature: MA Experiment 20000452 PARAMETER Experiment Name: At_CS6879_Shoots-Roots_P Parameter: Age (day) Value: 14
  misc_feature: MA Experiment 20000452 PARAMETER Experiment Name: At_CS6879_Shoots-Roots_P Parameter: Organism Value: A. thaliana
  misc_feature: MA Experiment 20000452 PARAMETER Experiment Name: At_CS6879_Shoots-Roots_P Parameter: Plant Line Value: CS6879 vs. WS
  misc_feature: MA Experiment 20000452 PARAMETER Experiment Name: At_CS6879_Shoots-Roots_P Parameter: Tissue Value: Shoots
gacaaagacatttaaaagaagaattttcgaagaaaaattagagagagtagaagaagcagaagcagtaatggtacgagcttcatcgtcgaagaaaggaggatcaaaaggaggagacaaagacgacgcagagtcaaaacagaggaagagattaaaaaccctagctctcgataaccaattgctctctgattctccggcgaaatctcattcctctctcaaaccttcaaagcaagttctcaaacaccatggcaccgacatcatccgcaaatctcagcgcaagaatcgctttctcttctccttccctggtcttctcgctcctatctccgccgctaccatcggcgatctcgatcgattatctaccaaaaaccctgtcctctaccttaatttcccacagggtcgtatgaaactttttggaacgattttgtatccgaagaacagatacttgactcttcaattctctagaggaggcaaaaatgtcttatgtgatgattattttgataacatgattgtgttctctgagtcatggtggattgggacaaaagaggagaatccagaagaagctcgtcttgatttccctaaagaactagctcaggcagagaatactgagtttgatttccaaggcggtgctggaggagcagcttcggtgaagaagctggcgagtcctgaaattggtagccaaccaacagagacagactcacctgaagttgacaacgaggatgttttgtctgaggatggagaattcttggacgataagatccaagtaacaccaccagttcaattaacaccaccagtccaagtaactccggtccgacagtctcagagaaattctgggaagaaattcaactttgcagaaacttcctcagaggcctcctctggtgaaagtgaaggcaatacatctgatgaagatgagaaacctctgttggaacctgaatcttcaacaagaagtcgtgaggaatctcaagatggtaatggtattactgcatctgcaagcaagttgcctgaagaacttccggctaaaagggaaaaactaaagagcaaagacagtaagctcgttcaagctactttgtctaaccttttcaagaaagctgaggagaaaacagctggaacttccaaggctaaatcatcctcaaaagcttaaagaaatcttttccagaagaaaatagaggtctgttgtttctttgctgtgagaatgaacagtttttagttcttttaggtatgtttgtgtgagaaattgctacaagactgatgtattcatcatgcagttggataatgtattcattatgcttattcgatagtttgtgttcatcgagct

SEQ ID NO: 79548 - protein, 377 aa, Arabidopsis thaliana
  peptide (1)..(377): Ceres Seq. ID no. 12651844
  misc_feature (23)..(377): Homolog of NCBI NO: 18402164 NR Description: root hairless 1 (RHL1); protein id: At1g48380.1, by cDNA: gi_16323205, supported by cDNA: gi_3219354 [Arabidopsis >gi|25456561|pir||T52177 root hairless protein 1 HAIRLESS 1
  misc_feature (23)..(377): Homolog of NCBI NO: 3811320 NR Description: ROOT HAIRLESS 1 [Arabidopsis thaliana]
  misc_feature (35)..(342): Homolog of NCBI NO: 34394443 NR Description: putative root hairless 1 [Oryza sativa (japonica
TKTFKRRIFEEKLERVEEAEAVMVRASSSKKGGSKGGDKDDAESKQRKRLKTLALDNQLLSDSPAKSHSSLKPSKQVLKHHGTDIIRKSQRKNRFLFSFPGLLAPISAATIGDLDRLSTKNPVLYLNFPQGRMKLFGTILYPKNRYLTLQFSRGGKNVLCDDYFDNMIVFSESWWIGTKEENPEEARLDFPKELAQAENTEFDFQGGAGGAASVKKLASPEIGSQPTETDSPEVDNEDVLSEDGEFLDDKIQVTPPVQLTPPVQVTPVRQSQRNSGKKFNFAETSSEASSGESEGNTSDEDEKPLLEPESSTRSREESQDGNGITASASKLPEELPAKREKLKSKDSKLVQATLSNLFKKAEEKTAGTSKAKSSSKA

SEQ ID NO: 79549 - protein, 355 aa, Arabidopsis thaliana
  peptide (1)..(355): Ceres Seq. ID no. 12651845
  misc_feature (1)..(355): Homolog of NCBI NO: 18402164 NR Description: root hairless 1 (RHL1); protein id: At1g48380.1, by cDNA: gi_16323205, supported by cDNA: gi_3219354 [Arabidopsis >gi|25456561|pir||T52177 root hairless protein 1 HAIRLESS 1
  misc_feature (1)..(355): Homolog of NCBI NO: 3811320 NR Description: ROOT HAIRLESS 1 [Arabidopsis thaliana]
  misc_feature (13)..(320): Homolog of NCBI NO: 34394443 NR Description: putative root hairless 1 [Oryza sativa (japonica
MVRASSSKKGGSKGGDKDDAESKQRKRLKTLALDNQLLSDSPAKSHSSLKPSKQVLKHHGTDIIRKSQRKNRFLFSFPGLLAPISAATIGDLDRLSTKNPVLYLNFPQGRMKLFGTILYPKNRYLTLQFSRGGKNVLCDDYFDNMIVFSESWWIGTKEENPEEARLDFPKELAQAENTEFDFQGGAGGAASVKKLASPEIGSQPTETDSPEVDNEDVLSEDGEFLDDKIQVTPPVQLTPPVQVTPVRQSQRNSGKKFNFAETSSEASSGESEGNTSDEDEKPLLEPESSTRSREESQDGNGITASASKLPEELPAKREKLKSKDSKLVQATLSNLFKKAEEKTAGTSKAKSSSKA

SEQ ID NO: 79550 - protein, 245 aa, Arabidopsis thaliana
  peptide (1)..(245): Ceres Seq. ID no. 12651846
  misc_feature (1)..(245): Homolog of NCBI NO: 18402164 NR Description: root hairless 1 (RHL1); protein id: At1g48380.1, by cDNA: gi_16323205, supported by cDNA: gi_3219354 [Arabidopsis >gi|25456561|pir||T52177 root hairless protein 1 HAIRLESS 1
  misc_feature (1)..(245): Homolog of NCBI NO: 3811320 NR Description: ROOT HAIRLESS 1 [Arabidopsis thaliana]
  misc_feature (1)..(210): Homolog of NCBI NO: 34394443 NR Description: putative root hairless 1 [Oryza sativa (japonica
MKLFGTILYPKNRYLTLQFSRGGKNVLCDDYFDNMIVFSESWWIGTKEENPEEARLDFPKELAQAENTEFDFQGGAGGAASVKKLASPEIGSQPTETDSPEVDNEDVLSEDGEFLDDKIQVTPPVQLTPPVQVTPVRQSQRNSGKKFNFAETSSEASSGESEGNTSDEDEKPLLEPESSTRSREESQDGNGITASASKLPEELPAKREKLKSKDSKLVQATLSNLFKKAEEKTAGTSKAKSSSKA

SEQ ID NO: 79551 - DNA, 1023 bp, Arabidopsis thaliana
  misc_feature (1)..(1023): Ceres Seq. ID no. 12651854
  misc_feature: MA Experiment ID: 20001757 Result: Up-regulated in Transcription
  misc_feature: MA Experiment 20001757 PARAMETER Experiment Name: At_50mM_NH4NO3_L-to-H_P Parameter: Timepoint (hr) Value: 6
  misc_feature: MA Experiment 20001757 PARAMETER Experiment Name: At_50mM_NH4NO3_L-to-H_P Parameter: Tissue Value: Leaf
  misc_feature: MA Experiment 20001757 PARAMETER Experiment Name: At_50mM_NH4NO3_L-to-H_P Parameter: Treatment Value: 50mM NH4NO3 vs 100mM Mannitol
atggaatcgaaagcaatttgcttagggtttcttcctccaagacttcgattttcatctccacgtttactctctcttcctccttctcctcctgcttcttccacatttgcgacgcgtcacaaacttgattccagacaaaccctcctttggaacaaaccgcaattgagccgagttcgtgtagcgtgttcttcttctcaatctgactcaagacctgagaagaagcaatcggataagagtaactatgctcgagctgagctgttccgtgggaaatcaggttctgtttctttcaatggtctgactcatcagctggttgaagaaagtaaactggtttcagctccgtttcaagaagagaaaggttctttcttgtgggttttggctcctgttgttttgatttcttcgttgattcttcctcagttctttctaagtggtatcattgaagctaccttcaaaaacgacactgttgctgaaattgttacttctttttgctttgagacggtgttttatgctggtcttgcgatattcctgtctgtgactgaccgagtgcagaggccgtacttagacttcagctccaagagatggggtctgatcactggactgaggggataccttacgtctgcattcctcacgatgggtttaaaagttgtagttcccgtatttgctgtttacatgacttggccagctcttggaatagatgctttgattgcagtgcttcctttcttggttggctgtgcagttcaaagagttttcgaggctcggcttgaaagacgtggctcatcctgttggcccattgttccaatagtctttgaggtgtataggctgtatcaggtgacaagagcagcgacttttgttcagaggctgatgtttatgatgaaagatgcggcaacgactgctgaaataacagagcgaggagttgcactagttggtttggttgtgactttgcagtttctagctgttatgtgtctctggtcgtttatcacttttcttatgcgcctctttccttctagacctgtaggtgaaaactactag

SEQ ID NO: 79552 - protein, 340 aa, Arabidopsis thaliana
  peptide (1)..(340): Ceres Seq. ID no. 12651855
  misc_feature (1)..(340): Homolog of NCBI NO: 15221197 NR Description: unknown protein; protein id: At1g48460.1
  misc_feature (1)..(340): Homolog of NCBI NO: 25405928 NR Description: protein T1N15.7 [imported] - Arabidopsis thaliana
  misc_feature (65)..(336): Homolog of NCBI NO: 34910348 NR Description: P0684B02.8 [Oryza sativa (japonica
  misc_feature (63)..(334): Homolog of NCBI NO: 21592953 NR Description: unknown [Arabidopsis thaliana]
  misc_feature (88)..(334): Homolog of NCBI NO: 9758304 NR Description: emb|CAB81845.1~gene_id:MJH22.10~similar to
  misc_feature (88)..(334): Homolog of NCBI NO: 18424658 NR Description: putative protein; protein id: At5g63040.1,
  misc_feature (214)..(334): Homolog of NCBI NO: 26450751 NR Description: unknown protein [Arabidopsis thaliana]
  misc_feature (57)..(280): Homolog of NCBI NO: 11281196 NR Description: hypothetical protein T8B10.250 - Arabidopsis >gi|7288007|emb|CAB81845.1| putative protein [Arabidopsis
  misc_feature (121)..(280): Homolog of NCBI NO: 30695235 NR Description: expressed protein [Arabidopsis thaliana]
MESKAICLGFLPPRLRFSSPRLLSLPPSPPASSTFATRHKLDSRQTLLWNKPQLSRVRVACSSSQSDSRPEKKQSDKSNYARAELFRGKSGSVSFNGLTHQLVEESKLVSAPFQEEKGSFLWVLAPVVLISSLILPQFFLSGIIEATFKNDTVAEIVTSFCFETVFYAGLAIFLSVTDRVQRPYLDFSSKRWGLITGLRGYLTSAFLTMGLKVVVPVFAVYMTWPALGIDALIAVLPFLVGCAVQRVFEARLERRGSSCWPIVPIVFEVYRLYQVTRAATFVQRLMFMMKDAATTAEITERGVALVGLVVTLQFLAVMCLWSFITFLMRLFPSRPVGENY

SEQ ID NO: 79553 - DNA, 1562 bp, Arabidopsis thaliana
  misc_feature (1)..(1562): Ceres Seq. ID no. 12651864
  misc_feature: MA Experiment ID: 20000169 Result: Down-regulated in Transcription
  misc_feature: MA Experiment 20000169 PARAMETER Experiment Name: At_100uM_ABA_P Parameter: Age (day) Value: 14
  misc_feature: MA Experiment 20000169 PARAMETER Experiment Name: At_100uM_ABA_P Parameter: Organism Value: A. thaliana
  misc_feature: MA Experiment 20000169 PARAMETER Experiment Name: At_100uM_ABA_P Parameter: Plant Line Value: WS
  misc_feature: MA Experiment 20000169 PARAMETER Experiment Name: At_100uM_ABA_P Parameter: Timepoint (hr) Value: 6
  misc_feature: MA Experiment 20000169 PARAMETER Experiment Name: At_100uM_ABA_P Parameter: Tissue Value: Aerial
  misc_feature: MA Experiment 20000169 PARAMETER Experiment Name: At_100uM_ABA_P Parameter: Treatment Value: 100uM ABA vs. No Treatment
  misc_feature: MA Experiment ID: 20000173 Result: Up-regulated in Transcription
  misc_feature: MA Experiment 20000173 PARAMETER Experiment Name: At_42deg_Heat_P Parameter: Age (day) Value: 14
  misc_feature: MA Experiment 20000173 PARAMETER Experiment Name: At_42deg_Heat_P Parameter: Organism Value: A. thaliana
  misc_feature: MA Experiment 20000173 PARAMETER Experiment Name: At_42deg_Heat_P Parameter: Plant Line Value: WS
  misc_feature: MA Experiment 20000173 PARAMETER Experiment Name: At_42deg_Heat_P Parameter: Temperature (deg C) Value: 42 vs. 22
  misc_feature: MA Experiment 20000173 PARAMETER Experiment Name: At_42deg_Heat_P Parameter: Timepoint (hr) Value: 6
  misc_feature: MA Experiment 20000173 PARAMETER Experiment Name: At_42deg_Heat_P Parameter: Tissue Value: Aerial
  misc_feature: MA Experiment ID: 20000180 Result: Down-regulated in Transcription
  misc_feature: MA Experiment 20000180 PARAMETER Experiment Name: At_Germinating_Seeds_P Parameter: Age (hr) Value: 24 vs. 0
  misc_feature: MA Experiment 20000180 PARAMETER Experiment Name: At_Germinating_Seeds_P Parameter: Tissue Value: Germinating Seeds
  misc_feature: MA Experiment ID: 20000185 Result: Down-regulated in Transcription
  misc_feature: MA Experiment 20000185 PARAMETER Experiment Name: At_Roots__P Parameter: Age (day) Value: 7 vs. 21
  misc_feature: MA Experiment 20000185 PARAMETER Experiment Name: At_Roots__P Parameter: Organism Value: A. thaliana
  misc_feature: MA Experiment 20000185 PARAMETER Experiment Name: At_Roots__P Parameter: Tissue Value: Roots vs. Whole Plant
  misc_feature: MA Experiment ID: 20000437 Result: Down-regulated in Transcription
  misc_feature: MA Experiment 20000437 PARAMETER Experiment Name: At_Drought_P Parameter: Age (day) Value: 8
  misc_feature: MA Experiment 20000437 PARAMETER Experiment Name: At_Drought_P Parameter: Organism Value: A. thaliana
  misc_feature: MA Experiment 20000437 PARAMETER Experiment Name: At_Drought_P Parameter: Plant Line Value: WS
  misc_feature: MA Experiment 20000437 PARAMETER Experiment Name: At_Drought_P Parameter: Timepoint (hr) Value: 24
  misc_feature: MA Experiment 20000437 PARAMETER Experiment Name: At_Drought_P Parameter: Tissue Value: Whole Plant
  misc_feature: MA Experiment 20000437 PARAMETER Experiment Name: At_Drought_P Parameter: Treatment Value: Drought vs. No Drought
  misc_feature: MA Experiment ID: 20000527 Result: Up-regulated in Transcription
  misc_feature: MA Experiment 20000527 PARAMETER Experiment Name: At_10percent_PEG_P Parameter: Age (day) Value: 20
  misc_feature: MA Experiment 20000527 PARAMETER Experiment Name: At_10percent_PEG_P Parameter: Organism Value: A. thaliana
  misc_feature: MA Experiment 20000527 PARAMETER Experiment Name: At_10percent_PEG_P Parameter: Plant Line Value: WS
  misc_feature: MA Experiment 20000527 PARAMETER Experiment Name: At_10percent_PEG_P Parameter: Timepoint (day) Value: 20
  misc_feature: MA Experiment 20000527 PARAMETER Experiment Name: At_10percent_PEG_P Parameter: Tissue Value: Whole Plant
  misc_feature: MA Experiment 20000527 PARAMETER Experiment Name: At_10percent_PEG_P Parameter: Treatment Value: 10percent PEG vs. No Treatment
  misc_feature: MA Experiment ID: 20000709 Result: Up-regulated in Transcription
  misc_feature: MA Experiment 20000709 PARAMETER Experiment Name: At_15mM_NH4NO3_L-to-H_P Parameter: Age (hr) Value: 14
  misc_feature: MA Experiment 20000709 PARAMETER Experiment Name: At_15mM_NH4NO3_L-to-H_P Parameter: Organism Value: A. thaliana
  misc_feature: MA Experiment 20000709 PARAMETER Experiment Name: At_15mM_NH4NO3_L-to-H_P Parameter: Plant Line Value: WS
  misc_feature: MA Experiment 20000709 PARAMETER Experiment Name: At_15mM_NH4NO3_L-to-H_P Parameter: Timepoint (hr) Value: 4
  misc_feature: MA Experiment 20000709 PARAMETER Experiment Name: At_15mM_NH4NO3_L-to-H_P Parameter: Tissue Value: Aerial
  misc_feature: MA Experiment 20000709 PARAMETER Experiment Name: At_15mM_NH4NO3_L-to-H_P Parameter: Treatment Value: 15mM NH4NO3 vs. 30mM Mannitol
  misc_feature: MA Experiment ID: 20000794 Result: Down-regulated in Transcription
  misc_feature: MA Experiment 20000794 PARAMETER Experiment Name: At_Petals_P Parameter: Age (day) Value: 23-25 days
  misc_feature: MA Experiment 20000794 PARAMETER Experiment Name: At_Petals_P Parameter: Plant Line Value: WS
  misc_feature: MA Experiment 20000794 PARAMETER Experiment Name: At_Petals_P Parameter: Tissue Value: Petals vs. Whole plant
  misc_feature: MA Experiment ID: 20001247 Result: Down-regulated in Transcription
  misc_feature: MA Experiment 20001247 PARAMETER Experiment Name: At_Far-red-induction_P Parameter: Age (day) Value: 7
  misc_feature: MA Experiment 20001247 PARAMETER Experiment Name: At_Far-red-induction_P Parameter: Light Value: Far-red vs. White
  misc_feature: MA Experiment 20001247 PARAMETER Experiment Name: At_Far-red-induction_P Parameter: Organism Value: A. thaliana
  misc_feature: MA Experiment 20001247 PARAMETER Experiment Name: At_Far-red-induction_P Parameter: Plant Line Value: Columbia
  misc_feature: MA Experiment 20001247 PARAMETER Experiment Name: At_Far-red-induction_P Parameter: Timepoint (hr) Value: 1
  misc_feature: MA Experiment 20001247 PARAMETER Experiment Name: At_Far-red-induction_P Parameter: Tissue Value: Whole Plant
  misc_feature: MA Experiment ID: 20001451 Result: Down-regulated in Transcription
  misc_feature: MA Experiment 20001451 PARAMETER Experiment Name: At_Far-red-induction_P Parameter: Age (day) Value: 7
  misc_feature: MA Experiment 20001451 PARAMETER Experiment Name: At_Far-red-induction_P Parameter: Light Value: Far-red vs. White
  misc_feature: MA Experiment 20001451 PARAMETER Experiment Name: At_Far-red-induction_P Parameter: Organism Value: A. thaliana
  misc_feature: MA Experiment 20001451 PARAMETER Experiment Name: At_Far-red-induction_P Parameter: Plant Line Value: Columbia
  misc_feature: MA Experiment 20001451 PARAMETER Experiment Name: At_Far-red-induction_P Parameter: Timepoint (hr) Value: 24
  misc_feature: MA Experiment 20001451 PARAMETER Experiment Name: At_Far-red-induction_P Parameter: Tissue Value: Whole Plant
  misc_feature: MA Experiment ID: 20001458 Result: Up-regulated in Transcription
  misc_feature: MA Experiment 20001458 PARAMETER Experiment Name: At_50mM_NH4NO3_L-to-H_P Parameter: Age (day) Value: Undefined
  misc_feature: MA Experiment 20001458 PARAMETER Experiment Name: At_50mM_NH4NO3_L-to-H_P Parameter: Organism Value: Undefined
  misc_feature: MA Experiment 20001458 PARAMETER Experiment Name: At_50mM_NH4NO3_L-to-H_P Parameter: Plant Line Value: Undefined
  misc_feature: MA Experiment 20001458 PARAMETER Experiment Name: At_50mM_NH4NO3_L-to-H_P Parameter: Timepoint (hr) Value: 2
  misc_feature: MA Experiment 20001458 PARAMETER Experiment Name: At_50mM_NH4NO3_L-to-H_P Parameter: Tissue Value: Siliques
  misc_feature: MA Experiment 20001458 PARAMETER Experiment Name: At_50mM_NH4NO3_L-to-H_P Parameter: Treatment Value: 50mM NH4NO3 vs. 100mM Manitol
  misc_feature: MA Experiment ID: 20001556 Result: Up-regulated in Transcription
  misc_feature: MA Experiment 20001556 PARAMETER Experiment Name: At_Drought_Soil_Dry_P Parameter: Age (day) Value: 26
  misc_feature: MA Experiment 20001556 PARAMETER Experiment Name: At_Drought_Soil_Dry_P Parameter: Organism Value: A. thaliana
  misc_feature: MA Experiment 20001556 PARAMETER Experiment Name: At_Drought_Soil_Dry_P Parameter: Plant Line Value: WS
  misc_feature: MA Experiment 20001556 PARAMETER Experiment Name: At_Drought_Soil_Dry_P Parameter: Post Timepoint (hr) Value: None
  misc_feature: MA Experiment 20001556 PARAMETER Experiment Name: At_Drought_Soil_Dry_P Parameter: Post-Treatment Value: None
  misc_feature: MA Experiment 20001556 PARAMETER Experiment Name: At_Drought_Soil_Dry_P Parameter: Timepoint (day) Value: 12
  misc_feature: MA Experiment 20001556 PARAMETER Experiment Name: At_Drought_Soil_Dry_P Parameter: Treatment Value: Drought vs. No Drought
  misc_feature: MA Experiment ID: 20001557 Result: Up-regulated in Transcription
  misc_feature: MA Experiment 20001557 PARAMETER Experiment Name: At_Drought_Soil_Dry_P Parameter: Age (day) Value: 27
  misc_feature: MA Experiment 20001557 PARAMETER Experiment Name: At_Drought_Soil_Dry_P Parameter: Organism Value: A. thaliana
  misc_feature: MA Experiment 20001557 PARAMETER Experiment Name: At_Drought_Soil_Dry_P Parameter: Plant Line Value: WS
  misc_feature: MA Experiment 20001557 PARAMETER Experiment Name: At_Drought_Soil_Dry_P Parameter: Post Timepoint (hr) Value: 3
  misc_feature: MA Experiment 20001557 PARAMETER Experiment Name: At_Drought_Soil_Dry_P Parameter: Post-Treatment Value: Re-Water vs. No Drought
  misc_feature: MA Experiment 20001557 PARAMETER Experiment Name: At_Drought_Soil_Dry_P Parameter: Timepoint (day) Value: 13
  misc_feature: MA Experiment 20001557 PARAMETER Experiment Name: At_Drought_Soil_Dry_P Parameter: Treatment Value: Drought vs. No Drought
  misc_feature: MA Experiment ID: 20001558 Result: Up-regulated in Transcription
  misc_feature: MA Experiment 20001558 PARAMETER Experiment Name: At_Drought_Soil_Dry_P Parameter: Age (day) Value: 27
  misc_feature: MA Experiment 20001558 PARAMETER Experiment Name: At_Drought_Soil_Dry_P Parameter: Organism Value: A. thaliana
  misc_feature: MA Experiment 20001558 PARAMETER Experiment Name: At_Drought_Soil_Dry_P Parameter: Plant Line Value: WS
  misc_feature: MA Experiment 20001558 PARAMETER Experiment Name: At_Drought_Soil_Dry_P Parameter: Post Timepoint (hr) Value: 6
  misc_feature: MA Experiment 20001558 PARAMETER Experiment Name: At_Drought_Soil_Dry_P Parameter: Post-Treatment Value: Re-Water vs. No Drought
  misc_feature: MA Experiment 20001558 PARAMETER Experiment Name: At_Drought_Soil_Dry_P Parameter: Timepoint (day) Value: 13
  misc_feature: MA Experiment 20001558 PARAMETER Experiment Name: At_Drought_Soil_Dry_P Parameter: Treatment Value: Drought vs. No Drought
  misc_feature: MA Experiment ID: 20001560 Result: Up-regulated in Transcription
  misc_feature: MA Experiment 20001560 PARAMETER Experiment Name: At_Drought_Soil_Dry_P Parameter: Age (day) Value: 28
  misc_feature: MA Experiment 20001560 PARAMETER Experiment Name: At_Drought_Soil_Dry_P Parameter: Organism Value: A. thaliana
  misc_feature: MA Experiment 20001560 PARAMETER Experiment Name: At_Drought_Soil_Dry_P Parameter: Plant Line Value: WS
  misc_feature: MA Experiment 20001560 PARAMETER Experiment Name: At_Drought_Soil_Dry_P Parameter: Post Timepoint (hr) Value: None
  misc_feature: MA Experiment 20001560 PARAMETER Experiment Name: At_Drought_Soil_Dry_P Parameter: Post-Treatment Value: None
  misc_feature: MA Experiment 20001560 PARAMETER Experiment Name: At_Drought_Soil_Dry_P Parameter: Timepoint (day) Value: 14
  misc_feature: MA Experiment 20001560 PARAMETER Experiment Name: At_Drought_Soil_Dry_P Parameter: Treatment Value: Drought vs. No Drought
  misc_feature: MA Experiment ID: 20001757 Result: Up-regulated in Transcription
  misc_feature: MA Experiment 20001757 PARAMETER Experiment Name: At_50mM_NH4NO3_L-to-H_P Parameter: Timepoint (hr) Value: 6
  misc_feature: MA Experiment 20001757 PARAMETER Experiment Name: At_50mM_NH4NO3_L-to-H_P Parameter: Tissue Value: Leaf
  misc_feature: MA Experiment 20001757 PARAMETER Experiment Name: At_50mM_NH4NO3_L-to-H_P Parameter: Treatment Value: 50mM NH4NO3 vs 100mM Mannitol
actaaaacctcacttatagtcgtctctggtgaaatcttgccggagagatctcaataaaatgtcatcttccagaatattcctagtcggtaattccatattccgacctcacaaaccatcctttcctctctctttcaatcgttttccatctgtatctctccgcttccgatgcttctccagtgacgccgccgccgcagtagcaaccaccgtggattcggattcgccgtctctcactcctcatccatggccagagtggataactttcgtcgatcgcttaaagacgaaaggatatttcaccaaagacaccgaagatgatactgtttatcaggaaatgattctcgttaaagatgcttgtctcagcttcgctcgtgatcgttacgacgttctcagatccttatcatcaggagatgtacaagctcttgtggagcgtggatgccctaatctcttcagaaaaactgtgaattcttccaaaaggattcgagctcatgttaagttaaacgaaggagatgtttgtggttcttgtgatcttcgtagctcgtgtgatagagcttatgtgatacttaaggatacagaagctgatgctcgaactgttgatgttatgcgtttactattgttcaatgcgcttgattctatagttatctctcgaggtgaagttccacctggtaaagaacttgttcatgagtctgcaagaagacttcttttagagttggttgagtttagtgagaagcctttaatccctgctttaccaaaaccttcttcaaaggaatcttctttgccttcgaaagagagagcttttaagtcgaggaatgatgagccttctcagcgtgtggcttttaaatcgaggaatgatgatccttctcaacgtgtggcttttaaatcgaggaatgatgagccttctcaccgtgtggcttttaaatcgcggaacgatgagtcttctcaacgtgatcgacctctttacagtgcagattgggcttgtcctaaatgcgactttgtaaactttgccagaaatgaaagatgccgagagtgcaatgaagtcgctgacagacgacctgttgctgctgttgtcaaggaaggtgactggctatgtcctgagtgtagtttcttaaacttcacaagaaaccagagctgtctgaaatgcaaagcaaagggaccaaagaaaacttcaatggtgaatattgttgaaatgaagaaaggagactggaactgcactgggtgtggatatatgaactttgctagcaacaaacagtgtcgagagtgccgagaacaacgtcacaagacgctagctgagcctggagattgggaatgcccctcatgcgacttcgtgaactttaggagaaacgatgcttgcaagaaatgcgagtgcaaacgacctagccaagccaataacgatcaagaagaccatacatggaaacgacccgccttagtgtaaacttatgcttttgtacttgcaagattcactgcttgctatttcctttcaacttgttgtttcttcttctcttgttgagttcccaaatttctaaacagataacaattttgaagcagaaaatggaaacctagtttgtagt

SEQ ID NO: 79554 - protein, 455 aa, Arabidopsis thaliana
  peptide (1)..(455): Ceres Seq. ID no. 12651865
  misc_feature (376)..(405): Pfam Name: Zn-finger in Ran binding protein and others Pfam Description: Zn-finger in Ran binding protein and others
  misc_feature (1)..(455): Homolog of NCBI NO: 15221905 NR Description: hypothetical protein; protein id: At1g48570.1, by cDNA: gi_17473843 [Arabidopsis thaliana]
  misc_feature (84)..(322): Homolog of NCBI NO: 13702809 NR Description: putative ARP protein [Oryza sativa]
  misc_feature (29)..(82): Homolog of NCBI NO: 13702809 NR Description: putative ARP protein [Oryza sativa]
  misc_feature (60)..(369): Homolog of NCBI NO: 18409643 NR Description: expressed protein; protein id: At1g70650.1,
  misc_feature (60)..(369): Homolog of NCBI NO: 21593408 NR Description: unknown [Arabidopsis thaliana]
  misc_feature (60)..(377): Homolog of NCBI NO: 13324787 NR Description: hypothetical protein [Oryza sativa]
  misc_feature (60)..(323): Homolog of NCBI NO: 25372841 NR Description: hypothetical protein F5A18.17 [imported] -
  misc_feature (79)..(322): Homolog of NCBI NO: 34393925 NR Description: unknown protein [Oryza sativa (japonica
  misc_feature (60)..(78): Homolog of NCBI NO: 34393925 NR Description: unknown protein [Oryza sativa (japonica
  misc_feature (83)..(336): Homolog of NCBI NO: 15293147 NR Description: unknown protein [Arabidopsis thaliana]
MSSSRIFLVGNSIFRPHKPSFPLSFNRFPSVSLRFRCFSSDAAAAVATTVDSDSPSLTPHPWPEWITFVDRLKTKGYFTKDTEDDTVYQEMILVKDACLSFARDRYDVLRSLSSGDVQALVERGCPNLFRKTVNSSKRIRAHVKLNEGDVCGSCDLRSSCDRAYVILKDTEADARTVDVMRLLLFNALDSIVISRGEVPPGKELVHESARRLLLELVEFSEKPLIPALPKPSSKESSLPSKERAFKSRNDEPSQRVAFKSRNDDPSQRVAFKSRNDEPSHRVAFKSRNDESSQRDRPLYSADWACPKCDFVNFARNERCRECNEVADRRPVAAVVKEGDWLCPECSFLNFTRNQSCLKCKAKGPKKTSMVNIVEMKKGDWNCTGCGYMNFASNKQCRECREQRHKTLAEPGDWECPSCDFVNFRRNDACKKCECKRPSQANNDQEDHTWKRPALV

SEQ ID NO: 79555 - protein, 365 aa, Arabidopsis thaliana
  peptide (1)..(365): Ceres Seq. ID no. 12651866
  misc_feature (286)..(315): Pfam Name: Zn-finger in Ran binding protein and others Pfam Description: Zn-finger in Ran binding protein and others
  misc_feature (1)..(365): Homolog of NCBI NO: 15221905 NR Description: hypothetical protein; protein id: At1g48570.1, by cDNA: gi_17473843 [Arabidopsis thaliana]
  misc_feature (1)..(232): Homolog of NCBI NO: 13702809 NR Description: putative ARP protein [Oryza sativa]
  misc_feature (1)..(279): Homolog of NCBI NO: 18409643 NR Description: expressed protein; protein id: At1g70650.1,
  misc_feature (1)..(279): Homolog of NCBI NO: 21593408 NR Description: unknown [Arabidopsis thaliana]
  misc_feature (1)..(287): Homolog of NCBI NO: 13324787 NR Description: hypothetical protein [Oryza sativa]
  misc_feature (1)..(233): Homolog of NCBI NO: 25372841 NR Description: hypothetical protein F5A18.17 [imported] -
  misc_feature (1)..(232): Homolog of NCBI NO: 34393925 NR Description: unknown protein [Oryza sativa (japonica
  misc_feature (1)..(246): Homolog of NCBI NO: 15293147 NR Description: unknown protein [Arabidopsis thaliana]
  misc_feature (1)..(246): Homolog of NCBI NO: 18405190 NR Description: expressed protein; protein id: At1g55040.1, by cDNA: gi_15293146 [Arabidopsis thaliana]
  misc_feature (284)..(360): Homolog of NCBI NO: 13702809 NR Description: putative ARP protein [Oryza sativa]
MILVKDACLSFARDRYDVLRSLSSGDVQALVERGCPNLFRKTVNSSKRIRAHVKLNEGDVCGSCDLRSSCDRAYVILKDTEADARTVDVMRLLLFNALDSIVISRGEVPPGKELVHESARRLLLELVEFSEKPLIPALPKPSSKESSLPSKERAFKSRNDEPSQRVAFKSRNDDPSQRVAFKSRNDEPSHRVAFKSRNDESSQRDRPLYSADWACPKCDFVNFARNERCRECNEVADRRPVAAVVKEGDWLCPECSFLNFTRNQSCLKCKAKGPKKTSMVNIVEMKKGDWNCTGCGYMNFASNKQCRECREQRHKTLAEPGDWECPSCDFVNFRRNDACKKCECKRPSQANNDQEDHTWKRPALV

SEQ ID NO: 79556 - protein, 276 aa, Arabidopsis thaliana
  peptide (1)..(276): Ceres Seq. ID no. 12651867
  misc_feature (197)..(226): Pfam Name: Zn-finger in Ran binding protein and others Pfam Description: Zn-finger in Ran binding protein and others
  misc_feature (1)..(276): Homolog of NCBI NO: 15221905 NR Description: hypothetical protein; protein id: At1g48570.1, by cDNA: gi_17473843 [Arabidopsis thaliana]
  misc_feature (1)..(143): Homolog of NCBI NO: 13702809 NR Description: putative ARP protein [Oryza sativa]
  misc_feature (1)..(190): Homolog of NCBI NO: 18409643 NR Description: expressed protein; protein id: At1g70650.1,
  misc_feature (1)..(190): Homolog of NCBI NO: 21593408 NR Description: unknown [Arabidopsis thaliana]
  misc_feature (1)..(198): Homolog of NCBI NO: 13324787 NR Description: hypothetical protein [Oryza sativa]
  misc_feature (1)..(144): Homolog of NCBI NO: 25372841 NR Description: hypothetical protein F5A18.17 [imported] -
  misc_feature (1)..(143): Homolog of NCBI NO: 34393925 NR Description: unknown protein [Oryza sativa (japonica
  misc_feature (1)..(157): Homolog of NCBI NO: 15293147 NR Description: unknown protein [Arabidopsis thaliana]
  misc_feature (1)..(157): Homolog of NCBI NO: 18405190 NR Description: expressed protein; protein id: At1g55040.1, by cDNA: gi_15293146 [Arabidopsis thaliana]
  misc_feature (195)..(271): Homolog of NCBI NO: 13702809 NR Description: putative ARP protein [Oryza sativa]
MRLLLFNALDSIVISRGEVPPGKELVHESARRLLLELVEFSEKPLIPALPKPSSKESSLPSKERAFKSRNDEPSQRVAFKSRNDDPSQRVAFKSRNDEPSHRVAFKSRNDESSQRDRPLYSADWACPKCDFVNFARNERCRECNEVADRRPVAAVVKEGDWLCPECSFLNFTRNQSCLKCKAKGPKKTSMVNIVEMKKGDWNCTGCGYMNFASNKQCRECREQRHKTLAEPGDWECPSCDFVNFRRNDACKKCECKRPSQANNDQEDHTWKRPALV

SEQ ID NO: 79557 - DNA, 1578 bp, Arabidopsis thaliana
  misc_feature (1)..(1578): Ceres Seq. ID no. 12651876
  misc_feature: MA Experiment ID: 20000314 Result: Up-regulated in Transcription
  misc_feature: MA Experiment 20000314 PARAMETER Experiment Name: At_14day_Shoots-Roots_Sub_P Parameter: Age (day) Value: 14
  misc_feature: MA Experiment 20000314 PARAMETER Experiment Name: At_14day_Shoots-Roots_Sub_P Parameter: Organism Value: A. thaliana
  misc_feature: MA Experiment 20000314 PARAMETER Experiment Name: At_14day_Shoots-Roots_Sub_P Parameter: Plant Line Value: WS
  misc_feature: MA Experiment 20000314 PARAMETER Experiment Name: At_14day_Shoots-Roots_Sub_P Parameter: Tissue Value: Roots vs. Whole Plant
atgatgaatccaagtttaaatctgatggatctggaggagctaacatcgaatgcaaagcagatacaagaagacgtattggaagagatactcacacttaatgccaacactgaatatcttcaccgcttcctccacgggagctctgataaagtgcttttcaaaaagaacgtaccggtggttacctatgatgatgttaagccttatatcgaacgtgttgcgaatggagagccctcggatgtgatttctggtggacctatcactatgttcctccgtagcaccggaacttcaggagggaaacaaaaggtatttccagtgaacgataagtacattgaaaagttgggatacgttattgctctacgatctctcgctatgtccaagcattttgatagcggtggcgagcaaggaaaagcgatggagtttcattgcactaaaccgccatcggcaacaccctctggtttaccgcgagatgaggttgtgagagtaggtgcagcctttgcttttgtcttggttcgagccatcgattttcttgagaaacactggaaggaattgtgtagcaatatccgatcaggtcatgttagtgagtggatcactgaccttgagggcagaaacgctgtctccaccattcttcgaggacctgattcaatattggctgatgttattgaacaagaatgcagccacaagtcctgggaaggtattattacacgactttggcccaaagccaaatatattgattgtattataacaggacaaatgtctcaatacattccaatgttggagttttattccaacaagctgcctatagtttccacaacatatgggtcttctgaaagtacatttgggatgaatgtggatcctctatgcaaaccacaagatacctcctacacatgtgcgccgaacatctcctacttcgagtttctacctgttgatcacaagggagacatggcaagcattgttgatcttgtcgacgtcaagttagggtgctactatgaaccggtggtcactaattattttggtctacacagatatcttattggagatattctacaggttactggattttacaataacacacctcaatttagatttgtacatagaaagaatgtggttttaagcgtgagatcggagacaacaactgaagaagacattttaaaggcgttgaatcatgtgggactggttcttgaatcttcagatttaatgttgatgggcttcacatgctatgcagatatctccacatttccaggtcactacgttttttactgggaactcaaagctaaagacgttcaagatgttttcgagcttgaggagaaagtaatggtgaaatgttgctctttattagaggagtcatttgatgaagtatatagaaaaaataggagtaaagatgagtgtatcggacctctagagataagagttgtgcaacaaggaacattcgattccctcatggaatatttcatctcccaaggaggttcgattgctcaatacaagacacccatatgtatcaactcttctgaagccttagcagttcttgaaaacaaggttcttgctcgattctttagcgaaaaatctcctcctcttgactcatag

SEQ ID NO: 79558 - protein, 525 aa, Arabidopsis thaliana
  peptide (1)..(525): Ceres Seq. ID no. 12651877
  misc_feature (6)..(506): Pfam Name: GH3 auxin-responsive promoter Pfam Description: GH3 auxin-responsive promoter
  misc_feature (1)..(525): Homolog of NCBI NO: 15221934 NR Description: Nt-gh3 deduced protein, putative; protein id:
  misc_feature (154)..(524): Homolog of NCBI NO: 15221933 NR Description: Nt-gh3 deduced protein, putative; protein id:
  misc_feature (2)..(152): Homolog of NCBI NO: 15221933 NR Description: Nt-gh3 deduced protein, putative; protein id:
  misc_feature (154)..(524): Homolog of NCBI NO: 15242095 NR Description: auxin-responsive GH3-like protein; protein id:
  misc_feature (11)..(153): Homolog of NCBI NO: 15242095 NR Description: auxin-responsive GH3-like protein; protein id:
  misc_feature (154)..(517): Homolog of NCBI NO: 15220661 NR Description: GH3-like auxin-regulated protein; protein id:
  misc_feature (11)..(153): Homolog of NCBI NO: 15220661 NR Description: GH3-like auxin-regulated protein; protein id:
  misc_feature (154)..(517): Homolog of NCBI NO: 15240601 NR Description: auxin-responsive - like protein; protein id:
  misc_feature (11)..(153): Homolog of NCBI NO: 15240601 NR Description: auxin-responsive - like protein; protein id:
  misc_feature (316)..(521): Homolog of NCBI NO: 15217844 NR Description: auxin-regulated GH3 protein, putative; protein At1g28130.1, supported by cDNA: gi_15450364 [Arabidopsis
MMNPSLNLMDLEELTSNAKQIQEDVLEEILTLNANTEYLHRFLHGSSDKVLFKKNVPVVTYDDVKPYIERVANGEPSDVISGGPITMFLRSTGTSGGKQKVFPVNDKYIEKLGYVIALRSLAMSKHFDSGGEQGKAMEFHCTKPPSATPSGLPRDEVVRVGAAFAFVLVRAIDFLEKHWKELCSNIRSGHVSEWITDLEGRNAVSTILRGPDSILADVIEQECSHKSWEGIITRLWPKAKYIDCIITGQMSQYIPMLEFYSNKLPIVSTTYGSSESTFGMNVDPLCKPQDTSYTCAPNISYFEFLPVDHKGDMASIVDLVDVKLGCYYEPVVTNYFGLHRYLIGDILQVTGFYNNTPQFRFVHRKNVVLSVRSETTTEEDILKALNHVGLVLESSDLMLMGFTCYADISTFPGHYVFYWELKAKDVQDVFELEEKVMVKCCSLLEESFDEVYRKNRSKDECIGPLEIRVVQQGTFDSLMEYFISQGGSIAQYKTPICINSSEALAVLENKVLARFFSEKSPPLDS

SEQ ID NO: 79559 - protein, 524 aa, Arabidopsis thaliana
  peptide (1)..(524): Ceres Seq. ID no. 12651878
  misc_feature (5)..(505): Pfam Name: GH3 auxin-responsive promoter Pfam Description: GH3 auxin-responsive promoter
  misc_feature (1)..(524): Homolog of NCBI NO: 15221934 NR Description: Nt-gh3 deduced protein, putative; protein id:
  misc_feature (153)..(523): Homolog of NCBI NO: 15221933 NR Description: Nt-gh3 deduced protein, putative; protein id:
  misc_feature (1)..(151): Homolog of NCBI NO: 15221933 NR Description: Nt-gh3 deduced protein, putative; protein id:
  misc_feature (153)..(523): Homolog of NCBI NO: 15242095 NR Description: auxin-responsive GH3-like protein; protein id:
  misc_feature (10)..(152): Homolog of NCBI NO: 15242095 NR Description: auxin-responsive GH3-like protein; protein id:
  misc_feature (153)..(516): Homolog of NCBI NO: 15220661 NR Description: GH3-like auxin-regulated protein; protein id:
  misc_feature (10)..(152): Homolog of NCBI NO: 15220661 NR Description: GH3-like auxin-regulated protein; protein id:
  misc_feature (153)..(516): Homolog of NCBI NO: 15240601 NR Description: auxin-responsive - like protein; protein id:
  misc_feature (10)..(152): Homolog of NCBI NO: 15240601 NR Description: auxin-responsive - like protein; protein id:
  misc_feature (315)..(520): Homolog of NCBI NO: 15217844 NR Description: auxin-regulated GH3 protein, putative; protein At1g28130.1, supported by cDNA: gi_15450364 [Arabidopsis
MNPSLNLMDLEELTSNAKQIQEDVLEEILTLNANTEYLHRFLHGSSDKVLFKKNVPVVTYDDVKPYIERVANGEPSDVISGGPITMFLRSTGTSGGKQKVFPVNDKYIEKLGYVIALRSLAMSKHFDSGGEQGKAMEFHCTKPPSATPSGLPRDEVVRVGAAFAFVLVRAIDFLEKHWKELCSNIRSGHVSEWITDLEGRNAVSTILRGPDSILADVIEQECSHKSWEGIITRLWPKAKYIDCIITGQMSQYIPMLEFYSNKLPIVSTTYGSSESTFGMNVDPLCKPQDTSYTCAPNISYFEFLPVDHKGDMASIVDLVDVKLGCYYEPVVTNYFGLHRYLIGDILQVTGFYNNTPQFRFVHRKNVVLSVRSETTTEEDILKALNHVGLVLESSDLMLMGFTCYADISTFPGHYVFYWELKAKDVQDVFELEEKVMVKCCSLLEESFDEVYRKNRSKDECIGPLEIRVVQQGTFDSLMEYFISQGGSIAQYKTPICINSSEALAVLENKVLARFFSEKSPPLDS

SEQ ID NO: 79560 - protein, 517 aa, Arabidopsis thaliana
  peptide (1)..(517): Ceres Seq. ID no. 12651879
  misc_feature (1)..(498): Pfam Name: GH3 auxin-responsive promoter Pfam Description: GH3 auxin-responsive promoter
  misc_feature (1)..(517): Homolog of NCBI NO: 15221934 NR Description: Nt-gh3 deduced protein, putative; protein id:
  misc_feature (146)..(516): Homolog of NCBI NO: 15221933 NR Description: Nt-gh3 deduced protein, putative; protein id:
  misc_feature (1)..(144): Homolog of NCBI NO: 15221933 NR Description: Nt-gh3 deduced protein, putative; protein id:
  misc_feature (146)..(516): Homolog of NCBI NO: 15242095 NR Description: auxin-responsive GH3-like protein; protein id:
  misc_feature (3)..(145): Homolog of NCBI NO: 15242095 NR Description: auxin-responsive GH3-like protein; protein id:
  misc_feature (146)..(509): Homolog of NCBI NO: 15220661 NR Description: GH3-like auxin-regulated protein; protein id:
  misc_feature (3)..(145): Homolog of NCBI NO: 15220661 NR Description: GH3-like auxin-regulated protein; protein id:
  misc_feature (146)..(509): Homolog of NCBI NO: 15240601 NR Description: auxin-responsive - like protein; protein id:
  misc_feature (3)..(145): Homolog of NCBI NO: 15240601 NR Description: auxin-responsive - like protein; protein id:
  misc_feature (308)..(513): Homolog of NCBI NO: 15217844 NR Description: auxin-regulated GH3 protein, putative; protein At1g28130.1, supported by cDNA: gi_15450364 [Arabidopsis
MDLEELTSNAKQIQEDVLEEILTLNANTEYLHRFLHGSSDKVLFKKNVPVVTYDDVKPYIERVANGEPSDVISGGPITMFLRSTGTSGGKQKVFPVNDKYIEKLGYVIALRSLAMSKHFDSGGEQGKAMEFHCTKPPSATPSGLPRDEVVRVGAAFAFVLVRAIDFLEKHWKELCSNIRSGHVSEWITDLEGRNAVSTILRGPDSILADVIEQECSHKSWEGIITRLWPKAKYIDCIITGQMSQYIPMLEFYSNKLPIVSTTYGSSESTFGMNVDPLCKPQDTSYTCAPNISYFEFLPVDHKGDMASIVDLVDVKLGCYYEPVVTNYFGLHRYLIGDILQVTGFYNNTPQFRFVHRKNVVLSVRSETTTEEDILKALNHVGLVLESSDLMLMGFTCYADISTFPGHYVFYWELKAKDVQDVFELEEKVMVKCCSLLEESFDEVYRKNRSKDECIGPLEIRVVQQGTFDSLMEYFISQGGSIAQYKTPICINSSEALAVLENKVLARFFSEKSPPLDS

SEQ ID NO: 79561 - DNA, 1182 bp, Arabidopsis thaliana
  misc_feature (1)..(1182): Ceres Seq. ID no. 12651897
  misc_feature: MA Experiment ID: 20000327 Result: Up-regulated in Transcription
  misc_feature: MA Experiment 20000327 PARAMETER Experiment Name: At_42deg_Heat_Sub_P Parameter: Age (day) Value: 14
  misc_feature: MA Experiment 20000327 PARAMETER Experiment Name: At_42deg_Heat_Sub_P Parameter: Organism Value: A. thaliana
  misc_feature: MA Experiment 20000327 PARAMETER Experiment Name: At_42deg_Heat_Sub_P Parameter: Plant Line Value: WS
  misc_feature: MA Experiment 20000327 PARAMETER Experiment Name: At_42deg_Heat_Sub_P Parameter: Temperature (deg C) Value: 42 vs. 22
  misc_feature: MA Experiment 20000327 PARAMETER Experiment Name: At_42deg_Heat_Sub_P Parameter: Timepoint (hr) Value: 1
  misc_feature: MA Experiment 20000327 PARAMETER Experiment Name: At_42deg_Heat_Sub_P Parameter: Tissue Value: Aerial
  misc_feature: MA Experiment ID: 20000328 Result: Up-regulated in Transcription
  misc_feature: MA Experiment 20000328 PARAMETER Experiment Name: At_42deg_Heat_Sub_P Parameter: Age (day) Value: 14
  misc_feature: MA Experiment 20000328 PARAMETER Experiment Name: At_42deg_Heat_Sub_P Parameter: Organism Value: A. thaliana
  misc_feature: MA Experiment 20000328 PARAMETER Experiment Name: At_42deg_Heat_Sub_P Parameter: Plant Line Value: WS
  misc_feature: MA Experiment 20000328 PARAMETER Experiment Name: At_42deg_Heat_Sub_P Parameter: Temperature (deg C) Value: 42 vs. 22
  misc_feature: MA Experiment 20000328 PARAMETER Experiment Name: At_42deg_Heat_Sub_P Parameter: Timepoint (hr) Value: 6
  misc_feature: MA Experiment 20000328 PARAMETER Experiment Name: At_42deg_Heat_Sub_P Parameter: Tissue Value: Aerial
  misc_feature: MA Experiment ID: 20000355 Result: Up-regulated in Transcription
  misc_feature: MA Experiment 20000355 PARAMETER Experiment Name: At_Siliques_Sub_P Parameter: Age (day) Value: 21
  misc_feature: MA Experiment 20000355 PARAMETER Experiment Name: At_Siliques_Sub_P Parameter: Organism Value: A. thaliana
  misc_feature: MA Experiment 20000355 PARAMETER Experiment Name: At_Siliques_Sub_P Parameter: Plant Line Value: WS
  misc_feature: MA Experiment 20000355 PARAMETER Experiment Name: At_Siliques_Sub_P Parameter: Tissue Value: Less Than 5mm Siliques vs. Whole Plant
  misc_feature: MA Experiment ID: 20000440 Result: Up-regulated in Transcription
  misc_feature: MA Experiment 20000440 PARAMETER Experiment Name: At_Closed-Flower__Sub_P Parameter: Tissue Value: Closed Flower vs. Whole Plant
atggcgttggacggtgacgaaacagtcgcaggtggagattctcaaccaccggtgactactgcagcggcgactacagaggagaaggctatcgcgaggctgagtccgtttcctaacatggagcacatttctgataactacggagatctggaactggaatatagctctgccatgttaagctcgctagagaagtacttgccgccggaaatgctcacggcgactagagaagagaaggccaaattcatgtctgacattttgcgcaagtacatttcccgcgacgaatgttccaaagctaaatggtgcaagaactattggcagaagataaaatctaattatcagccactttctagggagttgtataattttgatcccgaattgtttctgcttccctctttccgaaaggcgatcagcgaaaacacaaaggaaagcttcagacgtatcatttctgaaccgtttcctggtgttcttgtctttcaaatgtttcagcctgacttcattcagaaattgatagtagaggtagaaaatatcggaaagtgggttcatgagacaaatttcccaatcaggagaccgtaccacatgagtaaatacggtgttgcgtttgtcgactttggcctggatatcatgcttcagcaactcatggaggaatttctctttcctatttgcaaaggcaaggcatattttttacttagaaagacttttattgtattcttccctgaagagtgtggagcaatgtttgactctcaccatggatattatattgaaaatggtgaagatagggatcctccattaggctatcatttagatgattcggaaataacattgaatgtttgtgtgaggaaacaatttgagggaggggaaatatctttcataggcacacgatgcttgagacataagcgaacagacgtaaagccagaggaagtttttcattactgtcattcaccgggtcaagctatacttcatcgtggccgccaccgccatggtcccagagccaacacaccatcttgttctcgggccaatatgattctttgttgcagaaactctttgtttagagagatggaaaaatatgagaaagatttcccagagtggtgcaatgaatgcgcccatgaaaagaaagaaaaggaaagccagagtcttgatgccaaaagaaaggggatgattcgaattgcgactggaggcaaagcatga

SEQ ID NO: 79562 - protein, 393 aa, Arabidopsis thaliana
  peptide (1)..(393): Ceres Seq. ID no. 12651898
  misc_feature (245)..(345): Pfam Name: 2OG-Fe(II) oxygenase superfamily Pfam Description: 2OG-Fe(II) oxygenase superfamily
  misc_feature (1)..(393): Homolog of NCBI NO: 15221946 NR Description: unknown protein; protein id: At1g48740.1 thaliana] >gi|12597814|gb|AAG60125.1|AC073555_9 unknown protein
  misc_feature (29)..(382): Homolog of NCBI NO: 15239932 NR Description: putative protein; protein id: At5g43660.1
  misc_feature (234)..(387): Homolog of NCBI NO: 15221938 NR Description: unknown protein; protein id: At1g48700.1 thaliana] >gi|12597823|gb|AAG60134.1|AC073555_18 unknown protein
  misc_feature (69)..(195): Homolog of NCBI NO: 15221938 NR Description: unknown protein; protein id: At1g48700.1 thaliana] >gi|12597823|gb|AAG60134.1|AC073555_18 unknown protein
  misc_feature (3)..(386): Homolog of NCBI NO: 18401806 NR Description: expressed protein; protein id: At3g18210.1, by cDNA: gi_14423467 [Arabidopsis thaliana] gb|AAB72163.1~gene_id:MRC8.21~strong similarity to unknown
  misc_feature (1)..(388): Homolog of NCBI NO: 15219973 NR Description: unknown protein; protein id: At1g22950.1
  misc_feature (1)..(388): Homolog of NCBI NO: 25518648 NR Description: hypothetical protein F19G10.9 [imported] - thaliana >gi|2462828|gb|AAB72163.1| hypothetical protein
  misc_feature (1)..(390): Homolog of NCBI NO: 34914494 NR Description: B1080D07.28 [Oryza sativa (japonica
  misc_feature (16)..(256): Homolog of NCBI NO: 34906198 NR Description: OJ1174_D05.17 [Oryza sativa (japonica
  misc_feature (107)..(349): Homolog of NCBI NO: 13375846 NR Description: hypothetical protein FLJ13491 [Homo sapiens]
MALDGDETVAGGDSQPPVTTAAATTEEKAIARLSPFPNMEHISDNYGDLELEYSSAMLSSLEKYLPPEMLTATREEKAKFMSDILRKYISRDECSKAKWCKNYWQKIKSNYQPLSRELYNFDPELFLLPSFRKAISENTKESFRRIISEPFPGVLVFQMFQPDFIQKLIVEVENIGKWVHETNFPIRRPYHMSKYGVAFVDFGLDIMLQQLMEEFLFPICKGKAYFLLRKTFIVFFPEECGAMFDSHHGYYIENGEDRDPPLGYHLDDSEITLNVCVRKQFEGGEISFIGTRCLRHKRTDVKPEEVFHYCHSPGQAILHRGRHRHGPRANTPSCSRANMILCCRNSLFREMEKYEKDFPEWCNECAHEKKEKESQSLDAKRKGMIRIATGGKA

SEQ ID NO: 79563 - protein, 355 aa, Arabidopsis thaliana
  peptide (1)..(355): Ceres Seq. ID no. 12651899
  misc_feature (207)..(307): Pfam Name: 2OG-Fe(II) oxygenase superfamily Pfam Description: 2OG-Fe(II) oxygenase superfamily
  misc_feature (1)..(355): Homolog of NCBI NO: 15221946 NR Description: unknown protein; protein id: At1g48740.1 thaliana] >gi|12597814|gb|AAG60125.1|AC073555_9 unknown protein
  misc_feature (1)..(344): Homolog of NCBI NO: 15239932 NR Description: putative protein; protein id: At5g43660.1
  misc_feature (196)..(349): Homolog of NCBI NO: 15221938 NR Description: unknown protein; protein id: At1g48700.1 thaliana] >gi|12597823|gb|AAG60134.1|AC073555_18 unknown protein
  misc_feature (31)..(157): Homolog of NCBI NO: 15221938 NR Description: unknown protein; protein id: At1g48700.1 thaliana] >gi|12597823|gb|AAG60134.1|AC073555_18 unknown protein
  misc_feature (1)..(348): Homolog of NCBI NO: 18401806 NR Description: expressed protein; protein id: At3g18210.1, by cDNA: gi_14423467 [Arabidopsis thaliana] gb|AAB72163.1~gene_id:MRC8.21~strong similarity to unknown
  misc_feature (1)..(350): Homolog of NCBI NO: 15219973 NR Description: unknown protein; protein id: At1g22950.1
  misc_feature (1)..(350): Homolog of NCBI NO: 25518648 NR Description: hypothetical protein F19G10.9 [imported] - thaliana >gi|2462828|gb|AAB72163.1| hypothetical protein
  misc_feature (1)..(352): Homolog of NCBI NO: 34914494 NR Description: B1080D07.28 [Oryza sativa (japonica
  misc_feature (1)..(218): Homolog of NCBI NO: 34906198 NR Description: OJ1174_D05.17 [Oryza sativa (japonica
  misc_feature (69)..(311): Homolog of NCBI NO: 13375846 NR Description: hypothetical protein FLJ13491 [Homo sapiens]
MEHISDNYGDLELEYSSAMLSSLEKYLPPEMLTATREEKAKFMSDILRKYISRDECSKAKWCKNYWQKIKSNYQPLSRELYNFDPELFLLPSFRKAISENTKESFRRIISEPFPGVLVFQMFQPDFIQKLIVEVENIGKWVHETNFPIRRPYHMSKYGVAFVDFGLDIMLQQLMEEFLFPICKGKAYFLLRKTFIVFFPEECGAMFDSHHGYYIENGEDRDPPLGYHLDDSEITLNVCVRKQFEGGEISFIGTRCLRHKRTDVKPEEVFHYCHSPGQAILHRGRHRHGPRANTPSCSRANMILCCRNSLFREMEKYEKDFPEWCNECAHEKKEKESQSLDAKRKGMIRIATGGKA

SEQ ID NO: 79564 - protein, 337 aa, Arabidopsis thaliana
  peptide (1)..(337): Ceres Seq. ID no. 12651900
  misc_feature (189)..(289): Pfam Name: 2OG-Fe(II) oxygenase superfamily Pfam Description: 2OG-Fe(II) oxygenase superfamily
  misc_feature (1)..(337): Homolog of NCBI NO: 15221946 NR Description: unknown protein; protein id: At1g48740.1 thaliana] >gi|12597814|gb|AAG60125.1|AC073555_9 unknown protein
  misc_feature (1)..(326): Homolog of NCBI NO: 15239932 NR Description: putative protein; protein id: At5g43660.1
  misc_feature (178)..(331): Homolog of NCBI NO: 15221938 NR Description: unknown protein; protein id: At1g48700.1 thaliana] >gi|12597823|gb|AAG60134.1|AC073555_18 unknown protein
  misc_feature (13)..(139): Homolog of NCBI NO: 15221938 NR Description: unknown protein; protein id: At1g48700.1 thaliana] >gi|12597823|gb|AAG60134.1|AC073555_18 unknown protein
  misc_feature (1)..(330): Homolog of NCBI NO: 18401806 NR Description: expressed protein; protein id: At3g18210.1, by cDNA: gi_14423467 [Arabidopsis thaliana] gb|AAB72163.1~gene_id:MRC8.21~strong similarity to unknown
  misc_feature (1)..(332): Homolog of NCBI NO: 15219973 NR Description: unknown protein; protein id: At1g22950.1
  misc_feature (1)..(332): Homolog of NCBI NO: 25518648 NR Description: hypothetical protein F19G10.9 [imported] - thaliana >gi|2462828|gb|AAB72163.1| hypothetical protein
  misc_feature (1)..(334): Homolog of NCBI NO: 34914494 NR Description: B1080D07.28 [Oryza sativa (japonica
  misc_feature (1)..(200): Homolog of NCBI NO: 34906198 NR Description: OJ1174_D05.17 [Oryza sativa (japonica
  misc_feature (51)..(293): Homolog of NCBI NO: 13375846 NR Description: hypothetical protein FLJ13491 [Homo sapiens]
MLSSLEKYLPPEMLTATREEKAKFMSDILRKYISRDECSKAKWCKNYWQKIKSNYQPLSRELYNFDPELFLLPSFRKAISENTKESFRRIISEPFPGVLVFQMFQPDFIQKLIVEVENIGKWVHETNFPIRRPYHMSKYGVAFVDFGLDIMLQQLMEEFLFPICKGKAYFLLRKTFIVFFPEECGAMFDSHHGYYIENGEDRDPPLGYHLDDSEITLNVCVRKQFEGGEISFIGTRCLRHKRTDVKPEEVFHYCHSPGQAILHRGRHRHGPRANTPSCSRANMILCCRNSLFREMEKYEKDFPEWCNECAHEKKEKESQSLDAKRKGMIRIATGGKA

SEQ ID NO: 79565 - DNA, 2271 bp, Arabidopsis thaliana
  misc_feature (1)..(2271): Ceres Seq. ID no. 12651926
  misc_feature: MA Experiment ID: 20001451 Result: Down-regulated in Transcription
  misc_feature: MA Experiment 20001451 PARAMETER Experiment Name: At_Far-red-induction_P Parameter: Age (day) Value: 7
  misc_feature: MA Experiment 20001451 PARAMETER Experiment Name: At_Far-red-induction_P Parameter: Light Value: Far-red vs. White
  misc_feature: MA Experiment 20001451 PARAMETER Experiment Name: At_Far-red-induction_P Parameter: Organism Value: A. thaliana
  misc_feature: MA Experiment 20001451 PARAMETER Experiment Name: At_Far-red-induction_P Parameter: Plant Line Value: Columbia
  misc_feature: MA Experiment 20001451 PARAMETER Experiment Name: At_Far-red-induction_P Parameter: Timepoint (hr) Value: 24
  misc_feature: MA Experiment 20001451 PARAMETER Experiment Name: At_Far-red-induction_P Parameter: Tissue Value: Whole Plant
atggatactcgtcgcggagctcttgcggttcctaaagtccgtcgagtaggtttcttcacatcaatcgagccgcctccagaatcatcattacaacgaccaaatcgaagccaatccggtccagtagatgcaaccacctcttcttctcctctctccgattcaccttccggtaacttaatttctccggtcttaattccaccgtcgcgtcaccattccgacaatttaacctctcgcgttgctgctgctgctgctgctcctgtgcccgtccctggacctgccgctttccgccgatacttaactcctgaacggactcttcttcacgttggtagttacaatcctccggattcgcttctcgggacatcatcaccctcgagtaacggagggctttctgaggattcggcttctctgtttgggttccaacggagtgattcgacgaaattatcagcaagcttacctaatggaggctttgatttgactctagctgttagagctcctcaggaatctgaaaccaaaattgcgaccacgtctgcttctcaagggaaaaagaagatcgccgaagtttctgagacctttgtggtgaattgtgatccccaagtaacatcggatgaggcagcctgtagtgccgtagggactggagttttagggagaccttatagcggtatttggagaatgtttaaagttgagtttggtttagaagtctgctgttgtggacctgtggtctgtgtgaaatgcatacgtttgcggaggtggtacaacatactcccaaatcaagcacgtcaaggaagctgcatctctataatgggaagaataaatcctgcaggaaagagtgagtctgcgaccacaaaaccccagaaggaaaaggaaccaaaagcattgaaagataaaaccactaaagcagaaagacgtgccatccaagaggcacaacgggcagcaaaagctgctgcaaaaggcgaaggaagcaggcgtgcagatgagtctggtagagctaatcctggcaaggctgccataaagccccaaccaaagaaagaaagacttcccgtcacgtcctctgtttctgaaaaaacagctgtagcagtagaaaaagagaagaggatggatgtccctcagacacaaatgcagtatgatgataaaagccgagtggataaagctaagaggcgagctgtggttgaacagaccgagagcaagaacaaagttgaattatttctccatcttcctcaatacgaacgcagcaatcagcttcccaatttaagctccaattttttcacactcgattccatacaccatgcagtctataaggtgggtttgcaacatttggctggagatatatctggggacaatgcacgatgtattgccatgctccaagcatttcaagaagctatagaagattacagtacacctcctatgaaagacctgaccatggacttgacagccaagataaacggttatgtttcattcttgatagaatgtcgtcccctctccatgagcatgggaaacgcaatcaggttcctgaagaaccaaatcagaaaactacctgtaaacctgtcagaatcagaggcaaaaagttccctctgttctgacattggccggttcatagacgagaagacaattattgcagataaggcaatcgtgcaacacgccgtaacaaaaatcagagacggagaagttcttcttacatatggattctcttgtgtggttgaaatgattctcctatacgcccatgagattgggaaaaagttccgcgtagtgattgtagactcacgccctaaccttgaagggcaaaagctactccgtagacttgtgactcgtggcctcgactgtacctacactcatataaatgccatttcctacatcatgcgtgaggctacacgtgtttttctcggtgcttcatcaatatactcgaatggaactctttacgcaagagttggcacatcctgcattgcaatggttgcaaacgcatttagtgttcctgtaattgtttgttgtgaagcttacaagttccatgaaagagtcctacttgattcaatctgctccaacgaacttggcgatcctgacgccgtagccaacataccatcatttagaaccaatgcaaagcattcaaagacaatggacaacaacaaaaaccttcagtttctgaatctaatgtatgattctactccttcagaatatatatctatgattgtttcggattatggaatgagcaatttccatttagtgtctgatacatttgtgatttgtgtatgtgtgaatagattcctccgacgagtataccagtga

SEQ ID NO: 79566 - protein, 756 aa, Arabidopsis thaliana
  peptide (1)..(756): Ceres Seq. ID no. 12651927
  misc_feature (300)..(736): Pfam Name: Initiation factor 2 subunit family Pfam Description: Initiation factor 2 subunit family
  misc_feature (271)..(731): Homolog of NCBI NO: 15240967 NR Description: putative protein; protein id: At5g38640.1, by cDNA: gi_17064893 [Arabidopsis thaliana] contains similarity to guanine nucleotide exchange
  misc_feature (1)..(212): Homolog of NCBI NO: 15240967 NR Description: putative protein; protein id: At5g38640.1, by cDNA: gi_17064893 [Arabidopsis thaliana] contains similarity to guanine nucleotide exchange
  misc_feature (451)..(731): Homolog of NCBI NO: 15224811 NR Description: putative translation initiation factor eIF-2B subunit; protein id: At2g44070.1, supported by cDNA: gi_18491238
  misc_feature (305)..(731): Homolog of NCBI NO: 33337571 NR Description: EIF-2B-delta-like protein [Homo sapiens]
  misc_feature (274)..(731): Homolog of NCBI NO: 6010114 NR Description: guanine nucleotide exchange factor (long isoform)
  misc_feature (274)..(731): Homolog of NCBI NO: 6012058 NR Description: guanine nucleotide exchange factor [Homo sapiens]
  misc_feature (274)..(731): Homolog of NCBI NO: 26986532 NR Description: eukaryotic translation initiation factor 2B,
  misc_feature (305)..(731): Homolog of NCBI NO: 28381357 NR Description: Translation initiation factor eIF-2B delta
  misc_feature (309)..(731): Homolog of NCBI NO: 16758830 NR Description: eukaryotic translation initiation factor 2B
  misc_feature (305)..(731): Homolog of NCBI NO: 6563202 NR Description: translation initiation factor eIF-2b delta
MDTRRGALAVPKVRRVGFFTSIEPPPESSLQRPNRSQSGPVDATTSSSPLSDSPSGNLISPVLIPPSRHHSDNLTSRVAAAAAAPVPVPGPAAFRRYLTPERTLLHVGSYNPPDSLLGTSSPSSNGGLSEDSASLFGFQRSDSTKLSASLPNGGFDLTLAVRAPQESETKIATTSASQGKKKIAEVSETFVVNCDPQVTSDEAACSAVGTGVLGRPYSGIWRMFKVEFGLEVCCCGPVVCVKCIRLRRWYNILPNQARQGSCISIMGRINPAGKSESATTKPQKEKEPKALKDKTTKAERRAIQEAQRAAKAAAKGEGSRRADESGRANPGKAAIKPQPKKERLPVTSSVSEKTAVAVEKEKRMDVPQTQMQYDDKSRVDKAKRRAVVEQTESKNKVELFLHLPQYERSNQLPNLSSNFFTLDSIHHAVYKVGLQHLAGDISGDNARCIAMLQAFQEAIEDYSTPPMKDLTMDLTAKINGYVSFLIECRPLSMSMGNAIRFLKNQIRKLPVNLSESEAKSSLCSDIGRFIDEKTIIADKAIVQHAVTKIRDGEVLLTYGFSCVVEMILLYAHEIGKKFRVVIVDSRPNLEGQKLLRRLVTRGLDCTYTHINAISYIMREATRVFLGASSIYSNGTLYARVGTSCIAMVANAFSVPVIVCCEAYKFHERVLLDSICSNELGDPDAVANIPSFRTNAKHSKTMDNNKNLQFLNLMYDSTPSEYISMIVSDYGMSNFHLVSDTFVICVCVNRFLRRVYQ

SEQ ID NO: 79567 - protein, 534 aa, Arabidopsis thaliana
  peptide (1)..(534): Ceres Seq. ID no. 12651928
  misc_feature (78)..(514): Pfam Name: Initiation factor 2 subunit family Pfam Description: Initiation factor 2 subunit family
  misc_feature (49)..(509): Homolog of NCBI NO: 15240967 NR Description: putative protein; protein id: At5g38640.1, by cDNA: gi_17064893 [Arabidopsis thaliana] contains similarity to guanine nucleotide exchange
  misc_feature (229)..(509): Homolog of NCBI NO: 15224811 NR Description: putative translation initiation factor eIF-2B subunit; protein id: At2g44070.1, supported by cDNA: gi_18491238
  misc_feature (83)..(509): Homolog of NCBI NO: 33337571 NR Description: EIF-2B-delta-like protein [Homo sapiens]
  misc_feature (52)..(509): Homolog of NCBI NO: 6010114 NR Description: guanine nucleotide exchange factor (long isoform)
  misc_feature (52)..(509): Homolog of NCBI NO: 6012058 NR Description: guanine nucleotide exchange factor [Homo sapiens]
  misc_feature (52)..(509): Homolog of NCBI NO: 26986532 NR Description: eukaryotic translation initiation factor 2B,
  misc_feature (83)..(509): Homolog of NCBI NO: 28381357 NR Description: Translation initiation factor eIF-2B delta
  misc_feature (87)..(509): Homolog of NCBI NO: 16758830 NR Description: eukaryotic translation initiation factor 2B
  misc_feature (83)..(509): Homolog of NCBI NO: 6563202 NR Description: translation initiation factor eIF-2b delta
  misc_feature (55)..(509): Homolog of NCBI NO: 471329 NR Description: translation initiation factor eIF-2B-delta
MFKVEFGLEVCCCGPVVCVKCIRLRRWYNILPNQARQGSCISIMGRINPAGKSESATTKPQKEKEPKALKDKTTKAERRAIQEAQRAAKAAAKGEGSRRADESGRANPGKAAIKPQPKKERLPVTSSVSEKTAVAVEKEKRMDVPQTQMQYDDKSRVDKAKRRAVVEQTESKNKVELFLHLPQYERSNQLPNLSSNFFTLDSIHHAVYKVGLQHLAGDISGDNARCIAMLQAFQEAIEDYSTPPMKDLTMDLTAKINGYVSFLIECRPLSMSMGNAIRFLKNQIRKLPVNLSESEAKSSLCSDIGRFIDEKTIIADKAIVQHAVTKIRDGEVLLTYGFSCVVEMILLYAHEIGKKFRVVIVDSRPNLEGQKLLRRLVTRGLDCTYTHINAISYIMREATRVFLGASSIYSNGTLYARVGTSCIAMVANAFSVPVIVCCEAYKFHERVLLDSICSNELGDPDAVANIPSFRTNAKHSKTMDNNKNLQFLNLMYDSTPSEYISMIVSDYGMSNFHLVSDTFVICVCVNRFLRRVYQ

SEQ ID NO: 79568 - protein, 491 aa, Arabidopsis thaliana
  peptide (1)..(491): Ceres Seq. ID no. 12651929
  misc_feature (35)..(471): Pfam Name: Initiation factor 2 subunit family Pfam Description: Initiation factor 2 subunit family
  misc_feature (6)..(466): Homolog of NCBI NO: 15240967 NR Description: putative protein; protein id: At5g38640.1, by cDNA: gi_17064893 [Arabidopsis thaliana] contains similarity to guanine nucleotide exchange
  misc_feature (186)..(466): Homolog of NCBI NO: 15224811 NR Description: putative translation initiation factor eIF-2B subunit; protein id: At2g44070.1, supported by cDNA: gi_18491238
  misc_feature (40)..(466): Homolog of NCBI NO: 33337571 NR Description: EIF-2B-delta-like protein [Homo sapiens]
  misc_feature (9)..(466): Homolog of NCBI NO: 6010114 NR Description: guanine nucleotide exchange factor (long isoform)
  misc_feature (9)..(466): Homolog of NCBI NO: 26986532 NR Description: eukaryotic translation initiation factor 2B,
  misc_feature (9)..(466): Homolog of NCBI NO: 6012058 NR Description: guanine nucleotide exchange factor [Homo sapiens]
  misc_feature (40)..(466): Homolog of NCBI NO: 28381357 NR Description: Translation initiation factor eIF-2B delta
  misc_feature (44)..(466): Homolog of NCBI NO: 16758830 NR Description: eukaryotic translation initiation factor 2B
  misc_feature (40)..(466): Homolog of NCBI NO: 6563202 NR Description: translation initiation factor eIF-2b delta
  misc_feature (12)..(466): Homolog of NCBI NO: 471329 NR Description: translation initiation factor eIF-2B-delta
MGRINPAGKSESATTKPQKEKEPKALKDKTTKAERRAIQEAQRAAKAAAKGEGSRRADESGRANPGKAAIKPQPKKERLPVTSSVSEKTAVAVEKEKRMDVPQTQMQYDDKSRVDKAKRRAVVEQTESKNKVELFLHLPQYERSNQLPNLSSNFFTLDSIHHAVYKVGLQHLAGDISGDNARCIAMLQAFQEAIEDYSTPPMKDLTMDLTAKINGYVSFLIECRPLSMSMGNAIRFLKNQIRKLPVNLSESEAKSSLCSDIGRFIDEKTIIADKAIVQHAVTKIRDGEVLLTYGFSCVVEMILLYAHEIGKKFRVVIVDSRPNLEGQKLLRRLVTRGLDCTYTHINAISYIMREATRVFLGASSIYSNGTLYARVGTSCIAMVANAFSVPVIVCCEAYKFHERVLLDSICSNELGDPDAVANIPSFRTNAKHSKTMDNNKNLQFLNLMYDSTPSEYISMIVSDYGMSNFHLVSDTFVICVCVNRFLRRVYQ

SEQ ID NO: 79569 - DNA, 1974 bp, Arabidopsis thaliana
  misc_feature (1)..(1974): Ceres Seq. ID no. 12651963
  misc_feature: MA Experiment ID: 20000355 Result: Up-regulated in Transcription
  misc_feature: MA Experiment 20000355 PARAMETER Experiment Name: At_Siliques_Sub_P Parameter: Age (day) Value: 21
  misc_feature: MA Experiment 20000355 PARAMETER Experiment Name: At_Siliques_Sub_P Parameter: Organism Value: A. thaliana
  misc_feature: MA Experiment 20000355 PARAMETER Experiment Name: At_Siliques_Sub_P Parameter: Plant Line Value: WS
  misc_feature: MA Experiment 20000355 PARAMETER Experiment Name: At_Siliques_Sub_P Parameter: Tissue Value: Less Than 5mm Siliques vs. Whole Plant
  misc_feature: MA Experiment ID: 20000440 Result: Up-regulated in Transcription
  misc_feature: MA Experiment 20000440 PARAMETER Experiment Name: At_Closed-Flower__Sub_P Parameter: Tissue Value: Closed Flower vs. Whole Plant
atgtcgaatgcttccgccaagaagaagagaaaactcgaggaaaccgtagatacgccaccgactagggttgatgacaaaaccctagttcttatttctgattcgaaaaaacccaaatcagatagggttaccaaactgaagagcaaaattgggttgctgaagaagaagccaactgaaagtggcaggattgtcatcactcatattctgtgtaacatgttgagaaccgttatcgccactactcctgatgatttgctacctactgtttatcttgctgcaaatgagattgcccctgctcatgaaggtattaaattgggaatgggtaagggttcctacattattaaggcaatctctgaagcttttggtagaactgagtcccacgttgagcagcaatatacgcaactgggagacttggggcttgtagcaaatgggagccgttcctctcagactatgattttcatgcccaaaccattaactgttgtcaaggttgctgatacacttcgcctaattgctaaggaatctggaaaaggtagtaaggataagaagaaggatctaatgaaggcacttcttgtggcaactacagattgtgaacctctttacttaactcgtttacttcaggataatttgcggttagggttctcacgtcaaactgttttagctgccttgggacaggctgctgtatataacgaagagcattctaagccgcccccaaatatcaagaatcctttagatgaggctgcaacgattgttaaagaagtattctcaatgcttcctgtctatgacattattgttggtgctcttctaactagtggtgtatggaatcttcctaaaacttgtaacctcacactcggtgttccagttaggcccatgcttgcaaaagcaactacaagagtagatctcatacttgagaaattcaaggacactgttttcacagctgaatacaaatatgatggtgaacgtgcacagatatattatatggaggatggtacagtcgagatattcagtagacatgctgaaagaaacactggcaagtaccctgatgttgctcttgtgttatcaaggttaaagaagcccactgtgaaatcttttattctggattgcgaggttgtcaccttcaacagagaaaaagagaaaattcttccactccagagtacacgagcccataaaaatgtgaatgtcagtgatatcaaggttggcgtatgcgtctttgcttttgatatattatacctaaatggccaactacttatccatgagaatctgaacattcgccgagagaagctacacgattcatttgaggaagatcttgggtatttccagtttgcaactgctctaacatccaacgatattggtgaattacaagagtttcttaaagcttctattgacataggatgtgaaggtttaatgataaagtcattgtactcaaatgcaacctatgagcctgcaaagagatcaaataattggctaaaactgaagaaggactatatggacaacattggagattccgtggatcttgtaccaatagctacgttccatggacgtgggaaacgcacaggtttctttggtgcatatttactagcgtgctacgatgttgataaggaagaattccagagcatttgtaaaattggtactgaattttctgatgtggagcttcaagatttgtcttccagtctttgctctaaagtgattgctactccgaaacaatactaccaagtcgataacgatctcaatccagatgtctggttggagcccaccgaggtgtgggaagtgaaagcagctgacttgacagttagccctgtatatcgtgaagctattggaattgtggaccctgacaagggaatttctctacgatttcctcgtctagtccgtatacggaaagacaagaatccagaggaagcaacaacatctgaccagattgctgaaatgtatcaagctcagaaacacaatcaaccaagcaatcaaggcaaagtggacgacgattga

SEQ ID NO: 79570 - protein, 657 aa, Arabidopsis thaliana
  peptide (1)..(657): Ceres Seq. ID no. 12651964
  misc_feature (284)..(489): Pfam Name: ATP dependent DNA ligase domain Pfam Description: ATP dependent DNA ligase domain
  misc_feature (58)..(657): Homolog of NCBI NO: 30680522 NR Description: ligase I -related [Arabidopsis thaliana] DNA ligase (Polydeoxyribonucleotide synthase [ATP])
  misc_feature (58)..(657): Homolog of NCBI NO: 2129574 NR Description: DNA ligase (ATP) (EC 6.5.1.1) - Arabidopsis
  misc_feature (58)..(461): Homolog of NCBI NO: 6579215 NR Description: T23G18.1 [Arabidopsis thaliana]
  misc_feature (496)..(584): Homolog of NCBI NO: 6579215 NR Description: T23G18.1 [Arabidopsis thaliana]
  misc_feature (583)..(657): Homolog of NCBI NO: 6579215 NR Description: T23G18.1 [Arabidopsis thaliana]
  misc_feature (58)..(461): Homolog of NCBI NO: 8778834 NR Description: T6D22.23 [Arabidopsis thaliana]
  misc_feature (496)..(583): Homolog of NCBI NO: 8778834 NR Description: T6D22.23 [Arabidopsis thaliana]
  misc_feature (583)..(653): Homolog of NCBI NO: 8778834 NR Description: T6D22.23 [Arabidopsis thaliana]
  misc_feature (58)..(657): Homolog of NCBI NO: 37535574 NR Description: putative DNA ligase [Oryza sativa (japonica >gi|16905197|gb|AAL31067.1| putative DNA ligase [Oryza sativa]
  misc_feature (31)..(657): Homolog of NCBI NO: 28830036 NR Description: similar to Xenopus laevis (African clawed frog). ligase I (EC 6.5.1.1) (Polydeoxyribonucleotide synthase [ATP])
MSNASAKKKRKLEETVDTPPTRVDDKTLVLISDSKKPKSDRVTKLKSKIGLLKKKPTESGRIVITHILCNMLRTVIATTPDDLLPTVYLAANEIAPAHEGIKLGMGKGSYIIKAISEAFGRTESHVEQQYTQLGDLGLVANGSRSSQTMIFMPKPLTVVKVADTLRLIAKESGKGSKDKKKDLMKALLVATTDCEPLYLTRLLQDNLRLGFSRQTVLAALGQAAVYNEEHSKPPPNIKNPLDEAATIVKEVFSMLPVYDIIVGALLTSGVWNLPKTCNLTLGVPVRPMLAKATTRVDLILEKFKDTVFTAEYKYDGERAQIYYMEDGTVEIFSRHAERNTGKYPDVALVLSRLKKPTVKSFILDCEVVTFNREKEKILPLQSTRAHKNVNVSDIKVGVCVFAFDILYLNGQLLIHENLNIRREKLHDSFEEDLGYFQFATALTSNDIGELQEFLKASIDIGCEGLMIKSLYSNATYEPAKRSNNWLKLKKDYMDNIGDSVDLVPIATFHGRGKRTGFFGAYLLACYDVDKEEFQSICKIGTEFSDVELQDLSSSLCSKVIATPKQYYQVDNDLNPDVWLEPTEVWEVKAADLTVSPVYREAIGIVDPDKGISLRFPRLVRIRKDKNPEEATTSDQIAEMYQAQKHNQPSNQGKVDDD

SEQ ID NO: 79571 - protein, 587 aa, Arabidopsis thaliana
  peptide (1)..(587): Ceres Seq. ID no. 12651965
  misc_feature (214)..(419): Pfam Name: ATP dependent DNA ligase domain Pfam Description: ATP dependent DNA ligase domain
  misc_feature (1)..(587): Homolog of NCBI NO: 30680522 NR Description: ligase I -related [Arabidopsis thaliana] DNA ligase (Polydeoxyribonucleotide synthase [ATP])
  misc_feature (1)..(587): Homolog of NCBI NO: 2129574 NR Description: DNA ligase (ATP) (EC 6.5.1.1) - Arabidopsis
  misc_feature (1)..(391): Homolog of NCBI NO: 6579215 NR Description: T23G18.1 [Arabidopsis thaliana]
  misc_feature (426)..(514): Homolog of NCBI NO: 6579215 NR Description: T23G18.1 [Arabidopsis thaliana]
  misc_feature (513)..(587): Homolog of NCBI NO: 6579215 NR Description: T23G18.1 [Arabidopsis thaliana]
  misc_feature (1)..(391): Homolog of NCBI NO: 8778834 NR Description: T6D22.23 [Arabidopsis thaliana]
  misc_feature (426)..(513): Homolog of NCBI NO: 8778834 NR Description: T6D22.23 [Arabidopsis thaliana]
  misc_feature (513)..(583): Homolog of NCBI NO: 8778834 NR Description: T6D22.23 [Arabidopsis thaliana]
  misc_feature (1)..(587): Homolog of NCBI NO: 37535574 NR Description: putative DNA ligase [Oryza sativa (japonica >gi|16905197|gb|AAL31067.1| putative DNA ligase [Oryza sativa]
  misc_feature (1)..(587): Homolog of NCBI NO: 28830036 NR Description: similar to Xenopus laevis (African clawed frog). ligase I (EC 6.5.1.1) (Polydeoxyribonucleotide synthase [ATP])
MLRTVIATTPDDLLPTVYLAANEIAPAHEGIKLGMGKGSYIIKAISEAFGRTESHVEQQYTQLGDLGLVANGSRSSQTMIFMPKPLTVVKVADTLRLIAKESGKGSKDKKKDLMKALLVATTDCEPLYLTRLLQDNLRLGFSRQTVLAALGQAAVYNEEHSKPPPNIKNPLDEAATIVKEVFSMLPVYDIIVGALLTSGVWNLPKTCNLTLGVPVRPMLAKATTRVDLILEKFKDTVFTAEYKYDGERAQIYYMEDGTVEIFSRHAERNTGKYPDVALVLSRLKKPTVKSFILDCEVVTFNREKEKILPLQSTRAHKNVNVSDIKVGVCVFAFDILYLNGQLLIHENLNIRREKLHDSFEEDLGYFQFATALTSNDIGELQEFLKASIDIGCEGLMIKSLYSNATYEPAKRSNNWLKLKKDYMDNIGDSVDLVPIATFHGRGKRTGFFGAYLLACYDVDKEEFQSICKIGTEFSDVELQDLSSSLCSKVIATPKQYYQVDNDLNPDVWLEPTEVWEVKAADLTVSPVYREAIGIVDPDKGISLRFPRLVRIRKDKNPEEATTSDQIAEMYQAQKHNQPSNQGKVDDD

SEQ ID NO: 79572 - protein, 553 aa, Arabidopsis thaliana
  peptide (1)..(553): Ceres Seq. ID no. 12651966
  misc_feature (180)..(385): Pfam Name: ATP dependent DNA ligase domain Pfam Description: ATP dependent DNA ligase domain
  misc_feature (1)..(553): Homolog of NCBI NO: 30680522 NR Description: ligase I -related [Arabidopsis thaliana] DNA ligase (Polydeoxyribonucleotide synthase [ATP])
  misc_feature (1)..(553): Homolog of NCBI NO: 2129574 NR Description: DNA ligase (ATP) (EC 6.5.1.1) - Arabidopsis
  misc_feature (1)..(357): Homolog of NCBI NO: 6579215 NR Description: T23G18.1 [Arabidopsis thaliana]
  misc_feature (392)..(480): Homolog of NCBI NO: 6579215 NR Description: T23G18.1 [Arabidopsis thaliana]
  misc_feature (479)..(553): Homolog of NCBI NO: 6579215 NR Description: T23G18.1 [Arabidopsis thaliana]
  misc_feature (1)..(357): Homolog of NCBI NO: 8778834 NR Description: T6D22.23 [Arabidopsis thaliana]
  misc_feature (392)..(479): Homolog of NCBI NO: 8778834 NR Description: T6D22.23 [Arabidopsis thaliana]
  misc_feature (479)..(549): Homolog of NCBI NO: 8778834 NR Description: T6D22.23 [Arabidopsis thaliana]
  misc_feature (1)..(553): Homolog of NCBI NO: 37535574 NR Description: putative DNA ligase [Oryza sativa (japonica >gi|16905197|gb|AAL31067.1| putative DNA ligase [Oryza sativa]
  misc_feature (1)..(553): Homolog of NCBI NO: 28830036 NR Description: similar to Xenopus laevis (African clawed frog). ligase I (EC 6.5.1.1) (Polydeoxyribonucleotide synthase [ATP])
MGKGSYIIKAISEAFGRTESHVEQQYTQLGDLGLVANGSRSSQTMIFMPKPLTVVKVADTLRLIAKESGKGSKDKKKDLMKALLVATTDCEPLYLTRLLQDNLRLGFSRQTVLAALGQAAVYNEEHSKPPPNIKNPLDEAATIVKEVFSMLPVYDIIVGALLTSGVWNLPKTCNLTLGVPVRPMLAKATTRVDLILEKFKDTVFTAEYKYDGERAQIYYMEDGTVEIFSRHAERNTGKYPDVALVLSRLKKPTVKSFILDCEVVTFNREKEKILPLQSTRAHKNVNVSDIKVGVCVFAFDILYLNGQLLIHENLNIRREKLHDSFEEDLGYFQFATALTSNDIGELQEFLKASIDIGCEGLMIKSLYSNATYEPAKRSNNWLKLKKDYMDNIGDSVDLVPIATFHGRGKRTGFFGAYLLACYDVDKEEFQSICKIGTEFSDVELQDLSSSLCSKVIATPKQYYQVDNDLNPDVWLEPTEVWEVKAADLTVSPVYREAIGIVDPDKGISLRFPRLVRIRKDKNPEEATTSDQIAEMYQAQKHNQPSNQGKVDDD

SEQ ID NO: 79573 - DNA, 2100 bp, Arabidopsis thaliana
  misc_feature (1)..(2100): Ceres Seq. ID no. 12651967
  misc_feature: MA Experiment ID: 20000234 Result: Up-regulated in Transcription
  misc_feature: MA Experiment 20000234 PARAMETER Experiment Name: At_Siliques_P Parameter: Age (day) Value: 21
  misc_feature: MA Experiment 20000234 PARAMETER Experiment Name: At_Siliques_P Parameter: Organism Value: A. thaliana
  misc_feature: MA Experiment 20000234 PARAMETER Experiment Name: At_Siliques_P Parameter: Plant Line Value: WS
  misc_feature: MA Experiment 20000234 PARAMETER Experiment Name: At_Siliques_P Parameter: Tissue Value: Less Than 5mm Siliques vs. Whole Plant
  misc_feature: MA Experiment ID: 20000264 Result: Up-regulated in Transcription
  misc_feature: MA Experiment 20000264 PARAMETER Experiment Name: At_Open_Flower_P Parameter: Age (day) Value: 21
  misc_feature: MA Experiment 20000264 PARAMETER Experiment Name: At_Open_Flower_P Parameter: Plant Line Value: WS
  misc_feature: MA Experiment 20000264 PARAMETER Experiment Name: At_Open_Flower_P Parameter: Tissue Value: Open Flower vs. Whole Plant
  misc_feature: MA Experiment ID: 20000438 Result: Down-regulated in Transcription
  misc_feature: MA Experiment 20000438 PARAMETER Experiment Name: At_Shoots__P Parameter: Age (day) Value: 14
  misc_feature: MA Experiment 20000438 PARAMETER Experiment Name: At_Shoots__P Parameter: Tissue Value: Shoots vs. Whole Plant
  misc_feature: MA Experiment ID: 20000794 Result: Up-regulated in Transcription
  misc_feature: MA Experiment 20000794 PARAMETER Experiment Name: At_Petals_P Parameter: Age (day) Value: 23-25 days
  misc_feature: MA Experiment 20000794 PARAMETER Experiment Name: At_Petals_P Parameter: Plant Line Value: WS
  misc_feature: MA Experiment 20000794 PARAMETER Experiment Name: At_Petals_P Parameter: Tissue Value: Petals vs. Whole plant
  misc_feature: MA Experiment ID: 20001757 Result: Down-regulated in Transcription
  misc_feature: MA Experiment 20001757 PARAMETER Experiment Name: At_50mM_NH4NO3_L-to-H_P Parameter: Timepoint (hr) Value: 6
  misc_feature: MA Experiment 20001757 PARAMETER Experiment Name: At_50mM_NH4NO3_L-to-H_P Parameter: Tissue Value: Leaf
  misc_feature: MA Experiment 20001757 PARAMETER Experiment Name: At_50mM_NH4NO3_L-to-H_P Parameter: Treatment Value: 50mM NH4NO3 vs 100mM Mannitol
  misc_feature: MA Experiment ID: 20001910 Result: Up-regulated in Transcription
  misc_feature: MA Experiment 20001910 PARAMETER Experiment Name: At_Drought_Reproduction_P Parameter: Age (day) Value: 37
  misc_feature: MA Experiment 20001910 PARAMETER Experiment Name: At_Drought_Reproduction_P Parameter: Organism Value: A. thaliana
  misc_feature: MA Experiment 20001910 PARAMETER Experiment Name: At_Drought_Reproduction_P Parameter: Plant Line Value: WS
  misc_feature: MA Experiment 20001910 PARAMETER Experiment Name: At_Drought_Reproduction_P Parameter: Timepoint (day) Value: 7
  misc_feature: MA Experiment 20001910 PARAMETER Experiment Name: At_Drought_Reproduction_P Parameter: Tissue Value: Flowers
  misc_feature: MA Experiment 20001910 PARAMETER Experiment Name: At_Drought_Reproduction_P Parameter: Treatment Value: Drought vs. No Drought
atggcggaggggcaatccccggagaactcaccgccagctcctcctcctccttctcctccgtcacctccctcttccaacgatcaacaaacaacatctcctcctccttccgacaatcaagaaacaacatctcctcctcctccatcttcacctgacatagctcctccacctcaacaacaacaagaatcaccacctcctcctttgccggaaaattcctccgatggttcttcctcgtcgtctccaccaccaccgtctgactcatcctcacaatcacaatctccacctcctccttcaacgtccccgccacagcagagtgacaacaatggcaacaaaggaaacaacaatgagaacaacaaaggtaatgatggaagcagcggcgatggaggaaacaagaacatgtctcatactcctccaccaccttctaagacttcggaccatagctctcactcgcaaccaagatcgctggcgccgcctacaagcaacagtggctcaaattcgtcaagtaatgatggtttgaacattggtgctgttataggacttgtggctgcagctggaattttattcattgtcatgatcttgttatgtgtctgttgttttcggaagaagaagaagaaatcaaagcttgatcagatgccgtactacggaagcaatgcttaccccgcaggaaaaactgggggtgatcaatactacaaccaaaatgctgctacacaacaacaacaacattacaaccaaaatgatcacattgtgaatctgcctccacctcctggatcaatgggaacaaactgggtgagttcaccgccaccaccacctccaggaaattggcagccaatgccgtcgccaccagcaccagtgtcaggaggcgcaaatgtgatccaaagcggcgaaatgagctcaaatttctcatcaggtccatacgctccatctctaccaccacctcacccttcagtggctctgggattcaacaatagcacattcacttatgaggagctagcatccgcaactcaaggtttctcaaaagaccggttgttgggacaaggcggtttcggatatgttcacaaaggaatcttgccaaatggtaaggagatagcggtgaagagccttaaagcgggtagcgggcaaggcgagagagagttccaggcagaggtggagatcatcagccgcgttcatcatcgacatctcgtgtctcttgtgggatactgcagtaatgcgggaggacagaggttgttggtctatgagtttctccctaatgacacacttgagttccaccttcatgggaaaagtgggactgtgatggattggccaaccagactcaagattgccttaggatcagcaaaaggtcttgcttatctacatgaagattgtcatccaaaaatcatccatagagacattaaagcttcaaacattctccttgaccataacttcgaagccaaggttgcagattttggtttggccaagctctcccaagacaacaatacacatgtatcgactcgtgttatgggaacattcggatacttagctcctgaatatgcatcgagtgggaaactaactgagaaatcagatgttttctcttttggagttatgcttcttgagctcataaccggacgcggaccggttgatctaagtggtgacatggaagacagtttagtcgattgggcgagaccattgtgcatgagggtagcgcaagatggagaatatggggaattggttgacccattccttgagcaccaatacgagccttatgagatggcacgcatggtggcttgtgctgctgcagccgtaagacattctggtcgtcgccgcccaaagatgagtcagattgttaggacgttggagggtgatgcctcgctggatgacttagacgatggtgtgaaaccgaaacagagttcaagcggaggtgaaggcagctcagactatgagatgggcacatatggtgctgagatgaggaagtttcggaaagtgacattggaaagtcgggattacggggcaagtagcgaatacggtgccacaagcgagtacgggcttgacccatcctcttcaagcagcgaggagatgcacattggaggaagcaccagcaaaactactactactaaccgtgggatttaa

SEQ ID NO: 79574 - protein, 699 aa, Arabidopsis thaliana
  peptide (1)..(699): Ceres Seq. ID no. 12651968
  misc_feature (1)..(697): Homolog of NCBI NO: 15230209 NR Description: protein kinase, putative; protein id: At3g18810.1
  misc_feature (1)..(697): Homolog of NCBI NO: 9293906 NR Description: somatic embryogenesis receptor kinase-like
  misc_feature (240)..(686): Homolog of NCBI NO: 30690042 NR Description: serine threonine protein kinase -related thaliana] >gi|26452004|dbj|BAC43092.1| putative serine/threonine kinase [Arabidopsis thaliana] >gi|29029022|gb|AAO64890.1|
  misc_feature (2)..(270): Homolog of NCBI NO: 30690042 NR Description: serine threonine protein kinase -related thaliana] >gi|26452004|dbj|BAC43092.1| putative serine/threonine kinase [Arabidopsis thaliana] >gi|29029022|gb|AAO64890.1|
  misc_feature (240)..(686): Homolog of NCBI NO: 7488206 NR Description: probable serine/threonine-specific protein kinase
  misc_feature (2)..(229): Homolog of NCBI NO: 7488206 NR Description: probable serine/threonine-specific protein kinase
  misc_feature (6)..(270): Homolog of NCBI NO: 7488206 NR Description: probable serine/threonine-specific protein kinase
  misc_feature (226)..(679): Homolog of NCBI NO: 15224182 NR Description: putative protein kinase; protein id: At2g18470.1
  misc_feature (18)..(269): Homolog of NCBI NO: 15224182 NR Description: putative protein kinase; protein id: At2g18470.1
  misc_feature (237)..(681): Homolog of NCBI NO: 13877617 NR Description: protein kinase-like protein [Arabidopsis thaliana]
MAEGQSPENSPPAPPPPSPPSPPSSNDQQTTSPPPSDNQETTSPPPPSSPDIAPPPQQQQESPPPPLPENSSDGSSSSSPPPPSDSSSQSQSPPPPSTSPPQQSDNNGNKGNNNENNKGNDGSSGDGGNKNMSHTPPPPSKTSDHSSHSQPRSLAPPTSNSGSNSSSNDGLNIGAVIGLVAAAGILFIVMILLCVCCFRKKKKKSKLDQMPYYGSNAYPAGKTGGDQYYNQNAATQQQQHYNQNDHIVNLPPPPGSMGTNWVSSPPPPPPGNWQPMPSPPAPVSGGANVIQSGEMSSNFSSGPYAPSLPPPHPSVALGFNNSTFTYEELASATQGFSKDRLLGQGGFGYVHKGILPNGKEIAVKSLKAGSGQGEREFQAEVEIISRVHHRHLVSLVGYCSNAGGQRLLVYEFLPNDTLEFHLHGKSGTVMDWPTRLKIALGSAKGLAYLHEDCHPKIIHRDIKASNILLDHNFEAKVADFGLAKLSQDNNTHVSTRVMGTFGYLAPEYASSGKLTEKSDVFSFGVMLLELITGRGPVDLSGDMEDSLVDWARPLCMRVAQDGEYGELVDPFLEHQYEPYEMARMVACAAAAVRHSGRRRPKMSQIVRTLEGDASLDDLDDGVKPKQSSSGGEGSSDYEMGTYGAEMRKFRKVTLESRDYGASSEYGATSEYGLDPSSSSSEEMHIGGSTSKTTTTNRGI

SEQ ID NO: 79575 - protein, 568 aa, Arabidopsis thaliana
  peptide (1)..(568): Ceres Seq. ID no. 12651969
  misc_feature (1)..(566): Homolog of NCBI NO: 15230209 NR Description: protein kinase, putative; protein id: At3g18810.1
  misc_feature (1)..(566): Homolog of NCBI NO: 9293906 NR Description: somatic embryogenesis receptor kinase-like
  misc_feature (109)..(555): Homolog of NCBI NO: 30690042 NR Description: serine threonine protein kinase -related thaliana] >gi|26452004|dbj|BAC43092.1| putative serine/threonine kinase [Arabidopsis thaliana] >gi|29029022|gb|AAO64890.1|
  misc_feature (1)..(139): Homolog of NCBI NO: 30690042 NR Description: serine threonine protein kinase -related thaliana] >gi|26452004|dbj|BAC43092.1| putative serine/threonine kinase [Arabidopsis thaliana] >gi|29029022|gb|AAO64890.1|
  misc_feature (109)..(555): Homolog of NCBI NO: 7488206 NR Description: probable serine/threonine-specific protein kinase
  misc_feature (1)..(98): Homolog of NCBI NO: 7488206 NR Description: probable serine/threonine-specific protein kinase
  misc_feature (1)..(139): Homolog of NCBI NO: 7488206 NR Description: probable serine/threonine-specific protein kinase
  misc_feature (95)..(548): Homolog of NCBI NO: 15224182 NR Description: putative protein kinase; protein id: At2g18470.1
  misc_feature (1)..(138): Homolog of NCBI NO: 15224182 NR Description: putative protein kinase; protein id: At2g18470.1
  misc_feature (106)..(550): Homolog of NCBI NO: 13877617 NR Description: protein kinase-like protein [Arabidopsis thaliana]
MSHTPPPPSKTSDHSSHSQPRSLAPPTSNSGSNSSSNDGLNIGAVIGLVAAAGILFIVMILLCVCCFRKKKKKSKLDQMPYYGSNAYPAGKTGGDQYYNQNAATQQQQHYNQNDHIVNLPPPPGSMGTNWVSSPPPPPPGNWQPMPSPPAPVSGGANVIQSGEMSSNFSSGPYAPSLPPPHPSVALGFNNSTFTYEELASATQGFSKDRLLGQGGFGYVHKGILPNGKEIAVKSLKAGSGQGEREFQAEVEIISRVHHRHLVSLVGYCSNAGGQRLLVYEFLPNDTLEFHLHGKSGTVMDWPTRLKIALGSAKGLAYLHEDCHPKIIHRDIKASNILLDHNFEAKVADFGLAKLSQDNNTHVSTRVMGTFGYLAPEYASSGKLTEKSDVFSFGVMLLELITGRGPVDLSGDMEDSLVDWARPLCMRVAQDGEYGELVDPFLEHQYEPYEMARMVACAAAAVRHSGRRRPKMSQIVRTLEGDASLDDLDDGVKPKQSSSGGEGSSDYEMGTYGAEMRKFRKVTLESRDYGASSEYGATSEYGLDPSSSSSEEMHIGGSTSKTTTTNRGI

SEQ ID NO: 79576 - protein, 510 aa, Arabidopsis thaliana
  peptide (1)..(510): Ceres Seq. ID no. 12651970
  misc_feature (1)..(508): Homolog of NCBI NO: 15230209 NR Description: protein kinase, putative; protein id: At3g18810.1
  misc_feature (1)..(508): Homolog of NCBI NO: 9293906 NR Description: somatic embryogenesis receptor kinase-like
  misc_feature (51)..(497): Homolog of NCBI NO: 30690042 NR Description: serine threonine protein kinase -related thaliana] >gi|26452004|dbj|BAC43092.1| putative serine/threonine kinase [Arabidopsis thaliana] >gi|29029022|gb|AAO64890.1|
  misc_feature (1)..(81): Homolog of NCBI NO: 30690042 NR Description: serine threonine protein kinase -related thaliana] >gi|26452004|dbj|BAC43092.1| putative serine/threonine kinase [Arabidopsis thaliana] >gi|29029022|gb|AAO64890.1|
  misc_feature (51)..(497): Homolog of NCBI NO: 7488206 NR Description: probable serine/threonine-specific protein kinase
  misc_feature (1)..(40): Homolog of NCBI NO: 7488206 NR Description: probable serine/threonine-specific protein kinase
  misc_feature (1)..(81): Homolog of NCBI NO: 7488206 NR Description: probable serine/threonine-specific protein kinase
  misc_feature (37)..(490): Homolog of NCBI NO: 15224182 NR Description: putative protein kinase; protein id: At2g18470.1
  misc_feature (1)..(80): Homolog of NCBI NO: 15224182 NR Description: putative protein kinase; protein id: At2g18470.1
  misc_feature (48)..(492): Homolog of NCBI NO: 13877617 NR Description: protein kinase-like protein [Arabidopsis thaliana]
MILLCVCCFRKKKKKSKLDQMPYYGSNAYPAGKTGGDQYYNQNAATQQQQHYNQNDHIVNLPPPPGSMGTNWVSSPPPPPPGNWQPMPSPPAPVSGGANVIQSGEMSSNFSSGPYAPSLPPPHPSVALGFNNSTFTYEELASATQGFSKDRLLGQGGFGYVHKGILPNGKEIAVKSLKAGSGQGEREFQAEVEIISRVHHRHLVSLVGYCSNAGGQRLLVYEFLPNDTLEFHLHGKSGTVMDWPTRLKIALGSAKGLAYLHEDCHPKIIHRDIKASNILLDHNFEAKVADFGLAKLSQDNNTHVSTRVMGTFGYLAPEYASSGKLTEKSDVFSFGVMLLELITGRGPVDLSGDMEDSLVDWARPLCMRVAQDGEYGELVDPFLEHQYEPYEMARMVACAAAAVRHSGRRRPKMSQIVRTLEGDASLDDLDDGVKPKQSSSGGEGSSDYEMGTYGAEMRKFRKVTLESRDYGASSEYGATSEYGLDPSSSSSEEMHIGGSTSKTTTTNRGI

SEQ ID NO: 79577 - DNA, 843 bp, Arabidopsis thaliana
  misc_feature (1)..(843): Ceres Seq. ID no. 12651975
  misc_feature: MA Experiment ID: 20000185 Result: Up-regulated in Transcription
  misc_feature: MA Experiment 20000185 PARAMETER Experiment Name: At_Roots__P Parameter: Age (day) Value: 7 vs. 21
  misc_feature: MA Experiment 20000185 PARAMETER Experiment Name: At_Roots__P Parameter: Organism Value: A. thaliana
  misc_feature: MA Experiment 20000185 PARAMETER Experiment Name: At_Roots__P Parameter: Tissue Value: Roots vs. Whole Plant
  misc_feature: MA Experiment ID: 20000235 Result: Down-regulated in Transcription
  misc_feature: MA Experiment 20000235 PARAMETER Experiment Name: At_Siliques_P Parameter: Age (day) Value: 21
  misc_feature: MA Experiment 20000235 PARAMETER Experiment Name: At_Siliques_P Parameter: Organism Value: A. thaliana
  misc_feature: MA Experiment 20000235 PARAMETER Experiment Name: At_Siliques_P Parameter: Plant Line Value: WS
  misc_feature: MA Experiment 20000235 PARAMETER Experiment Name: At_Siliques_P Parameter: Tissue Value: 5-10mm Siliques vs. Whole Plant
  misc_feature: MA Experiment ID: 20000264 Result: Down-regulated in Transcription
  misc_feature: MA Experiment 20000264 PARAMETER Experiment Name: At_Open_Flower_P Parameter: Age (day) Value: 21
  misc_feature: MA Experiment 20000264 PARAMETER Experiment Name: At_Open_Flower_P Parameter: Plant Line Value: WS
  misc_feature: MA Experiment 20000264 PARAMETER Experiment Name: At_Open_Flower_P Parameter: Tissue Value: Open Flower vs. Whole Plant
  misc_feature: MA Experiment ID: 20000265 Result: Down-regulated in Transcription
  misc_feature: MA Experiment 20000265 PARAMETER Experiment Name: At_Open_Flower_P Parameter: Age (day) Value: 21
  misc_feature: MA Experiment 20000265 PARAMETER Experiment Name: At_Open_Flower_P Parameter: Plant Line Value: WS
  misc_feature: MA Experiment 20000265 PARAMETER Experiment Name: At_Open_Flower_P Parameter: Tissue Value: Closed Flower vs. Whole Plant
  misc_feature: MA Experiment ID: 20000286 Result: Down-regulated in Transcription
  misc_feature: MA Experiment 20000286 PARAMETER Experiment Name: At_Open_Flower_P Parameter: Age (day) Value: 21
  misc_feature: MA Experiment 20000286 PARAMETER Experiment Name: At_Open_Flower_P Parameter: Plant Line Value: WS
  misc_feature: MA Experiment 20000286 PARAMETER Experiment Name: At_Open_Flower_P Parameter: Tissue Value: Half Open vs. Whole Plant
  misc_feature: MA Experiment ID: 20000439 Result: Up-regulated in Transcription
  misc_feature: MA Experiment 20000439 PARAMETER Experiment Name: At_Roots__P Parameter: Age (day) Value: 14 vs. 21
  misc_feature: MA Experiment 20000439 PARAMETER Experiment Name: At_Roots__P Parameter: Organism Value: A. thaliana
  misc_feature: MA Experiment 20000439 PARAMETER Experiment Name: At_Roots__P Parameter: Tissue Value: Roots vs. Whole Plant
  misc_feature: MA Experiment ID: 20000495 Result: Up-regulated in Transcription
  misc_feature: MA Experiment 20000495 PARAMETER Experiment Name: At_Guard_Cells_P Parameter: Harvest Date Value: 8/2/2002
  misc_feature: MA Experiment 20000495 PARAMETER Experiment Name: At_Guard_Cells_P Parameter: Organism Value: A. thaliana
  misc_feature: MA Experiment 20000495 PARAMETER Experiment Name: At_Guard_Cells_P Parameter: Tissue Value: Guard Cells vs. Leaves
  misc_feature: MA Experiment ID: 20001905 Result: Down-regulated in Transcription
  misc_feature: MA Experiment 20001905 PARAMETER Experiment Name: At_Drought_Reproduction_P Parameter: Age (day) Value: 40
  misc_feature: MA Experiment 20001905 PARAMETER Experiment Name: At_Drought_Reproduction_P Parameter: Organism Value: A. thaliana
  misc_feature: MA Experiment 20001905 PARAMETER Experiment Name: At_Drought_Reproduction_P Parameter: Plant Line Value: WS
  misc_feature: MA Experiment 20001905 PARAMETER Experiment Name: At_Drought_Reproduction_P Parameter: Timepoint (day) Value: 10
  misc_feature: MA Experiment 20001905 PARAMETER Experiment Name: At_Drought_Reproduction_P Parameter: Tissue Value: Rosettes
  misc_feature: MA Experiment 20001905 PARAMETER Experiment Name: At_Drought_Reproduction_P Parameter: Treatment Value: Drought vs. No Drought
atggcttctacttttaggctctctattagcttcctcactctcatcctcttctctctgtgggtagtggaggcacacacgtctagaaagttgatatcaatcaaggaaaaagaaggtcaagatattagtcatttgctcaaagatggtgaatttgatgacccttcgttgtacatgtatttcacactcaatgatctcaaactaggaaccaaattgctgatttacttctacaaaaacgatcttcaaaagcttcctccacttctcacaagacaacaagccgatctcattcctttcactaagtcaaagcttgacttccttctcgaccacttctctatcaccaaagactctcctcaagggaaagccataaaggagactttgggacattgtgatgctaaagctattgaaggagagcataagttttgtggaacttctttggagtcattgatcgatcttgtgaagaaaacaatggggtataatgttgacctcaaggtcatgacgactaaagtaatggtaccggcccaaaattcgataagctacgctttgcataactacacattcgtcgaggctccaaaggaacttgttgggattaagatgttgggatgtcacagaatgccttacccttatgctgtttactattgccatggacataaaggtggaagtagagtctttgaagttaatttggtgacggatgatgggagacaacgggtagtaggacccgctgtctgccacatggacacatccacgtgggacgcggatcatgtagcttttaaggtgttgaagatggagccgaggtcagcaccggtttgccatttcttccctcttgataacattgtgtgggtaacaaagtaa

SEQ ID NO: 79578 - protein, 280 aa, Arabidopsis thaliana
  peptide (1)..(280): Ceres Seq. ID no. 12651976
  misc_feature (56)..(280): Pfam Name: BURP domain Pfam Description: BURP domain
  misc_feature (1)..(280): Homolog of NCBI NO: 15222103 NR Description: unknown protein; protein id: At1g49320.1
  misc_feature (1)..(280): Homolog of NCBI NO: 7488443 NR Description: BURP domain-containing protein - rape
  misc_feature (58)..(280): Homolog of NCBI NO: 24416618 NR Description: resistant specific protein-2 [Vigna radiata]
  misc_feature (57)..(280): Homolog of NCBI NO: 16588826 NR Description: dehydration-responsive protein RD22 [Prunus
  misc_feature (58)..(280): Homolog of NCBI NO: 24416614 NR Description: resistant specific protein-1(4) [Vigna radiata]
  misc_feature (58)..(280): Homolog of NCBI NO: 24416620 NR Description: resistant specific protein-3 [Vigna radiata]
  misc_feature (51)..(280): Homolog of NCBI NO: 18447761 NR Description: dehydration-induced protein RD22-like protein
  misc_feature (51)..(280): Homolog of NCBI NO: 33578034 NR Description: BURP domain-containing protein [Gossypium
  misc_feature (46)..(280): Homolog of NCBI NO: 14422446 NR Description: BURP domain-containing protein [Bruguiera
  misc_feature (46)..(280): Homolog of NCBI NO: 14422444 NR Description: BURP domain-containing protein [Bruguiera
MASTFRLSISFLTLILFSLWVVEAHTSRKLISIKEKEGQDISHLLKDGEFDDPSLYMYFTLNDLKLGTKLLIYFYKNDLQKLPPLLTRQQADLIPFTKSKLDFLLDHFSITKDSPQGKAIKETLGHCDAKAIEGEHKFCGTSLESLIDLVKKTMGYNVDLKVMTTKVMVPAQNSISYALHNYTFVEAPKELVGIKMLGCHRMPYPYAVYYCHGHKGGSRVFEVNLVTDDGRQRVVGPAVCHMDTSTWDADHVAFKVLKMEPRSAPVCHFFPLDNIVWVTK

SEQ ID NO: 79579 - protein, 224 aa, Arabidopsis thaliana
  peptide (1)..(224): Ceres Seq. ID no. 12651977
  misc_feature (1)..(224): Pfam Name: BURP domain Pfam Description: BURP domain
  misc_feature (1)..(224): Homolog of NCBI NO: 15222103 NR Description: unknown protein; protein id: At1g49320.1
  misc_feature (1)..(224): Homolog of NCBI NO: 7488443 NR Description: BURP domain-containing protein - rape
  misc_feature (2)..(224): Homolog of NCBI NO: 24416618 NR Description: resistant specific protein-2 [Vigna radiata]
  misc_feature (1)..(224): Homolog of NCBI NO: 16588826 NR Description: dehydration-responsive protein RD22 [Prunus
  misc_feature (2)..(224): Homolog of NCBI NO: 24416614 NR Description: resistant specific protein-1(4) [Vigna radiata]
  misc_feature (2)..(224): Homolog of NCBI NO: 24416620 NR Description: resistant specific protein-3 [Vigna radiata]
  misc_feature (1)..(224): Homolog of NCBI NO: 18447761 NR Description: dehydration-induced protein RD22-like protein
  misc_feature (1)..(224): Homolog of NCBI NO: 33578034 NR Description: BURP domain-containing protein [Gossypium
  misc_feature (1)..(224): Homolog of NCBI NO: 14422446 NR Description: BURP domain-containing protein [Bruguiera
  misc_feature (1)..(224): Homolog of NCBI NO: 14422444 NR Description: BURP domain-containing protein [Bruguiera
MYFTLNDLKLGTKLLIYFYKNDLQKLPPLLTRQQADLIPFTKSKLDFLLDHFSITKDSPQGKAIKETLGHCDAKAIEGEHKFCGTSLESLIDLVKKTMGYNVDLKVMTTKVMVPAQNSISYALHNYTFVEAPKELVGIKMLGCHRMPYPYAVYYCHGHKGGSRVFEVNLVTDDGRQRVVGPAVCHMDTSTWDADHVAFKVLKMEPRSAPVCHFFPLDNIVWVTK

SEQ ID NO: 79580 - DNA, 1047 bp, Arabidopsis thaliana
  misc_feature (1)..(1047): Ceres Seq. ID no. 12651990
  misc_feature: MA Experiment ID: 20000179 Result: Up-regulated in Transcription
  misc_feature: MA Experiment 20000179 PARAMETER Experiment Name: At_Germinating_Seeds_P Parameter: Age (hr) Value: 6 vs. 0
  misc_feature: MA Experiment 20000179 PARAMETER Experiment Name: At_Germinating_Seeds_P Parameter: Tissue Value: Germinating Seeds
  misc_feature: MA Experiment ID: 20000443 Result: Down-regulated in Transcription
  misc_feature: MA Experiment 20000443 PARAMETER Experiment Name: At_1uM_BR-BRZ__P Parameter: Tissue Value: Shoot Apices
  misc_feature: MA Experiment 20000443 PARAMETER Experiment Name: At_1uM_BR-BRZ__P Parameter: Treatment Value: 1uM BRZ vs. No Treatment
atggagaagccaaagttcaagactgtccaagaggtggttgcagccggtcaaggactaccggagagatatctccatgcaccaaccggcgaaggcgaaagtcaaccacttaacggtgcggtgccggagatggatattccggccatcgatctcagtcttctcttctcttcctctgtagacggtcaagaagagatgaagaaacttcactcagcactctctacatggggcgttgttcaggtgatgaatcatggaattactgaagcttttcttgacaagatttacaagctaaccaagcagttctttgcgcttccgaccgaagagaaacacaagtgtgctagagagacaggtaatatccaaggatatggtaacgatatgattctgtctgataatcaagttcttgattggatcgaccgtttgtttctcactacttaccctgaagataagcgtcaacttaaattctggcctcaagtccctgtcggattcagcgagacgttagatgaatacacaatgaagcaacgggtattgattgagaaattctttaaggctatggctagatcattggaattggaagagaattgttttctagaaatgtatggagaaaatgctgtaatgaattcaagattcaacttctttcctccatgtccaaggccagacaaggttattgggattaaaccgcatgctgatggttcagctatcactcttctcttacccgacaaagatgtcgaagggcttcagtttcttaaagatgggaagtggtataaagctccaatagttcctgatacaattcttatcactttaggtgatcaaatggagataatgagtaatgggatatataagagcccggttcatcgagtggtgaccaacagagagaaggaaaggatatctgtggcaacgttttgtgtaccgggtctagacaaagagattcaccctgcagatgggcttgtgactgaggcaagaccaagattgtataaaacagttaccaagtatgtggatctccactacaagtactatcaacagggtcgaagaactattgaagctgcattaatctga

SEQ ID NO: 79581 - protein, 348 aa, Arabidopsis thaliana
  peptide (1)..(348): Ceres Seq. ID no. 12651991
  misc_feature (201)..(301): Pfam Name: 2OG-Fe(II) oxygenase superfamily Pfam Description: 2OG-Fe(II) oxygenase superfamily
  misc_feature (1)..(348): Homolog of NCBI NO: 15222131 NR Description: flavonol synthase, putative; protein id: [Arabidopsis thaliana] >gi|25285686|pir||C96530 hypothetical
  misc_feature (1)..(348): Homolog of NCBI NO: 21593366 NR Description: ethylene-forming-enzyme-like dioxygenase-like
  misc_feature (1)..(348): Homolog of NCBI NO: 15241348 NR Description: ethylene-forming-enzyme-like dioxygenase-like protein id: At5g20400.1, supported by cDNA: 38372. [Arabidopsis
  misc_feature (1)..(348): Homolog of NCBI NO: 15241383 NR Description: ethylene-forming-enzyme-like dioxygenase - like;
  misc_feature (1)..(348): Homolog of NCBI NO: 15239524 NR Description: ethylene-forming-enzyme-like dioxygenase; protein
  misc_feature (8)..(348): Homolog of NCBI NO: 2688828 NR Description: ethylene-forming-enzyme-like dioxygenase [Prunus
  misc_feature (9)..(348): Homolog of NCBI NO: 24413984 NR Description: ethylene-forming-enzyme-like dioxygenase-like
  misc_feature (9)..(326): Homolog of NCBI NO: 24413982 NR Description: ethylene-forming-enzyme-like dioxygenase-like
  misc_feature (9)..(336): Homolog of NCBI NO: 34898470 NR Description: ESTs D47168(S12332),D46350(S10967) correspond to
  misc_feature (9)..(348): Homolog of NCBI NO: 34898468 NR Description: Similar to Prunus armeniaca
MEKPKFKTVQEVVAAGQGLPERYLHAPTGEGESQPLNGAVPEMDIPAIDLSLLFSSSVDGQEEMKKLHSALSTWGVVQVMNHGITEAFLDKIYKLTKQFFALPTEEKHKCARETGNIQGYGNDMILSDNQVLDWIDRLFLTTYPEDKRQLKFWPQVPVGFSETLDEYTMKQRVLIEKFFKAMARSLELEENCFLEMYGENAVMNSRFNFFPPCPRPDKVIGIKPHADGSAITLLLPDKDVEGLQFLKDGKWYKAPIVPDTILITLGDQMEIMSNGIYKSPVHRVVTNREKERISVATFCVPGLDKEIHPADGLVTEARPRLYKTVTKYVDLHYKYYQQGRRTIEAALI

SEQ ID NO: 79582 - protein, 306 aa, Arabidopsis thaliana
  peptide (1)..(306): Ceres Seq. ID no. 12651992
  misc_feature (159)..(259): Pfam Name: 2OG-Fe(II) oxygenase superfamily Pfam Description: 2OG-Fe(II) oxygenase superfamily
  misc_feature (1)..(306): Homolog of NCBI NO: 15222131 NR Description: flavonol synthase, putative; protein id: [Arabidopsis thaliana] >gi|25285686|pir||C96530 hypothetical
  misc_feature (1)..(306): Homolog of NCBI NO: 21593366 NR Description: ethylene-forming-enzyme-like dioxygenase-like
  misc_feature (1)..(306): Homolog of NCBI NO: 15241348 NR Description: ethylene-forming-enzyme-like dioxygenase-like protein id: At5g20400.1, supported by cDNA: 38372. [Arabidopsis
  misc_feature (1)..(306): Homolog of NCBI NO: 15241383 NR Description: ethylene-forming-enzyme-like dioxygenase - like;
  misc_feature (1)..(306): Homolog of NCBI NO: 15239524 NR Description: ethylene-forming-enzyme-like dioxygenase; protein
  misc_feature (1)..(306): Homolog of NCBI NO: 2688828 NR Description: ethylene-forming-enzyme-like dioxygenase [Prunus
  misc_feature (1)..(306): Homolog of NCBI NO: 24413984 NR Description: ethylene-forming-enzyme-like dioxygenase-like
  misc_feature (1)..(284): Homolog of NCBI NO: 24413982 NR Description: ethylene-forming-enzyme-like dioxygenase-like
  misc_feature (1)..(294): Homolog of NCBI NO: 34898470 NR Description: ESTs D47168(S12332),D46350(S10967) correspond to
  misc_feature (1)..(306): Homolog of NCBI NO: 34898468 NR Description: Similar to Prunus armeniaca
MDIPAIDLSLLFSSSVDGQEEMKKLHSALSTWGVVQVMNHGITEAFLDKIYKLTKQFFALPTEEKHKCARETGNIQGYGNDMILSDNQVLDWIDRLFLTTYPEDKRQLKFWPQVPVGFSETLDEYTMKQRVLIEKFFKAMARSLELEENCFLEMYGENAVMNSRFNFFPPCPRPDKVIGIKPHADGSAITLLLPDKDVEGLQFLKDGKWYKAPIVPDTILITLGDQMEIMSNGIYKSPVHRVVTNREKERISVATFCVPGLDKEIHPADGLVTEARPRLYKTVTKYVDLHYKYYQQGRRTIEAALI

SEQ ID NO: 79583 - protein, 285 aa, Arabidopsis thaliana
  peptide (1)..(285): Ceres Seq. ID no. 12651993
  misc_feature (138)..(238): Pfam Name: 2OG-Fe(II) oxygenase superfamily Pfam Description: 2OG-Fe(II) oxygenase superfamily
  misc_feature (1)..(285): Homolog of NCBI NO: 15222131 NR Description: flavonol synthase, putative; protein id: [Arabidopsis thaliana] >gi|25285686|pir||C96530 hypothetical
  misc_feature (1)..(285): Homolog of NCBI NO: 21593366 NR Description: ethylene-forming-enzyme-like dioxygenase-like
  misc_feature (1)..(285): Homolog of NCBI NO: 15241348 NR Description: ethylene-forming-enzyme-like dioxygenase-like protein id: At5g20400.1, supported by cDNA: 38372. [Arabidopsis
  misc_feature (1)..(285): Homolog of NCBI NO: 15241383 NR Description: ethylene-forming-enzyme-like dioxygenase - like;
  misc_feature (1)..(285): Homolog of NCBI NO: 15239524 NR Description: ethylene-forming-enzyme-like dioxygenase; protein
  misc_feature (1)..(285): Homolog of NCBI NO: 2688828 NR Description: ethylene-forming-enzyme-like dioxygenase [Prunus
  misc_feature (1)..(285): Homolog of NCBI NO: 24413984 NR Description: ethylene-forming-enzyme-like dioxygenase-like
  misc_feature (1)..(263): Homolog of NCBI NO: 24413982 NR Description: ethylene-forming-enzyme-like dioxygenase-like
  misc_feature (1)..(273): Homolog of NCBI NO: 34898470 NR Description: ESTs D47168(S12332),D46350(S10967) correspond to
  misc_feature (1)..(285): Homolog of NCBI NO: 34898468 NR Description: Similar to Prunus armeniaca
MKKLHSALSTWGVVQVMNHGITEAFLDKIYKLTKQFFALPTEEKHKCARETGNIQGYGNDMILSDNQVLDWIDRLFLTTYPEDKRQLKFWPQVPVGFSETLDEYTMKQRVLIEKFFKAMARSLELEENCFLEMYGENAVMNSRFNFFPPCPRPDKVIGIKPHADGSAITLLLPDKDVEGLQFLKDGKWYKAPIVPDTILITLGDQMEIMSNGIYKSPVHRVVTNREKERISVATFCVPGLDKEIHPADGLVTEARPRLYKTVTKYVDLHYKYYQQGRRTIEAALI

SEQ ID NO: 79584 - DNA, 1828 bp, Arabidopsis thaliana
  misc_feature (1)..(1828): Ceres Seq. ID no. 12652001
  misc_feature: MA Experiment ID: 20000166 Result: Up-regulated in Transcription
  misc_feature: MA Experiment 20000166 PARAMETER Experiment Name: At_100uM_ABA_P Parameter: Age (day) Value: 14
  misc_feature: MA Experiment 20000166 PARAMETER Experiment Name: At_100uM_ABA_P Parameter: Organism Value: A. thaliana
  misc_feature: MA Experiment 20000166 PARAMETER Experiment Name: At_100uM_ABA_P Parameter: Plant Line Value: WS
  misc_feature: MA Experiment 20000166 PARAMETER Experiment Name: At_100uM_ABA_P Parameter: Timepoint (hr) Value: 1
  misc_feature: MA Experiment 20000166 PARAMETER Experiment Name: At_100uM_ABA_P Parameter: Tissue Value: Aerial
  misc_feature: MA Experiment 20000166 PARAMETER Experiment Name: At_100uM_ABA_P Parameter: Treatment Value: 100uM ABA vs. No Treatment
  misc_feature: MA Experiment ID: 20000169 Result: Up-regulated in Transcription
  misc_feature: MA Experiment 20000169 PARAMETER Experiment Name: At_100uM_ABA_P Parameter: Age (day) Value: 14
  misc_feature: MA Experiment 20000169 PARAMETER Experiment Name: At_100uM_ABA_P Parameter: Organism Value: A. thaliana
  misc_feature: MA Experiment 20000169 PARAMETER Experiment Name: At_100uM_ABA_P Parameter: Plant Line Value: WS
  misc_feature: MA Experiment 20000169 PARAMETER Experiment Name: At_100uM_ABA_P Parameter: Timepoint (hr) Value: 6
  misc_feature: MA Experiment 20000169 PARAMETER Experiment Name: At_100uM_ABA_P Parameter: Tissue Value: Aerial
  misc_feature: MA Experiment 20000169 PARAMETER Experiment Name: At_100uM_ABA_P Parameter: Treatment Value: 100uM ABA vs. No Treatment
  misc_feature: MA Experiment ID: 20000182 Result: Up-regulated in Transcription
  misc_feature: MA Experiment 20000182 PARAMETER Experiment Name: At_2mM_SA_P Parameter: Age (day) Value: 14
  misc_feature: MA Experiment 20000182 PARAMETER Experiment Name: At_2mM_SA_P Parameter: Organism Value: A. thaliana
  misc_feature: MA Experiment 20000182 PARAMETER Experiment Name: At_2mM_SA_P Parameter: Plant Line Value: WS
  misc_feature: MA Experiment 20000182 PARAMETER Experiment Name: At_2mM_SA_P Parameter: Timepoint (hr) Value: 6
  misc_feature: MA Experiment 20000182 PARAMETER Experiment Name: At_2mM_SA_P Parameter: Tissue Value: Aerial
  misc_feature: MA Experiment 20000182 PARAMETER Experiment Name: At_2mM_SA_P Parameter: Treatment Value: 2mM SA vs. No Treatment
  misc_feature: MA Experiment ID: 20000184 Result: Down-regulated in Transcription
  misc_feature: MA Experiment 20000184 PARAMETER Experiment Name: At_Shoots__P Parameter: Age (day) Value: 7
  misc_feature: MA Experiment 20000184 PARAMETER Experiment Name: At_Shoots__P Parameter: Tissue Value: Shoots vs. Whole Plant
  misc_feature: MA Experiment ID: 20000267 Result: Up-regulated in Transcription
  misc_feature: MA Experiment 20000267 PARAMETER Experiment Name: At_Drought_P Parameter: Age (day) Value: 7
  misc_feature: MA Experiment 20000267 PARAMETER Experiment Name: At_Drought_P Parameter: Organism Value: A. thaliana
  misc_feature: MA Experiment 20000267 PARAMETER Experiment Name: At_Drought_P Parameter: Plant Line Value: WS
  misc_feature: MA Experiment 20000267 PARAMETER Experiment Name: At_Drought_P Parameter: Timepoint (hr) Value: 6
  misc_feature: MA Experiment 20000267 PARAMETER Experiment Name: At_Drought_P Parameter: Tissue Value: Whole Plant
  misc_feature: MA Experiment 20000267 PARAMETER Experiment Name: At_Drought_P Parameter: Treatment Value: Drought vs. No Drought
  misc_feature: MA Experiment ID: 20000268 Result: Up-regulated in Transcription
  misc_feature: MA Experiment 20000268 PARAMETER Experiment Name: At_100mM_NaCl__P Parameter: Age (day) Value: 14
  misc_feature: MA Experiment 20000268 PARAMETER Experiment Name: At_100mM_NaCl__P Parameter: Organism Value: A. thaliana
  misc_feature: MA Experiment 20000268 PARAMETER Experiment Name: At_100mM_NaCl__P Parameter: Plant Line Value: WS
  misc_feature: MA Experiment 20000268 PARAMETER Experiment Name: At_100mM_NaCl__P Parameter: Timepoint (hr) Value: 6
  misc_feature: MA Experiment 20000268 PARAMETER Experiment Name: At_100mM_NaCl__P Parameter: Tissue Value: Whole Plant
  misc_feature: MA Experiment 20000268 PARAMETER Experiment Name: At_100mM_NaCl__P Parameter: Treatment Value: 100mM NaCl vs. No Treatment
  misc_feature: MA Experiment ID: 20000269 Result: Up-regulated in Transcription
  misc_feature: MA Experiment 20000269 PARAMETER Experiment Name: At_1mM_KNO3_L-vs-H_Roots_P Parameter: Age (day) Value: 7,10,12
  misc_feature: MA Experiment 20000269 PARAMETER Experiment Name: At_1mM_KNO3_L-vs-H_Roots_P Parameter: Organism Value: A. thaliana
  misc_feature: MA Experiment 20000269 PARAMETER Experiment Name: At_1mM_KNO3_L-vs-H_Roots_P Parameter: Plant Line Value: WS
  misc_feature: MA Experiment 20000269 PARAMETER Experiment Name: At_1mM_KNO3_L-vs-H_Roots_P Parameter: Timepoint (day) Value: 7,10,12
  misc_feature: MA Experiment 20000269 PARAMETER Experiment Name: At_1mM_KNO3_L-vs-H_Roots_P Parameter: Tissue Value: Roots
  misc_feature: MA Experiment 20000269 PARAMETER Experiment Name: At_1mM_KNO3_L-vs-H_Roots_P Parameter: Treatment Value: 1mM KNO3 vs. 50mM KNO3
  misc_feature: MA Experiment ID: 20000288 Result: Up-regulated in Transcription
  misc_feature: MA Experiment 20000288 PARAMETER Experiment Name: At_Drought_P Parameter: Age (day) Value: 7
  misc_feature: MA Experiment 20000288 PARAMETER Experiment Name: At_Drought_P Parameter: Organism Value: A. thaliana
  misc_feature: MA Experiment 20000288 PARAMETER Experiment Name: At_Drought_P Parameter: Plant Line Value: WS
  misc_feature: MA Experiment 20000288 PARAMETER Experiment Name: At_Drought_P Parameter: Timepoint (hr) Value: 1
  misc_feature: MA Experiment 20000288 PARAMETER Experiment Name: At_Drought_P Parameter: Tissue Value: Whole Plant
  misc_feature: MA Experiment 20000288 PARAMETER Experiment Name: At_Drought_P Parameter: Treatment Value: Drought vs. No Drought
  misc_feature: MA Experiment ID: 20000436 Result: Up-regulated in Transcription
  misc_feature: MA Experiment 20000436 PARAMETER Experiment Name: At_Drought_P Parameter: Age (day) Value: 7
  misc_feature: MA Experiment 20000436 PARAMETER Experiment Name: At_Drought_P Parameter: Organism Value: A. thaliana
  misc_feature: MA Experiment 20000436 PARAMETER Experiment Name: At_Drought_P Parameter: Plant Line Value: WS
  misc_feature: MA Experiment 20000436 PARAMETER Experiment Name: At_Drought_P Parameter: Timepoint (hr) Value: 12
  misc_feature: MA Experiment 20000436 PARAMETER Experiment Name: At_Drought_P Parameter: Tissue Value: Whole Plant
  misc_feature: MA Experiment 20000436 PARAMETER Experiment Name: At_Drought_P Parameter: Treatment Value: Drought vs. No Drought
  misc_feature: MA Experiment ID: 20000437 Result: Up-regulated in Transcription
  misc_feature: MA Experiment 20000437 PARAMETER Experiment Name: At_Drought_P Parameter: Age (day) Value: 8
  misc_feature: MA Experiment 20000437 PARAMETER Experiment Name: At_Drought_P Parameter: Organism Value: A. thaliana
  misc_feature: MA Experiment 20000437 PARAMETER Experiment Name: At_Drought_P Parameter: Plant Line Value: WS
  misc_feature: MA Experiment 20000437 PARAMETER Experiment Name: At_Drought_P Parameter: Timepoint (hr) Value: 24
  misc_feature: MA Experiment 20000437 PARAMETER Experiment Name: At_Drought_P Parameter: Tissue Value: Whole Plant
  misc_feature: MA Experiment 20000437 PARAMETER Experiment Name: At_Drought_P Parameter: Treatment Value: Drought vs. No Drought
  misc_feature: MA Experiment ID: 20000438 Result: Down-regulated in Transcription
  misc_feature: MA Experiment 20000438 PARAMETER Experiment Name: At_Shoots__P Parameter: Age (day) Value: 14
  misc_feature: MA Experiment 20000438 PARAMETER Experiment Name: At_Shoots__P Parameter: Tissue Value: Shoots vs. Whole Plant
  misc_feature: MA Experiment ID: 20000451 Result: Up-regulated in Transcription
  misc_feature: MA Experiment 20000451 PARAMETER Experiment Name: At_CS6879_Shoots-Roots_P Parameter: Age (day) Value: 14
  misc_feature: MA Experiment 20000451 PARAMETER Experiment Name: At_CS6879_Shoots-Roots_P Parameter: Organism Value: A. thaliana
  misc_feature: MA Experiment 20000451 PARAMETER Experiment Name: At_CS6879_Shoots-Roots_P Parameter: Plant Line Value: CS6879 vs. WS
  misc_feature: MA Experiment 20000451 PARAMETER Experiment Name: At_CS6879_Shoots-Roots_P Parameter: Tissue Value: Roots
  misc_feature: MA Experiment ID: 20000453 Result: Up-regulated in Transcription
  misc_feature: MA Experiment 20000453 PARAMETER Experiment Name: At_100uM_ABA_P Parameter: Age (day) Value: 15
  misc_feature: MA Experiment 20000453 PARAMETER Experiment Name: At_100uM_ABA_P Parameter: Organism Value: A. thaliana
  misc_feature: MA Experiment 20000453 PARAMETER Experiment Name: At_100uM_ABA_P Parameter: Plant Line Value: WS
  misc_feature: MA Experiment 20000453 PARAMETER Experiment Name: At_100uM_ABA_P Parameter: Timepoint (hr) Value: 24
  misc_feature: MA Experiment 20000453 PARAMETER Experiment Name: At_100uM_ABA_P Parameter: Tissue Value: Aerial
  misc_feature: MA Experiment 20000453 PARAMETER Experiment Name: At_100uM_ABA_P Parameter: Treatment Value: 100uM ABA vs. No Treatment
  misc_feature: MA Experiment ID: 20000455 Result: Up-regulated in Transcription
  misc_feature: MA Experiment 20000455 PARAMETER Experiment Name: At_100uM_ABA_P Parameter: Age (day) Value: 16
  misc_feature: MA Experiment 20000455 PARAMETER Experiment Name: At_100uM_ABA_P Parameter: Organism Value: A. thaliana
  misc_feature: MA Experiment 20000455 PARAMETER Experiment Name: At_100uM_ABA_P Parameter: Plant Line Value: WS
  misc_feature: MA Experiment 20000455 PARAMETER Experiment Name: At_100uM_ABA_P Parameter: Timepoint (hr) Value: 48
  misc_feature: MA Experiment 20000455 PARAMETER Experiment Name: At_100uM_ABA_P Parameter: Tissue Value: Aerial
  misc_feature: MA Experiment 20000455 PARAMETER Experiment Name: At_100uM_ABA_P Parameter: Treatment Value: 100uM ABA vs. No Treatment
  misc_feature: MA Experiment ID: 20000495 Result: Down-regulated in Transcription
  misc_feature: MA Experiment 20000495 PARAMETER Experiment Name: At_Guard_Cells_P Parameter: Harvest Date Value: 8/2/2002
  misc_feature: MA Experiment 20000495 PARAMETER Experiment Name: At_Guard_Cells_P Parameter: Organism Value: A. thaliana
  misc_feature: MA Experiment 20000495 PARAMETER Experiment Name: At_Guard_Cells_P Parameter: Tissue Value: Guard Cells vs. Leaves
  misc_feature: MA Experiment ID: 20000496 Result: Down-regulated in Transcription
  misc_feature: MA Experiment 20000496 PARAMETER Experiment Name: At_Guard_Cells_P Parameter: Harvest Date Value: 7/19/2002
  misc_feature: MA Experiment 20000496 PARAMETER Experiment Name: At_Guard_Cells_P Parameter: Organism Value: Canola
  misc_feature: MA Experiment 20000496 PARAMETER Experiment Name: At_Guard_Cells_P Parameter: Tissue Value: Guard Cells vs. Leaves
  misc_feature: MA Experiment ID: 20001554 Result: Up-regulated in Transcription
  misc_feature: MA Experiment 20001554 PARAMETER Experiment Name: At_Drought_Soil_Dry_P Parameter: Age (day) Value: 21
  misc_feature: MA Experiment 20001554 PARAMETER Experiment Name: At_Drought_Soil_Dry_P Parameter: Organism Value: A. thaliana
  misc_feature: MA Experiment 20001554 PARAMETER Experiment Name: At_Drought_Soil_Dry_P Parameter: Plant Line Value: WS
  misc_feature: MA Experiment 20001554 PARAMETER Experiment Name: At_Drought_Soil_Dry_P Parameter: Post Timepoint (hr) Value: None
  misc_feature: MA Experiment 20001554 PARAMETER Experiment Name: At_Drought_Soil_Dry_P Parameter: Post-Treatment Value: None
  misc_feature: MA Experiment 20001554 PARAMETER Experiment Name: At_Drought_Soil_Dry_P Parameter: Timepoint (day) Value: 7
  misc_feature: MA Experiment 20001554 PARAMETER Experiment Name: At_Drought_Soil_Dry_P Parameter: Treatment Value: Drought vs. No Drought
  misc_feature: MA Experiment ID: 20001555 Result: Up-regulated in Transcription
  misc_feature: MA Experiment 20001555 PARAMETER Experiment Name: At_Drought_Soil_Dry_P Parameter: Age (day) Value: 24
  misc_feature: MA Experiment 20001555 PARAMETER Experiment Name: At_Drought_Soil_Dry_P Parameter: Organism Value: A. thaliana
  misc_feature: MA Experiment 20001555 PARAMETER Experiment Name: At_Drought_Soil_Dry_P Parameter: Plant Line Value: WS
  misc_feature: MA Experiment 20001555 PARAMETER Experiment Name: At_Drought_Soil_Dry_P Parameter: Post Timepoint (hr) Value: None
  misc_feature: MA Experiment 20001555 PARAMETER Experiment Name: At_Drought_Soil_Dry_P Parameter: Post-Treatment Value: None
  misc_feature: MA Experiment 20001555 PARAMETER Experiment Name: At_Drought_Soil_Dry_P Parameter: Timepoint (day) Value: 10
  misc_feature: MA Experiment 20001555 PARAMETER Experiment Name: At_Drought_Soil_Dry_P Parameter: Treatment Value: Drought vs. No Drought
  misc_feature: MA Experiment ID: 20001904 Result: Up-regulated in Transcription
  misc_feature: MA Experiment 20001904 PARAMETER Experiment Name: At_Drought_Reproduction_P Parameter: Age (day) Value: 37
  misc_feature: MA Experiment 20001904 PARAMETER Experiment Name: At_Drought_Reproduction_P Parameter: Organism Value: A. thaliana
  misc_feature: MA Experiment 20001904 PARAMETER Experiment Name: At_Drought_Reproduction_P Parameter: Plant Line Value: WS
  misc_feature: MA Experiment 20001904 PARAMETER Experiment Name: At_Drought_Reproduction_P Parameter: Timepoint (day) Value: 7
  misc_feature: MA Experiment 20001904 PARAMETER Experiment Name: At_Drought_Reproduction_P Parameter: Tissue Value: Rosettes
  misc_feature: MA Experiment 20001904 PARAMETER Experiment Name: At_Drought_Reproduction_P Parameter: Treatment Value: Drought vs. No Drought
  misc_feature: MA Experiment ID: 20001905 Result: Up-regulated in Transcription
  misc_feature: MA Experiment 20001905 PARAMETER Experiment Name: At_Drought_Reproduction_P Parameter: Age (day) Value: 40
  misc_feature: MA Experiment 20001905 PARAMETER Experiment Name: At_Drought_Reproduction_P Parameter: Organism Value: A. thaliana
  misc_feature: MA Experiment 20001905 PARAMETER Experiment Name: At_Drought_Reproduction_P Parameter: Plant Line Value: WS
  misc_feature: MA Experiment 20001905 PARAMETER Experiment Name: At_Drought_Reproduction_P Parameter: Timepoint (day) Value: 10
  misc_feature: MA Experiment 20001905 PARAMETER Experiment Name: At_Drought_Reproduction_P Parameter: Tissue Value: Rosettes
  misc_feature: MA Experiment 20001905 PARAMETER Experiment Name: At_Drought_Reproduction_P Parameter: Treatment Value: Drought vs. No Drought
  misc_feature: MA Experiment ID: 20001911 Result: Up-regulated in Transcription
  misc_feature: MA Experiment 20001911 PARAMETER Experiment Name: At_Drought_Reproduction_P Parameter: Age (day) Value: 40
  misc_feature: MA Experiment 20001911 PARAMETER Experiment Name: At_Drought_Reproduction_P Parameter: Organism Value: A. thaliana
  misc_feature: MA Experiment 20001911 PARAMETER Experiment Name: At_Drought_Reproduction_P Parameter: Plant Line Value: WS
  misc_feature: MA Experiment 20001911 PARAMETER Experiment Name: At_Drought_Reproduction_P Parameter: Timepoint (day) Value: 10
  misc_feature: MA Experiment 20001911 PARAMETER Experiment Name: At_Drought_Reproduction_P Parameter: Tissue Value: Flowers
  misc_feature: MA Experiment 20001911 PARAMETER Experiment Name: At_Drought_Reproduction_P Parameter: Treatment Value: Drought vs. No Drought
acatgctcttatttcacaatcccaccaaaacaaatctcaagaacatttcaagattcagaaaaaagaaactcgcaaacttttttcttttgtttctgtcaacgttcaaataatcaagcgattgttttttttaacctagaaaaattatggctatagaagaaaaccgaagtcacaacgattatcttaggaggatgacttttgcagcgttcttgaaatctggttctctcgccgccgaggaagaaacttaccacagcgacggtgatcatcataaccaaagcacctttagcagcaacagcgattctcagcggccaagcaacgcttcaagtgctagtagcgattcgtcatcaccaatctacccattatctccatggaaccaaacttactacccaagcaacgacaacacgacgtcgttttcatctgttactcaatcaccatggaaccaaacttactctccgtaccacaaatctccatggatttaccaaaccaggaacagtgatttcgaggatgatcctgataacggtttgatcggtacggtcgtgagacaagaaggacacgtgtactctctcgctgcttcaggtgatcttcttttcaccggttctgattccaagaacattcgggtttggaaagatcttaaagatttctccgggtttaaatccacaagcggttttgttaaagccattgtagtaaccagagataaccgggttttcaccggtcatcaggatggtaaaatccgggtatggagaggatcaaagaagaaccccgagaaatattcacgagtcggaagtttaccaactcttaaagaatttctcaccaaatcggtaaatcctagaaactacgtcgaagtccgtcgccggaaaaacgttttgaagatccgacatttcgacgctgtgtcttgtctgagcttaaacgaagatctcggtttgctctactccggttcttgggacaagactcttaaggtctggagattgtccgattcaaaatgtttagaatcaatcgaagctcacgacgatgccgttaacacggtggtttccggtttcgacgatttggtatttaccggttcagccgacggaacgttgaaagtatggaaacgtgaggtacaaggcaaagagatgaagcatgttttggtacaagtgttaatgaaacaagagaacgcagtaacggcgttagctgttaatttaacggacgctgttgtttactgtggttcgtctgacggaaccgttaacttctgggaacggcaaaagtatttgactcacaaagggacgattcacggccaccgtatggcggttttgtgtctcgccaccgccgggagtttgcttttgagcggtggagctgataagaatatttgcgtttggaaaagaaacggggacggatcgcatacgtgtctctctgttttgatggatcatgaaggaccggttaagtgtttagcggcggtggaagaggcggaggaagatcataacgacggagacgacggtggagagaaaggggatcaacggtggatagtgtatagtgggagtttagacaactccgttaaagtgtggcgcgtgacggattacgcttcgtaagcgcgtgaagaagtatacgtgtggacgacgtaggagcgtgaaggaatgtttcccggccatgtggttgtatagcgttttatcgtcaaaggaggaattgattgggaggcaactagtaggtagatttggtacttgtgatgaccaatagtgtattgtcacgtatcatgtgactttgtcatcttctttggaagtgtgaaaaagtcttttgttgttgcgttagatcttttattgtctcttgtaatggcatgcacttattttaaatcatgtgaaac

SEQ ID NO: 79585 - protein, 471 aa, Arabidopsis thaliana
  peptide (1)..(471): Ceres Seq. ID no. 12652002
  misc_feature (1)..(471): Homolog of NCBI NO: 15222143 NR Description: En/Spm-like transposon protein, putative; protein At1g49450.1, supported by cDNA: gi_17979258 [Arabidopsis >gi|25405310|pir||B96531 hypothetical protein F13F21.11
  misc_feature (1)..(471): Homolog of NCBI NO: 17979259 NR Description: At1g49450/F13F21_11 [Arabidopsis thaliana]
  misc_feature (1)..(471): Homolog of NCBI NO: 15230244 NR Description: hypothetical protein; protein id: At3g18950.1
  misc_feature (25)..(468): Homolog of NCBI NO: 15235354 NR Description: G-protein beta family; protein id: At4g34380.1
  misc_feature (90)..(468): Homolog of NCBI NO: 15225317 NR Description: G-protein beta family; protein id: At2g26490.1
  misc_feature (122)..(470): Homolog of NCBI NO: 31126785 NR Description: putative WD repeat-protein [Oryza sativa
  misc_feature (121)..(466): Homolog of NCBI NO: 15220271 NR Description: G-protein beta family; protein id: At1g47610.1
  misc_feature (41)..(468): Homolog of NCBI NO: 15229740 NR Description: G-protein beta family; protein id: At3g50390.1
  misc_feature (71)..(466): Homolog of NCBI NO: 15221675 NR Description: G-protein beta family; protein id: At1g24130.1
  misc_feature (135)..(466): Homolog of NCBI NO: 15231088 NR Description: G-protein beta family; protein id: At3g51930.1
MAIEENRSHNDYLRRMTFAAFLKSGSLAAEEETYHSDGDHHNQSTFSSNSDSQRPSNASSASSDSSSPIYPLSPWNQTYYPSNDNTTSFSSVTQSPWNQTYSPYHKSPWIYQTRNSDFEDDPDNGLIGTVVRQEGHVYSLAASGDLLFTGSDSKNIRVWKDLKDFSGFKSTSGFVKAIVVTRDNRVFTGHQDGKIRVWRGSKKNPEKYSRVGSLPTLKEFLTKSVNPRNYVEVRRRKNVLKIRHFDAVSCLSLNEDLGLLYSGSWDKTLKVWRLSDSKCLESIEAHDDAVNTVVSGFDDLVFTGSADGTLKVWKREVQGKEMKHVLVQVLMKQENAVTALAVNLTDAVVYCGSSDGTVNFWERQKYLTHKGTIHGHRMAVLCLATAGSLLLSGGADKNICVWKRNGDGSHTCLSVLMDHEGPVKCLAAVEEAEEDHNDGDDGGEKGDQRWIVYSGSLDNSVKVWRVTDYAS

SEQ ID NO: 79586 - protein, 456 aa, Arabidopsis thaliana
  peptide (1)..(456): Ceres Seq. ID no. 12652003
  misc_feature (1)..(456): Homolog of NCBI NO: 15222143 NR Description: En/Spm-like transposon protein, putative; protein At1g49450.1, supported by cDNA: gi_17979258 [Arabidopsis >gi|25405310|pir||B96531 hypothetical protein F13F21.11
  misc_feature (1)..(456): Homolog of NCBI NO: 17979259 NR Description: At1g49450/F13F21_11 [Arabidopsis thaliana]
  misc_feature (1)..(456): Homolog of NCBI NO: 15230244 NR Description: hypothetical protein; protein id: At3g18950.1
  misc_feature (10)..(453): Homolog of NCBI NO: 15235354 NR Description: G-protein beta family; protein id: At4g34380.1
  misc_feature (75)..(453): Homolog of NCBI NO: 15225317 NR Description: G-protein beta family; protein id: At2g26490.1
  misc_feature (107)..(455): Homolog of NCBI NO: 31126785 NR Description: putative WD repeat-protein [Oryza sativa
  misc_feature (106)..(451): Homolog of NCBI NO: 15220271 NR Description: G-protein beta family; protein id: At1g47610.1
  misc_feature (26)..(453): Homolog of NCBI NO: 15229740 NR Description: G-protein beta family; protein id: At3g50390.1
  misc_feature (56)..(451): Homolog of NCBI NO: 15221675 NR Description: G-protein beta family; protein id: At1g24130.1
  misc_feature (120)..(451): Homolog of NCBI NO: 15231088 NR Description: G-protein beta family; protein id: At3g51930.1
MTFAAFLKSGSLAAEEETYHSDGDHHNQSTFSSNSDSQRPSNASSASSDSSSPIYPLSPWNQTYYPSNDNTTSFSSVTQSPWNQTYSPYHKSPWIYQTRNSDFEDDPDNGLIGTVVRQEGHVYSLAASGDLLFTGSDSKNIRVWKDLKDFSGFKSTSGFVKAIVVTRDNRVFTGHQDGKIRVWRGSKKNPEKYSRVGSLPTLKEFLTKSVNPRNYVEVRRRKNVLKIRHFDAVSCLSLNEDLGLLYSGSWDKTLKVWRLSDSKCLESIEAHDDAVNTVVSGFDDLVFTGSADGTLKVWKREVQGKEMKHVLVQVLMKQENAVTALAVNLTDAVVYCGSSDGTVNFWERQKYLTHKGTIHGHRMAVLCLATAGSLLLSGGADKNICVWKRNGDGSHTCLSVLMDHEGPVKCLAAVEEAEEDHNDGDDGGEKGDQRWIVYSGSLDNSVKVWRVTDYAS

SEQ ID NO: 79587 - DNA, 2544 bp, Arabidopsis thaliana
  misc_feature (1)..(2544): Ceres Seq. ID no. 12652004
  misc_feature: MA Experiment ID: 20000794 Result: Up-regulated in Transcription
  misc_feature: MA Experiment 20000794 PARAMETER Experiment Name: At_Petals_P Parameter: Age (day) Value: 23-25 days
  misc_feature: MA Experiment 20000794 PARAMETER Experiment Name: At_Petals_P Parameter: Plant Line Value: WS
  misc_feature: MA Experiment 20000794 PARAMETER Experiment Name: At_Petals_P Parameter: Tissue Value: Petals vs. Whole plant
  misc_feature: MA Experiment ID: 20001451 Result: Up-regulated in Transcription
  misc_feature: MA Experiment 20001451 PARAMETER Experiment Name: At_Far-red-induction_P Parameter: Age (day) Value: 7
  misc_feature: MA Experiment 20001451 PARAMETER Experiment Name: At_Far-red-induction_P Parameter: Light Value: Far-red vs. White
  misc_feature: MA Experiment 20001451 PARAMETER Experiment Name: At_Far-red-induction_P Parameter: Organism Value: A. thaliana
  misc_feature: MA Experiment 20001451 PARAMETER Experiment Name: At_Far-red-induction_P Parameter: Plant Line Value: Columbia
  misc_feature: MA Experiment 20001451 PARAMETER Experiment Name: At_Far-red-induction_P Parameter: Timepoint (hr) Value: 24
  misc_feature: MA Experiment 20001451 PARAMETER Experiment Name: At_Far-red-induction_P Parameter: Tissue Value: Whole Plant
  misc_feature: MA Experiment ID: 20001910 Result: Up-regulated in Transcription
  misc_feature: MA Experiment 20001910 PARAMETER Experiment Name: At_Drought_Reproduction_P Parameter: Age (day) Value: 37
  misc_feature: MA Experiment 20001910 PARAMETER Experiment Name: At_Drought_Reproduction_P Parameter: Organism Value: A. thaliana
  misc_feature: MA Experiment 20001910 PARAMETER Experiment Name: At_Drought_Reproduction_P Parameter: Plant Line Value: WS
  misc_feature: MA Experiment 20001910 PARAMETER Experiment Name: At_Drought_Reproduction_P Parameter: Timepoint (day) Value: 7
  misc_feature: MA Experiment 20001910 PARAMETER Experiment Name: At_Drought_Reproduction_P Parameter: Tissue Value: Flowers
  misc_feature: MA Experiment 20001910 PARAMETER Experiment Name: At_Drought_Reproduction_P Parameter: Treatment Value: Drought vs. No Drought
atggagaggccctttggctgcttcttcatcctccttcttatctcctataccgtcgttgccacctttgacgatgaaccttctttccccgaaaacgccgatctcacaaaagatctagaacaaaaatgttttagcatcaataaagttgatcctaacctcaaatttgaaaatgatcgtctcaaaagagcttacattgctcttcaagcatggaaaaaagccatttactctgatccatttaaaactacggccaattgggttggttctgatgtgtgttcatacaatggagtttattgtgcacctgctctagatgatgatagtctcacggtcgtagctggagttgaccttaaccatgcagatatagccggacatttaccaccagagcttggccttatgacggacctagctttatttcacatcaattcgaatcggttttgtgggatcatccccaaaagtttatcgaaactcgctttgatgtacgaattcgatgttagcaacaatcgattcgttggtcagttccctgaagtttcactctcatggccttctttgaagtttcttgatctaagatacaacgaatttgaaggaagcttgccatcagaaatctttgataaagatcttgatgcaattttcttgaacaacaatcggtttgaatcggttatccccggtacaattgggaaatcgaaagcatcggttgtgacattcgcaaacaataaattcagtggttgtatcccaaaatcgattggtaatatgaagaacctcaatgagattgtcttcactggaaacaatttaaccggttgtttcccaaacgagattggtttgcttaacaatgtgacggtgtttgatgcaagcaagaacggttttgtcggtagtttaccgtcaaccttgtccggtttagctagcgttgagcagttagatttatcgcataataagctcaccggatttgttgttgacaaattttgcaagttgcctaatttggacagcttcaagttttcttacaattttttcaatggagaagctgagagctgtgttccagggagaaacaatgggaaacaatttgatgataccaacaattgcttgcaaaatagaccgagccaaaagccggctaaacaatgtttgccggtggttagtcgtcctgtggattgtagcaaggacaaatgctctggcggtagcaatggtggctctagcccatcaccaaatccaccaaggacgtccgagccaaagccatcaaaaccagagccggttatgcctaaacctagtgattcatcaaaacccgagacaccaaaaacacctgaacaaccttcacctaaacctcagccaccaaagcatgaatctcctaaaccggaagaaccggaaaacaagcatgagctaccaaaacaaaaggagtctcctaaaccacaaccgtctaaacctgaagattctcctaaaccagaacaaccaaaaccagaggagtcacctaagcctgaacaaccacagatacctgagcctactaaaccggtttcaccaccaaatgaagcacaaggaccaacaccggatgatccatatgatgcatctccggttaaaaatcgtcgttctccgccaccacccaaggtagaggatacacgtgtaccaccaccacaaccaccaatgccttccccatcaccaccatcaccgatttactcaccaccaccaccggttcactcaccgccgcctccggtttattcatcaccaccaccaccacatgtctactctccacctccaccagttgcttctcctccaccgccatcaccaccaccaccagttcactctcctccaccaccaccggttttctctccaccaccaccagttttctctccaccaccaccatcaccagtatactcaccaccgcctccaagccactcaccaccaccaccagtatattctccgcctccaccaactttctcaccaccaccaacacataatacaaaccaaccaccaatgggagctccaacaccgactcaagcaccaacaccatcctctgaaacaacccaagtgccaactccatcatcagaatcagatcaatcacaaattttgtcaccagttcaagctccaacaccggttcaatcctcaaccccatcctctgaaccaacccaagtgccaactccatcatcatcagaatcatatcaagcaccaaatttgtcaccagttcaagctccaacaccggttcaagccccaaccacatcctctgaaacatctcaagtaccaactccatcatcagaatcaaaccagtcaccaagtcaagctccaacaccaattcttgaaccggttcatgccccaacaccaaactctaaaccggtccaatcaccaacaccatcaagcgaaccggtctcatcaccagaacaatcagaagaagttgaagcaccagaaccaacacccgtcaatccatcatcagtaccatcatcttctccttccactgacacatctattccaccaccggaaaacaacgacgatgatgatgatggggatttcgtcctaccaccacacattggattccaatatgcatcgccaccaccaccaatgttccaaggatattaa

SEQ ID NO: 79588 - protein, 847 aa, Arabidopsis thaliana
  peptide (1)..(847): Ceres Seq. ID no. 12652005
  misc_feature (457)..(842): Pfam Name: Extensin-like region Pfam Description: Extensin-like region
  misc_feature (1)..(822): Homolog of NCBI NO: 30685162 NR Description: leucine-rich repeat extensin family [Arabidopsis
  misc_feature (1)..(692): Homolog of NCBI NO: 20259488 NR Description: unknown protein [Arabidopsis thaliana]
  misc_feature (27)..(714): Homolog of NCBI NO: 15226640 NR Description: unknown protein; protein id: At2g15880.1
  misc_feature (1)..(656): Homolog of NCBI NO: 15235186 NR Description: extensin-like protein; protein id: At4g33970.1
  misc_feature (30)..(840): Homolog of NCBI NO: 1076802 NR Description: extensin-like protein - maize
  misc_feature (30)..(843): Homolog of NCBI NO: 25056007 NR Description: extensin-like protein [Zea mays]
  misc_feature (6)..(714): Homolog of NCBI NO: 5917664 NR Description: extensin-like protein [Lycopersicon esculentum]
  misc_feature (48)..(754): Homolog of NCBI NO: 15235668 NR Description: extensin-like protein; protein id: At4g13340.1
  misc_feature (48)..(614): Homolog of NCBI NO: 15233976 NR Description: extensin-like protein; protein id: At4g18670.1
  misc_feature (565)..(718): Homolog of NCBI NO: 15233976 NR Description: extensin-like protein; protein id: At4g18670.1
MERPFGCFFILLLISYTVVATFDDEPSFPENADLTKDLEQKCFSINKVDPNLKFENDRLKRAYIALQAWKKAIYSDPFKTTANWVGSDVCSYNGVYCAPALDDDSLTVVAGVDLNHADIAGHLPPELGLMTDLALFHINSNRFCGIIPKSLSKLALMYEFDVSNNRFVGQFPEVSLSWPSLKFLDLRYNEFEGSLPSEIFDKDLDAIFLNNNRFESVIPGTIGKSKASVVTFANNKFSGCIPKSIGNMKNLNEIVFTGNNLTGCFPNEIGLLNNVTVFDASKNGFVGSLPSTLSGLASVEQLDLSHNKLTGFVVDKFCKLPNLDSFKFSYNFFNGEAESCVPGRNNGKQFDDTNNCLQNRPSQKPAKQCLPVVSRPVDCSKDKCSGGSNGGSSPSPNPPRTSEPKPSKPEPVMPKPSDSSKPETPKTPEQPSPKPQPPKHESPKPEEPENKHELPKQKESPKPQPSKPEDSPKPEQPKPEESPKPEQPQIPEPTKPVSPPNEAQGPTPDDPYDASPVKNRRSPPPPKVEDTRVPPPQPPMPSPSPPSPIYSPPPPVHSPPPPVYSSPPPPHVYSPPPPVASPPPPSPPPPVHSPPPPPVFSPPPPVFSPPPPSPVYSPPPPSHSPPPPVYSPPPPTFSPPPTHNTNQPPMGAPTPTQAPTPSSETTQVPTPSSESDQSQILSPVQAPTPVQSSTPSSEPTQVPTPSSSESYQAPNLSPVQAPTPVQAPTTSSETSQVPTPSSESNQSPSQAPTPILEPVHAPTPNSKPVQSPTPSSEPVSSPEQSEEVEAPEPTPVNPSSVPSSSPSTDTSIPPPENNDDDDDGDFVLPPHIGFQYASPPPPMFQGY

SEQ ID NO: 79589 - protein, 718 aa, Arabidopsis thaliana
  peptide (1)..(718): Ceres Seq. ID no. 12652006
  misc_feature (328)..(713): Pfam Name: Extensin-like region Pfam Description: Extensin-like region
  misc_feature (1)..(693): Homolog of NCBI NO: 30685162 NR Description: leucine-rich repeat extensin family [Arabidopsis
  misc_feature (1)..(563): Homolog of NCBI NO: 20259488 NR Description: unknown protein [Arabidopsis thaliana]
  misc_feature (1)..(585): Homolog of NCBI NO: 15226640 NR Description: unknown protein; protein id: At2g15880.1
  misc_feature (1)..(527): Homolog of NCBI NO: 15235186 NR Description: extensin-like protein; protein id: At4g33970.1
  misc_feature (1)..(711): Homolog of NCBI NO: 1076802 NR Description: extensin-like protein - maize
  misc_feature (1)..(714): Homolog of NCBI NO: 25056007 NR Description: extensin-like protein [Zea mays]
  misc_feature (1)..(585): Homolog of NCBI NO: 5917664 NR Description: extensin-like protein [Lycopersicon esculentum]
  misc_feature (1)..(625): Homolog of NCBI NO: 15235668 NR Description: extensin-like protein; protein id: At4g13340.1
  misc_feature (1)..(485): Homolog of NCBI NO: 15233976 NR Description: extensin-like protein; protein id: At4g18670.1
  misc_feature (436)..(589): Homolog of NCBI NO: 15233976 NR Description: extensin-like protein; protein id: At4g18670.1
MTDLALFHINSNRFCGIIPKSLSKLALMYEFDVSNNRFVGQFPEVSLSWPSLKFLDLRYNEFEGSLPSEIFDKDLDAIFLNNNRFESVIPGTIGKSKASVVTFANNKFSGCIPKSIGNMKNLNEIVFTGNNLTGCFPNEIGLLNNVTVFDASKNGFVGSLPSTLSGLASVEQLDLSHNKLTGFVVDKFCKLPNLDSFKFSYNFFNGEAESCVPGRNNGKQFDDTNNCLQNRPSQKPAKQCLPVVSRPVDCSKDKCSGGSNGGSSPSPNPPRTSEPKPSKPEPVMPKPSDSSKPETPKTPEQPSPKPQPPKHESPKPEEPENKHELPKQKESPKPQPSKPEDSPKPEQPKPEESPKPEQPQIPEPTKPVSPPNEAQGPTPDDPYDASPVKNRRSPPPPKVEDTRVPPPQPPMPSPSPPSPIYSPPPPVHSPPPPVYSSPPPPHVYSPPPPVASPPPPSPPPPVHSPPPPPVFSPPPPVFSPPPPSPVYSPPPPSHSPPPPVYSPPPPTFSPPPTHNTNQPPMGAPTPTQAPTPSSETTQVPTPSSESDQSQILSPVQAPTPVQSSTPSSEPTQVPTPSSSESYQAPNLSPVQAPTPVQAPTTSSETSQVPTPSSESNQSPSQAPTPILEPVHAPTPNSKPVQSPTPSSEPVSSPEQSEEVEAPEPTPVNPSSVPSSSPSTDTSIPPPENNDDDDDGDFVLPPHIGFQYASPPPPMFQGY

SEQ ID NO: 79590 - protein, 691 aa, Arabidopsis thaliana
  peptide (1)..(691): Ceres Seq. ID no. 12652007
  misc_feature (301)..(686): Pfam Name: Extensin-like region Pfam Description: Extensin-like region
  misc_feature (1)..(666): Homolog of NCBI NO: 30685162 NR Description: leucine-rich repeat extensin family [Arabidopsis
  misc_feature (1)..(536): Homolog of NCBI NO: 20259488 NR Description: unknown protein [Arabidopsis thaliana]
  misc_feature (1)..(558): Homolog of NCBI NO: 15226640 NR Description: unknown protein; protein id: At2g15880.1
  misc_feature (1)..(500): Homolog of NCBI NO: 15235186 NR Description: extensin-like protein; protein id: At4g33970.1
  misc_feature (1)..(684): Homolog of NCBI NO: 1076802 NR Description: extensin-like protein - maize
  misc_feature (1)..(687): Homolog of NCBI NO: 25056007 NR Description: extensin-like protein [Zea mays]
  misc_feature (1)..(558): Homolog of NCBI NO: 5917664 NR Description: extensin-like protein [Lycopersicon esculentum]
  misc_feature (1)..(598): Homolog of NCBI NO: 15235668 NR Description: extensin-like protein; protein id: At4g13340.1
  misc_feature (1)..(458): Homolog of NCBI NO: 15233976 NR Description: extensin-like protein; protein id: At4g18670.1
  misc_feature (409)..(562): Homolog of NCBI NO: 15233976 NR Description: extensin-like protein; protein id: At4g18670.1
MYEFDVSNNRFVGQFPEVSLSWPSLKFLDLRYNEFEGSLPSEIFDKDLDAIFLNNNRFESVIPGTIGKSKASVVTFANNKFSGCIPKSIGNMKNLNEIVFTGNNLTGCFPNEIGLLNNVTVFDASKNGFVGSLPSTLSGLASVEQLDLSHNKLTGFVVDKFCKLPNLDSFKFSYNFFNGEAESCVPGRNNGKQFDDTNNCLQNRPSQKPAKQCLPVVSRPVDCSKDKCSGGSNGGSSPSPNPPRTSEPKPSKPEPVMPKPSDSSKPETPKTPEQPSPKPQPPKHESPKPEEPENKHELPKQKESPKPQPSKPEDSPKPEQPKPEESPKPEQPQIPEPTKPVSPPNEAQGPTPDDPYDASPVKNRRSPPPPKVEDTRVPPPQPPMPSPSPPSPIYSPPPPVHSPPPPVYSSPPPPHVYSPPPPVASPPPPSPPPPVHSPPPPPVFSPPPPVFSPPPPSPVYSPPPPSHSPPPPVYSPPPPTFSPPPTHNTNQPPMGAPTPTQAPTPSSETTQVPTPSSESDQSQILSPVQAPTPVQSSTPSSEPTQVPTPSSSESYQAPNLSPVQAPTPVQAPTTSSETSQVPTPSSESNQSPSQAPTPILEPVHAPTPNSKPVQSPTPSSEPVSSPEQSEEVEAPEPTPVNPSSVPSSSPSTDTSIPPPENNDDDDDGDFVLPPHIGFQYASPPPPMFQGY

SEQ ID NO: 79591 - DNA, 1821 bp, Arabidopsis thaliana
  misc_feature (1)..(1821): Ceres Seq. ID no. 12652024
  misc_feature: MA Experiment ID: 20000314 Result: Up-regulated in Transcription
  misc_feature: MA Experiment 20000314 PARAMETER Experiment Name: At_14day_Shoots-Roots_Sub_P Parameter: Age (day) Value: 14
  misc_feature: MA Experiment 20000314 PARAMETER Experiment Name: At_14day_Shoots-Roots_Sub_P Parameter: Organism Value: A. thaliana
  misc_feature: MA Experiment 20000314 PARAMETER Experiment Name: At_14day_Shoots-Roots_Sub_P Parameter: Plant Line Value: WS
  misc_feature: MA Experiment 20000314 PARAMETER Experiment Name: At_14day_Shoots-Roots_Sub_P Parameter: Tissue Value: Roots vs. Whole Plant
  misc_feature: MA Experiment ID: 20000327 Result: Down-regulated in Transcription
  misc_feature: MA Experiment 20000327 PARAMETER Experiment Name: At_42deg_Heat_Sub_P Parameter: Age (day) Value: 14
  misc_feature: MA Experiment 20000327 PARAMETER Experiment Name: At_42deg_Heat_Sub_P Parameter: Organism Value: A. thaliana
  misc_feature: MA Experiment 20000327 PARAMETER Experiment Name: At_42deg_Heat_Sub_P Parameter: Plant Line Value: WS
  misc_feature: MA Experiment 20000327 PARAMETER Experiment Name: At_42deg_Heat_Sub_P Parameter: Temperature (deg C) Value: 42 vs. 22
  misc_feature: MA Experiment 20000327 PARAMETER Experiment Name: At_42deg_Heat_Sub_P Parameter: Timepoint (hr) Value: 1
  misc_feature: MA Experiment 20000327 PARAMETER Experiment Name: At_42deg_Heat_Sub_P Parameter: Tissue Value: Aerial
  misc_feature: MA Experiment ID: 20000328 Result: Down-regulated in Transcription
  misc_feature: MA Experiment 20000328 PARAMETER Experiment Name: At_42deg_Heat_Sub_P Parameter: Age (day) Value: 14
  misc_feature: MA Experiment 20000328 PARAMETER Experiment Name: At_42deg_Heat_Sub_P Parameter: Organism Value: A. thaliana
  misc_feature: MA Experiment 20000328 PARAMETER Experiment Name: At_42deg_Heat_Sub_P Parameter: Plant Line Value: WS
  misc_feature: MA Experiment 20000328 PARAMETER Experiment Name: At_42deg_Heat_Sub_P Parameter: Temperature (deg C) Value: 42 vs. 22
  misc_feature: MA Experiment 20000328 PARAMETER Experiment Name: At_42deg_Heat_Sub_P Parameter: Timepoint (hr) Value: 6
  misc_feature: MA Experiment 20000328 PARAMETER Experiment Name: At_42deg_Heat_Sub_P Parameter: Tissue Value: Aerial
  misc_feature: MA Experiment ID: 20000355 Result: Up-regulated in Transcription
  misc_feature: MA Experiment 20000355 PARAMETER Experiment Name: At_Siliques_Sub_P Parameter: Age (day) Value: 21
  misc_feature: MA Experiment 20000355 PARAMETER Experiment Name: At_Siliques_Sub_P Parameter: Organism Value: A. thaliana
  misc_feature: MA Experiment 20000355 PARAMETER Experiment Name: At_Siliques_Sub_P Parameter: Plant Line Value: WS
  misc_feature: MA Experiment 20000355 PARAMETER Experiment Name: At_Siliques_Sub_P Parameter: Tissue Value: Less Than 5mm Siliques vs. Whole Plant
  misc_feature: MA Experiment ID: 20000440 Result: Up-regulated in Transcription
  misc_feature: MA Experiment 20000440 PARAMETER Experiment Name: At_Closed-Flower__Sub_P Parameter: Tissue Value: Closed Flower vs. Whole Plant
atgggaggctgtacttccaaaccctccacttcctccggcagacctaaccctttcgctcccggtaatgactatcctcaaattgacgattttgcccctgaccatcccggtaaatcaccaattcctactccttccgccgcaaaggcctctcctttcttccccttttacacgccgagccctgctcgccaccgccgcaataagagccgcgacgtcggcggaggaggagagagcaagagtttgactagcacgcctctccgtcaattacgccgtgcgtttcaccctccgtctccggcgaaacacatacgggcggcgctacggcggaggaaagggaaaaaggaagctgctttatctggggtgacgcagctaacgacggaggtaccgcagcgtgaggaggaagaggaagtagggcttgacaaaagatttggtttttctaaagagtttcacagtagagtagagttaggggaagaaattggacgaggacattttgggtacacttgctctgctaagttcaagaaaggagagctcaaaggtcaagtggttgctgtcaaaatcatcccaaaatcgaagatgacaactgcaattgctatagaagatgtgagaagggaagtgaaaattctacaggctttatctggacataagaatctggtacaattctatgatgcatttgaggacaatgcaaacgtctacattgcaatggagctatgtgaaggtggtgagcttcttgacagaatactagcaaggggagggaaatactcagagaatgacgcaaaaccagtgattatacaaattctgaatgtggtagctttctgtcatttccaaggagttgttcatcgagaccttaaaccagagaacttcttgtacacttccaaggaggagaattctcagcttaaagcgatagactttggcttatcagactttgtcagaccagatgagagactaaacgatatagtgggaagtgcatactatgtagctcccgaagttctacacagatcatatacaacagaagcggatgtgtggagcatcggagtcatagcatacattctactatgtggtagccgtccgttttgggcaagaactgaatccggaatttttagagctgttcttaaagctgacccgagtttcgatgaacctccttggcccttcttgtcttctgacgctaaagactttgttaagcggttattgtttaaggatccccggcgaagaatgtcagcctcccaagccttgatgcatccttggatccgagcttataatacggacatgaatatccctttcgatatcttgatctttaggcagatgaaggcgtacttgcgatcttcttcattacgcaaagctgctttgagggcgctatcgaagacgttaatcaaggatgaaattctttacctgaaaactcaattttctcttctcgcaccaaacaaagatggcctaatcacaatggataccattagaatggcacttgcaagcaatgcaacagaagcaatgaaagaatctcggatcccagagtttcttgctttgctaaatggacttcaatacagaggaatggattttgaagagttttgtgcagctgctataaacgttcatcagcacgagtcgcttgattgttgggaacagagcattcgacatgcttatgagcttttcgacaagaatggaaaccgagctattgtcatcgaagaacttgcctctgaacttggtgttggaccatctataccggtacattcagttctacatgattggatcagacacactgatggaaagcttagcttcttcgggtttgttaaactgttacatggagtctctgttcgagcctcggggaaaactacccggtga

SEQ ID NO: 79592 - protein, 606 aa, Arabidopsis thaliana
  peptide (1)..(606): Ceres Seq. ID no. 12652025
  misc_feature (150)..(412): Pfam Name: Protein kinase domain Pfam Description: Protein kinase domain
  misc_feature (1)..(606): Homolog of NCBI NO: 15230288 NR Description: CDPK-related kinase; protein id: At3g19100.1, by cDNA: gi_16604465, supported by cDNA: gi_16904215, supported
  misc_feature (6)..(606): Homolog of NCBI NO: 5020368 NR Description: CDPK-related kinase 2 [Arabidopsis thaliana]
  misc_feature (1)..(599): Homolog of NCBI NO: 15229785 NR Description: CDPK-related protein kinase; protein id: supported by cDNA: gi_16904213 [Arabidopsis thaliana]
  misc_feature (1)..(599): Homolog of NCBI NO: 2154715 NR Description: CDPK-related protein kinase [Arabidopsis thaliana]
  misc_feature (1)..(603): Homolog of NCBI NO: 16904226 NR Description: calcium/calmodulin-dependent protein kinase CaMK3
  misc_feature (1)..(603): Homolog of NCBI NO: 1706130 NR Description: CDPK-related protein kinase (PK421)
  misc_feature (1)..(603): Homolog of NCBI NO: 33146627 NR Description: putative CDPK-related protein kinase [Oryza
  misc_feature (43)..(603): Homolog of NCBI NO: 23237898 NR Description: putative calcium/calmodulin-dependent protein
  misc_feature (31)..(604): Homolog of NCBI NO: 14133874 NR Description: CaMK1 [Oryza sativa]
  misc_feature (41)..(603): Homolog of NCBI NO: 15229002 NR Description: calcium-dependent protein kinase-like; protein id:
MGGCTSKPSTSSGRPNPFAPGNDYPQIDDFAPDHPGKSPIPTPSAAKASPFFPFYTPSPARHRRNKSRDVGGGGESKSLTSTPLRQLRRAFHPPSPAKHIRAALRRRKGKKEAALSGVTQLTTEVPQREEEEEVGLDKRFGFSKEFHSRVELGEEIGRGHFGYTCSAKFKKGELKGQVVAVKIIPKSKMTTAIAIEDVRREVKILQALSGHKNLVQFYDAFEDNANVYIAMELCEGGELLDRILARGGKYSENDAKPVIIQILNVVAFCHFQGVVHRDLKPENFLYTSKEENSQLKAIDFGLSDFVRPDERLNDIVGSAYYVAPEVLHRSYTTEADVWSIGVIAYILLCGSRPFWARTESGIFRAVLKADPSFDEPPWPFLSSDAKDFVKRLLFKDPRRRMSASQALMHPWIRAYNTDMNIPFDILIFRQMKAYLRSSSLRKAALRALSKTLIKDEILYLKTQFSLLAPNKDGLITMDTIRMALASNATEAMKESRIPEFLALLNGLQYRGMDFEEFCAAAINVHQHESLDCWEQSIRHAYELFDKNGNRAIVIEELASELGVGPSIPVHSVLHDWIRHTDGKLSFFGFVKLLHGVSVRASGKTTR

SEQ ID NO: 79593 - protein, 418 aa, Arabidopsis thaliana
  peptide (1)..(418): Ceres Seq. ID no. 12652026
  misc_feature (1)..(224): Pfam Name: Protein kinase domain Pfam Description: Protein kinase domain
  misc_feature (1)..(418): Homolog of NCBI NO: 15230288 NR Description: CDPK-related kinase; protein id: At3g19100.1, by cDNA: gi_16604465, supported by cDNA: gi_16904215, supported
  misc_feature (1)..(418): Homolog of NCBI NO: 5020368 NR Description: CDPK-related kinase 2 [Arabidopsis thaliana]
  misc_feature (1)..(411): Homolog of NCBI NO: 15229785 NR Description: CDPK-related protein kinase; protein id: supported by cDNA: gi_16904213 [Arabidopsis thaliana]
  misc_feature (1)..(411): Homolog of NCBI NO: 2154715 NR Description: CDPK-related protein kinase [Arabidopsis thaliana]
  misc_feature (1)..(415): Homolog of NCBI NO: 16904226 NR Description: calcium/calmodulin-dependent protein kinase CaMK3
  misc_feature (1)..(415): Homolog of NCBI NO: 1706130 NR Description: CDPK-related protein kinase (PK421)
  misc_feature (1)..(415): Homolog of NCBI NO: 33146627 NR Description: putative CDPK-related protein kinase [Oryza
  misc_feature (1)..(415): Homolog of NCBI NO: 23237898 NR Description: putative calcium/calmodulin-dependent protein
  misc_feature (1)..(416): Homolog of NCBI NO: 14133874 NR Description: CaMK1 [Oryza sativa]
  misc_feature (1)..(415): Homolog of NCBI NO: 15229002 NR Description: calcium-dependent protein kinase-like; protein id:
MTTAIAIEDVRREVKILQALSGHKNLVQFYDAFEDNANVYIAMELCEGGELLDRILARGGKYSENDAKPVIIQILNVVAFCHFQGVVHRDLKPENFLYTSKEENSQLKAIDFGLSDFVRPDERLNDIVGSAYYVAPEVLHRSYTTEADVWSIGVIAYILLCGSRPFWARTESGIFRAVLKADPSFDEPPWPFLSSDAKDFVKRLLFKDPRRRMSASQALMHPWIRAYNTDMNIPFDILIFRQMKAYLRSSSLRKAALRALSKTLIKDEILYLKTQFSLLAPNKDGLITMDTIRMALASNATEAMKESRIPEFLALLNGLQYRGMDFEEFCAAAINVHQHESLDCWEQSIRHAYELFDKNGNRAIVIEELASELGVGPSIPVHSVLHDWIRHTDGKLSFFGFVKLLHGVSVRASGKTTR

SEQ ID NO: 79594 - protein, 376 aa, Arabidopsis thaliana
  peptide (1)..(376): Ceres Seq. ID no. 12652027
  misc_feature (1)..(182): Pfam Name: Protein kinase domain Pfam Description: Protein kinase domain
  misc_feature (1)..(376): Homolog of NCBI NO: 15230288 NR Description: CDPK-related kinase; protein id: At3g19100.1, by cDNA: gi_16604465, supported by cDNA: gi_16904215, supported
  misc_feature (1)..(376): Homolog of NCBI NO: 5020368 NR Description: CDPK-related kinase 2 [Arabidopsis thaliana]
  misc_feature (1)..(369): Homolog of NCBI NO: 15229785 NR Description: CDPK-related protein kinase; protein id: supported by cDNA: gi_16904213 [Arabidopsis thaliana]
  misc_feature (1)..(369): Homolog of NCBI NO: 2154715 NR Description: CDPK-related protein kinase [Arabidopsis thaliana]
  misc_feature (1)..(373): Homolog of NCBI NO: 16904226 NR Description: calcium/calmodulin-dependent protein kinase CaMK3
  misc_feature (1)..(373): Homolog of NCBI NO: 1706130 NR Description: CDPK-related protein kinase (PK421)
  misc_feature (1)..(373): Homolog of NCBI NO: 33146627 NR Description: putative CDPK-related protein kinase [Oryza
  misc_feature (1)..(373): Homolog of NCBI NO: 23237898 NR Description: putative calcium/calmodulin-dependent protein
  misc_feature (1)..(374): Homolog of NCBI NO: 14133874 NR Description: CaMK1 [Oryza sativa]
  misc_feature (1)..(373): Homolog of NCBI NO: 15229002 NR Description: calcium-dependent protein kinase-like; protein id:
MELCEGGELLDRILARGGKYSENDAKPVIIQILNVVAFCHFQGVVHRDLKPENFLYTSKEENSQLKAIDFGLSDFVRPDERLNDIVGSAYYVAPEVLHRSYTTEADVWSIGVIAYILLCGSRPFWARTESGIFRAVLKADPSFDEPPWPFLSSDAKDFVKRLLFKDPRRRMSASQALMHPWIRAYNTDMNIPFDILIFRQMKAYLRSSSLRKAALRALSKTLIKDEILYLKTQFSLLAPNKDGLITMDTIRMALASNATEAMKESRIPEFLALLNGLQYRGMDFEEFCAAAINVHQHESLDCWEQSIRHAYELFDKNGNRAIVIEELASELGVGPSIPVHSVLHDWIRHTDGKLSFFGFVKLLHGVSVRASGKTTR

SEQ ID NO: 79595 - DNA, 948 bp, Arabidopsis thaliana
  misc_feature (1)..(948): Ceres Seq. ID no. 12652035
  misc_feature: MA Experiment ID: 20000264 Result: Up-regulated in Transcription
  misc_feature: MA Experiment 20000264 PARAMETER Experiment Name: At_Open_Flower_P Parameter: Age (day) Value: 21
  misc_feature: MA Experiment 20000264 PARAMETER Experiment Name: At_Open_Flower_P Parameter: Plant Line Value: WS
  misc_feature: MA Experiment 20000264 PARAMETER Experiment Name: At_Open_Flower_P Parameter: Tissue Value: Open Flower vs. Whole Plant
  misc_feature: MA Experiment ID: 20000794 Result: Up-regulated in Transcription
  misc_feature: MA Experiment 20000794 PARAMETER Experiment Name: At_Petals_P Parameter: Age (day) Value: 23-25 days
  misc_feature: MA Experiment 20000794 PARAMETER Experiment Name: At_Petals_P Parameter: Plant Line Value: WS
  misc_feature: MA Experiment 20000794 PARAMETER Experiment Name: At_Petals_P Parameter: Tissue Value: Petals vs. Whole plant
  misc_feature: MA Experiment ID: 20001558 Result: Down-regulated in Transcription
  misc_feature: MA Experiment 20001558 PARAMETER Experiment Name: At_Drought_Soil_Dry_P Parameter: Age (day) Value: 27
  misc_feature: MA Experiment 20001558 PARAMETER Experiment Name: At_Drought_Soil_Dry_P Parameter: Organism Value: A. thaliana
  misc_feature: MA Experiment 20001558 PARAMETER Experiment Name: At_Drought_Soil_Dry_P Parameter: Plant Line Value: WS
  misc_feature: MA Experiment 20001558 PARAMETER Experiment Name: At_Drought_Soil_Dry_P Parameter: Post Timepoint (hr) Value: 6
  misc_feature: MA Experiment 20001558 PARAMETER Experiment Name: At_Drought_Soil_Dry_P Parameter: Post-Treatment Value: Re-Water vs. No Drought
  misc_feature: MA Experiment 20001558 PARAMETER Experiment Name: At_Drought_Soil_Dry_P Parameter: Timepoint (day) Value: 13
  misc_feature: MA Experiment 20001558 PARAMETER Experiment Name: At_Drought_Soil_Dry_P Parameter: Treatment Value: Drought vs. No Drought
  misc_feature: MA Experiment ID: 20001904 Result: Down-regulated in Transcription
  misc_feature: MA Experiment 20001904 PARAMETER Experiment Name: At_Drought_Reproduction_P Parameter: Age (day) Value: 37
  misc_feature: MA Experiment 20001904 PARAMETER Experiment Name: At_Drought_Reproduction_P Parameter: Organism Value: A. thaliana
  misc_feature: MA Experiment 20001904 PARAMETER Experiment Name: At_Drought_Reproduction_P Parameter: Plant Line Value: WS
  misc_feature: MA Experiment 20001904 PARAMETER Experiment Name: At_Drought_Reproduction_P Parameter: Timepoint (day) Value: 7
  misc_feature: MA Experiment 20001904 PARAMETER Experiment Name: At_Drought_Reproduction_P Parameter: Tissue Value: Rosettes
  misc_feature: MA Experiment 20001904 PARAMETER Experiment Name: At_Drought_Reproduction_P Parameter: Treatment Value: Drought vs. No Drought
atggaatctgatctaaccacagagcatcatctaccattcatccgaattcataagaacggccgagtcgagcggcttagcggcaacgacatcaaaccaacgtctttaaacccacaaaacgatgtcgtttcgaaagacgtcatgtactcatcggaccacaacctctccgtccgtatgtttctccccaacaaatctagaaaactcgacaccgccggtaacaaaatacctctactcatctactttcacggcggagcttacatcatacaatctcctttctctccggtttaccataactacctcacggaggttgttataaccgctaactgcctagccgtgtcggttcagtaccgtcttgcgccagagcatccggttccggcggcttacgacgattcatggtctgcgattcagtggatcttttctcattctgatgattggattaatgaatacgctgatttcgacagagtttttatcgccggagatagtgccggagccaatatatcgcatcacatgggaataagagctggtaaggagaagcttagccctacaatcaaagggattgttatggtgcatccaggtttttgggggaaagaaccgatcgacgaacacgatgtacaagacggagaagtcagaaacaagatcgcatatatttgggaaaatatcgttagcccgaatagtgttgatggagtgaatgatccgtggtttaatgttgttggatccggatcggatgtttccgagatgggatgtgaaaaggttttggttgcggttgccggaaaagatgtgttttggcggcaaggattggcttatgcggcgaagctggagaagagtcagtggaaaggaagtgttgaggtgattgaggaagaagaggaaggacactgcttccatctccataaccataattctcaaaatgcttcgaaattgatgcagaagtttttggagtttatcataagttga

SEQ ID NO: 79596 - protein, 315 aa, Arabidopsis thaliana
  peptide (1)..(315): Ceres Seq. ID no. 12652036
  misc_feature (47)..(99): Pfam Name: Carboxylesterase Pfam Description: Carboxylesterase
  misc_feature (1)..(315): Homolog of NCBI NO: 15222791 NR Description: hypothetical protein; protein id: At1g49640.1
  misc_feature (3)..(313): Homolog of NCBI NO: 18402731 NR Description: expressed protein; protein id: At1g49650.1, by cDNA: 12638. [Arabidopsis thaliana]
  misc_feature (3)..(313): Homolog of NCBI NO: 21537287 NR Description: putative esterase [Arabidopsis thaliana]
  misc_feature (1)..(314): Homolog of NCBI NO: 15222795 NR Description: unknown protein; protein id: At1g49660.1
  misc_feature (1)..(313): Homolog of NCBI NO: 18086341 NR Description: AT3g48690/T8P19_200 [Arabidopsis thaliana]
  misc_feature (1)..(313): Homolog of NCBI NO: 15228425 NR Description: putative protein; protein id: At3g48690.1, by cDNA: gi_18086340 [Arabidopsis thaliana]
  misc_feature (1)..(313): Homolog of NCBI NO: 15228426 NR Description: putative protein; protein id: At3g48700.1
  misc_feature (12)..(313): Homolog of NCBI NO: 15227669 NR Description: putative esterase; protein id: At2g03550.1
  misc_feature (12)..(313): Homolog of NCBI NO: 28393060 NR Description: putative esterase [Arabidopsis thaliana]
  misc_feature (1)..(313): Homolog of NCBI NO: 15221975 NR Description: hypothetical protein; protein id: At1g19190.1
MESDLTTEHHLPFIRIHKNGRVERLSGNDIKPTSLNPQNDVVSKDVMYSSDHNLSVRMFLPNKSRKLDTAGNKIPLLIYFHGGAYIIQSPFSPVYHNYLTEVVITANCLAVSVQYRLAPEHPVPAAYDDSWSAIQWIFSHSDDWINEYADFDRVFIAGDSAGANISHHMGIRAGKEKLSPTIKGIVMVHPGFWGKEPIDEHDVQDGEVRNKIAYIWENIVSPNSVDGVNDPWFNVVGSGSDVSEMGCEKVLVAVAGKDVFWRQGLAYAAKLEKSQWKGSVEVIEEEEEGHCFHLHNHNSQNASKLMQKFLEFIIS

SEQ ID NO: 79597 - protein, 269 aa, Arabidopsis thaliana
  peptide (1)..(269): Ceres Seq. ID no. 12652037
  misc_feature (1)..(53): Pfam Name: Carboxylesterase Pfam Description: Carboxylesterase
  misc_feature (1)..(269): Homolog of NCBI NO: 15222791 NR Description: hypothetical protein; protein id: At1g49640.1
  misc_feature (1)..(267): Homolog of NCBI NO: 18402731 NR Description: expressed protein; protein id: At1g49650.1, by cDNA: 12638. [Arabidopsis thaliana]
  misc_feature (1)..(267): Homolog of NCBI NO: 21537287 NR Description: putative esterase [Arabidopsis thaliana]
  misc_feature (1)..(268): Homolog of NCBI NO: 15222795 NR Description: unknown protein; protein id: At1g49660.1
  misc_feature (1)..(267): Homolog of NCBI NO: 18086341 NR Description: AT3g48690/T8P19_200 [Arabidopsis thaliana]
  misc_feature (1)..(267): Homolog of NCBI NO: 15228425 NR Description: putative protein; protein id: At3g48690.1, by cDNA: gi_18086340 [Arabidopsis thaliana]
  misc_feature (1)..(267): Homolog of NCBI NO: 15228426 NR Description: putative protein; protein id: At3g48700.1
  misc_feature (1)..(267): Homolog of NCBI NO: 15227669 NR Description: putative esterase; protein id: At2g03550.1
  misc_feature (1)..(267): Homolog of NCBI NO: 28393060 NR Description: putative esterase [Arabidopsis thaliana]
  misc_feature (1)..(267): Homolog of NCBI NO: 15221975 NR Description: hypothetical protein; protein id: At1g19190.1
MYSSDHNLSVRMFLPNKSRKLDTAGNKIPLLIYFHGGAYIIQSPFSPVYHNYLTEVVITANCLAVSVQYRLAPEHPVPAAYDDSWSAIQWIFSHSDDWINEYADFDRVFIAGDSAGANISHHMGIRAGKEKLSPTIKGIVMVHPGFWGKEPIDEHDVQDGEVRNKIAYIWENIVSPNSVDGVNDPWFNVVGSGSDVSEMGCEKVLVAVAGKDVFWRQGLAYAAKLEKSQWKGSVEVIEEEEEGHCFHLHNHNSQNASKLMQKFLEFIIS

SEQ ID NO: 79598 - protein, 258 aa, Arabidopsis thaliana
  peptide (1)..(258): Ceres Seq. ID no. 12652038
  misc_feature (1)..(42): Pfam Name: Carboxylesterase Pfam Description: Carboxylesterase
  misc_feature (1)..(258): Homolog of NCBI NO: 15222791 NR Description: hypothetical protein; protein id: At1g49640.1
  misc_feature (1)..(256): Homolog of NCBI NO: 18402731 NR Description: expressed protein; protein id: At1g49650.1, by cDNA: 12638. [Arabidopsis thaliana]
  misc_feature (1)..(256): Homolog of NCBI NO: 21537287 NR Description: putative esterase [Arabidopsis thaliana]
  misc_feature (1)..(257): Homolog of NCBI NO: 15222795 NR Description: unknown protein; protein id: At1g49660.1
  misc_feature (1)..(256): Homolog of NCBI NO: 18086341 NR Description: AT3g48690/T8P19_200 [Arabidopsis thaliana]
  misc_feature (1)..(256): Homolog of NCBI NO: 15228425 NR Description: putative protein; protein id: At3g48690.1, by cDNA: gi_18086340 [Arabidopsis thaliana]
  misc_feature (1)..(256): Homolog of NCBI NO: 15228426 NR Description: putative protein; protein id: At3g48700.1
  misc_feature (1)..(256): Homolog of NCBI NO: 15227669 NR Description: putative esterase; protein id: At2g03550.1
  misc_feature (1)..(256): Homolog of NCBI NO: 28393060 NR Description: putative esterase [Arabidopsis thaliana]
  misc_feature (1)..(256): Homolog of NCBI NO: 15221975 NR Description: hypothetical protein; protein id: At1g19190.1
MFLPNKSRKLDTAGNKIPLLIYFHGGAYIIQSPFSPVYHNYLTEVVITANCLAVSVQYRLAPEHPVPAAYDDSWSAIQWIFSHSDDWINEYADFDRVFIAGDSAGANISHHMGIRAGKEKLSPTIKGIVMVHPGFWGKEPIDEHDVQDGEVRNKIAYIWENIVSPNSVDGVNDPWFNVVGSGSDVSEMGCEKVLVAVAGKDVFWRQGLAYAAKLEKSQWKGSVEVIEEEEEGHCFHLHNHNSQNASKLMQKFLEFIIS

SEQ ID NO: 79599 - DNA, 2204 bp, Arabidopsis thaliana
  misc_feature (1)..(2204): Ceres Seq. ID no. 12652041
  misc_feature: MA Experiment ID: 20000173 Result: Down-regulated in Transcription
  misc_feature: MA Experiment 20000173 PARAMETER Experiment Name: At_42deg_Heat_P Parameter: Age (day) Value: 14
  misc_feature: MA Experiment 20000173 PARAMETER Experiment Name: At_42deg_Heat_P Parameter: Organism Value: A. thaliana
  misc_feature: MA Experiment 20000173 PARAMETER Experiment Name: At_42deg_Heat_P Parameter: Plant Line Value: WS
  misc_feature: MA Experiment 20000173 PARAMETER Experiment Name: At_42deg_Heat_P Parameter: Temperature (deg C) Value: 42 vs. 22
  misc_feature: MA Experiment 20000173 PARAMETER Experiment Name: At_42deg_Heat_P Parameter: Timepoint (hr) Value: 6
  misc_feature: MA Experiment 20000173 PARAMETER Experiment Name: At_42deg_Heat_P Parameter: Tissue Value: Aerial
  misc_feature: MA Experiment ID: 20000437 Result: Down-regulated in Transcription
  misc_feature: MA Experiment 20000437 PARAMETER Experiment Name: At_Drought_P Parameter: Age (day) Value: 8
  misc_feature: MA Experiment 20000437 PARAMETER Experiment Name: At_Drought_P Parameter: Organism Value: A. thaliana
  misc_feature: MA Experiment 20000437 PARAMETER Experiment Name: At_Drought_P Parameter: Plant Line Value: WS
  misc_feature: MA Experiment 20000437 PARAMETER Experiment Name: At_Drought_P Parameter: Timepoint (hr) Value: 24
  misc_feature: MA Experiment 20000437 PARAMETER Experiment Name: At_Drought_P Parameter: Tissue Value: Whole Plant
  misc_feature: MA Experiment 20000437 PARAMETER Experiment Name: At_Drought_P Parameter: Treatment Value: Drought vs. No Drought
  misc_feature: MA Experiment ID: 20000438 Result: Up-regulated in Transcription
  misc_feature: MA Experiment 20000438 PARAMETER Experiment Name: At_Shoots__P Parameter: Age (day) Value: 14
  misc_feature: MA Experiment 20000438 PARAMETER Experiment Name: At_Shoots__P Parameter: Tissue Value: Shoots vs. Whole Plant
  misc_feature: MA Experiment ID: 20000794 Result: Down-regulated in Transcription
  misc_feature: MA Experiment 20000794 PARAMETER Experiment Name: At_Petals_P Parameter: Age (day) Value: 23-25 days
  misc_feature: MA Experiment 20000794 PARAMETER Experiment Name: At_Petals_P Parameter: Plant Line Value: WS
  misc_feature: MA Experiment 20000794 PARAMETER Experiment Name: At_Petals_P Parameter: Tissue Value: Petals vs. Whole plant
  misc_feature: MA Experiment ID: 20001247 Result: Up-regulated in Transcription
  misc_feature: MA Experiment 20001247 PARAMETER Experiment Name: At_Far-red-induction_P Parameter: Age (day) Value: 7
  misc_feature: MA Experiment 20001247 PARAMETER Experiment Name: At_Far-red-induction_P Parameter: Light Value: Far-red vs. White
  misc_feature: MA Experiment 20001247 PARAMETER Experiment Name: At_Far-red-induction_P Parameter: Organism Value: A. thaliana
  misc_feature: MA Experiment 20001247 PARAMETER Experiment Name: At_Far-red-induction_P Parameter: Plant Line Value: Columbia
  misc_feature: MA Experiment 20001247 PARAMETER Experiment Name: At_Far-red-induction_P Parameter: Timepoint (hr) Value: 1
  misc_feature: MA Experiment 20001247 PARAMETER Experiment Name: At_Far-red-induction_P Parameter: Tissue Value: Whole Plant
  misc_feature: MA Experiment ID: 20001554 Result: Down-regulated in Transcription
  misc_feature: MA Experiment 20001554 PARAMETER Experiment Name: At_Drought_Soil_Dry_P Parameter: Age (day) Value: 21
  misc_feature: MA Experiment 20001554 PARAMETER Experiment Name: At_Drought_Soil_Dry_P Parameter: Organism Value: A. thaliana
  misc_feature: MA Experiment 20001554 PARAMETER Experiment Name: At_Drought_Soil_Dry_P Parameter: Plant Line Value: WS
  misc_feature: MA Experiment 20001554 PARAMETER Experiment Name: At_Drought_Soil_Dry_P Parameter: Post Timepoint (hr) Value: None
  misc_feature: MA Experiment 20001554 PARAMETER Experiment Name: At_Drought_Soil_Dry_P Parameter: Post-Treatment Value: None
  misc_feature: MA Experiment 20001554 PARAMETER Experiment Name: At_Drought_Soil_Dry_P Parameter: Timepoint (day) Value: 7
  misc_feature: MA Experiment 20001554 PARAMETER Experiment Name: At_Drought_Soil_Dry_P Parameter: Treatment Value: Drought vs. No Drought
  misc_feature: MA Experiment ID: 20001555 Result: Down-regulated in Transcription
  misc_feature: MA Experiment 20001555 PARAMETER Experiment Name: At_Drought_Soil_Dry_P Parameter: Age (day) Value: 24
  misc_feature: MA Experiment 20001555 PARAMETER Experiment Name: At_Drought_Soil_Dry_P Parameter: Organism Value: A. thaliana
  misc_feature: MA Experiment 20001555 PARAMETER Experiment Name: At_Drought_Soil_Dry_P Parameter: Plant Line Value: WS
  misc_feature: MA Experiment 20001555 PARAMETER Experiment Name: At_Drought_Soil_Dry_P Parameter: Post Timepoint (hr) Value: None
  misc_feature: MA Experiment 20001555 PARAMETER Experiment Name: At_Drought_Soil_Dry_P Parameter: Post-Treatment Value: None
  misc_feature: MA Experiment 20001555 PARAMETER Experiment Name: At_Drought_Soil_Dry_P Parameter: Timepoint (day) Value: 10
  misc_feature: MA Experiment 20001555 PARAMETER Experiment Name: At_Drought_Soil_Dry_P Parameter: Treatment Value: Drought vs. No Drought
  misc_feature: MA Experiment ID: 20001558 Result: Up-regulated in Transcription
  misc_feature: MA Experiment 20001558 PARAMETER Experiment Name: At_Drought_Soil_Dry_P Parameter: Age (day) Value: 27
  misc_feature: MA Experiment 20001558 PARAMETER Experiment Name: At_Drought_Soil_Dry_P Parameter: Organism Value: A. thaliana
  misc_feature: MA Experiment 20001558 PARAMETER Experiment Name: At_Drought_Soil_Dry_P Parameter: Plant Line Value: WS
  misc_feature: MA Experiment 20001558 PARAMETER Experiment Name: At_Drought_Soil_Dry_P Parameter: Post Timepoint (hr) Value: 6
  misc_feature: MA Experiment 20001558 PARAMETER Experiment Name: At_Drought_Soil_Dry_P Parameter: Post-Treatment Value: Re-Water vs. No Drought
  misc_feature: MA Experiment 20001558 PARAMETER Experiment Name: At_Drought_Soil_Dry_P Parameter: Timepoint (day) Value: 13
  misc_feature: MA Experiment 20001558 PARAMETER Experiment Name: At_Drought_Soil_Dry_P Parameter: Treatment Value: Drought vs. No Drought
  misc_feature: MA Experiment ID: 20001560 Result: Up-regulated in Transcription
  misc_feature: MA Experiment 20001560 PARAMETER Experiment Name: At_Drought_Soil_Dry_P Parameter: Age (day) Value: 28
  misc_feature: MA Experiment 20001560 PARAMETER Experiment Name: At_Drought_Soil_Dry_P Parameter: Organism Value: A. thaliana
  misc_feature: MA Experiment 20001560 PARAMETER Experiment Name: At_Drought_Soil_Dry_P Parameter: Plant Line Value: WS
  misc_feature: MA Experiment 20001560 PARAMETER Experiment Name: At_Drought_Soil_Dry_P Parameter: Post Timepoint (hr) Value: None
  misc_feature: MA Experiment 20001560 PARAMETER Experiment Name: At_Drought_Soil_Dry_P Parameter: Post-Treatment Value: None
  misc_feature: MA Experiment 20001560 PARAMETER Experiment Name: At_Drought_Soil_Dry_P Parameter: Timepoint (day) Value: 14
  misc_feature: MA Experiment 20001560 PARAMETER Experiment Name: At_Drought_Soil_Dry_P Parameter: Treatment Value: Drought vs. No Drought
ctctctggttgctcttggccatggttgtgaatagtcaagctttcttgttggcattaattgcattacttgctacccaattgccttcactaatggctgcagattgtccattagatttcagtggatcaaatttcactctagtagctactgtgtgctccaacataaccaacagaggcaaatgttgccgctacatgaacgcttttgttgcggtgtccgtggctcgttacgcgaacttgtcaactaatcttggagtcacatcagatttatctgaaacctgcattgcttccatctctagagccatggagggctacggagtctcgagaaacgccactagtttctgcggtttgggaaccaagatccttgttaagtatgactgtgacggtcgaaccactgttacacaaatgcatcagtctccgggatttggacatgtttcaagaaactgcagactcccattttcgccgggacaccaatgcagaaagtgtttgaactctggcatcacttaccttcgtaatctcataggtgcagagactaataacattactctgtgtacttgtcgtgatgcgacttatgctacattagcaagccgaatagacgatacatcagctcttgaactccttagttgtttctttcaagtgacagagcttaacattccttcagagtcattttcaccagtggcaagtccagaaccttctccaagcacggttggtggtattagcccaagcaacagtgattctcaaatgactacaagtagaagcaccaatccatatcacttaacaatggttccaaccattgggattgttgttacagctgttgctcttacgatgcttgtagtcttggtaattcttatccgtagaaagaaccgggaactggatgaatctgagagcttggatagaaagtcaacaaaatcagttccttcttcccttcctgtattcaagattcatgaagatgattcttcctcagctttcagaaagttcagctacaaggaaatgacaaatgcaacaaatgatttcaacacggttatcggtcagggaggttttggtactgtttacaaagccgagttcaacgatggtctgattgcagcggtaaaaaagatgaacaaagtctctgaacaagctgaacaagatttttgtagagagatagggcttttagctaagctgcatcaccgtaacctcgttgctttgaaaggcttttgcatcaacaagaaagaaaggttcttggtctacgactatatgaaaaatggcagcttaaaagatcacttacatgccattggaaagcctccacctagttggggaacaagaatgaaaattgcaattgatgtggcaaatgctttggtaaatattccaaagtctttcatctacattttctctgtaaactgatttgataatatatcttttacagtttttggttcttggctgcacgttgttctctcctccaggaatatcttcatttctactgtgatcctcctctctgtcatagagatattaaatcaagcaatatattactcgatgagaacttcgtcgctaagctttcagattttggccttgcacattcgtctagagatggctctgtttgctttgagcctgtgaataccgatatccgtggaactccaggttatgtagatccggaatatgtagtaacgcaagagttgacagagaagagtgatgtgtacagctacggagttgtgttgctggagctcataaccgggagaagagcagttgatgaaggtaggaaccttgtggaaatgtctcagcggtttttgttggcgaaatcaaaacacctcgagttggtagacccgagaatcaaagactctattaatgatgctggaggaaaacaacttgatgcagttgtgacggttgtgagattgtgtaccgagaaagaaggccggtctaggccatcaattaagcaagtcttgaggctgttgtgtgaaagctgtgatccggtgcatagcgcatttgctaaagcggttgaagaagagataggctgggatagtaggaagagaagcaatttgagaattcaaagaggtgattcccggatctttggtccatcgtctagtactacttccaggtcacattacagccggagtttacctcactctccaattaacggattttctttctgagttagtcacatcttctctatagctaaatctgaaagttttacatatgtttatgaaaattatgaattcatattgaaagctctcatactct

SEQ ID NO: 79600 - protein, 456 aa, Arabidopsis thaliana
  peptide (1)..(456): Ceres Seq. ID no. 12652042
  misc_feature (7)..(456): Homolog of NCBI NO: 18402761 NR Description: expressed protein; protein id: At1g49730.1,
  misc_feature (7)..(442): Homolog of NCBI NO: 18402188 NR Description: unknown protein; protein id: At3g19300.1 thaliana] >gi|11994452|dbj|BAB02454.1| contains similarity to
  misc_feature (3)..(442): Homolog of NCBI NO: 38345516 NR Description: OSJNBa0039K24.19 [Oryza sativa (japonica
  misc_feature (3)..(215): Homolog of NCBI NO: 5777621 NR Description: CAA30379.1 protein [Oryza sativa]
  misc_feature (278)..(402): Homolog of NCBI NO: 5777621 NR Description: CAA30379.1 protein [Oryza sativa]
  misc_feature (328)..(443): Homolog of NCBI NO: 34909276 NR Description: P0454H12.21 [Oryza sativa (japonica
  misc_feature (295)..(442): Homolog of NCBI NO: 8778594 NR Description: F5M15.3 [Arabidopsis thaliana]
  misc_feature (261)..(443): Homolog of NCBI NO: 11346408 NR Description: hypothetical protein T20L15.220 - Arabidopsis >gi|7329668|emb|CAB82765.1| putative protein [Arabidopsis
  misc_feature (261)..(443): Homolog of NCBI NO: 30679474 NR Description: leucine-rich repeat transmembrane protein kinase,
  misc_feature (232)..(442): Homolog of NCBI NO: 22328175 NR Description: coded for by A. thaliana cDNA R30513; protein id: supported by cDNA: gi_17381215 [Arabidopsis thaliana]
LWLLLAMVVNSQAFLLALIALLATQLPSLMAADCPLDFSGSNFTLVATVCSNITNRGKCCRYMNAFVAVSVARYANLSTNLGVTSDLSETCIASISRAMEGYGVSRNATSFCGLGTKILVKYDCDGRTTVTQMHQSPGFGHVSRNCRLPFSPGHQCRKCLNSGITYLRNLIGAETNNITLCTCRDATYATLASRIDDTSALELLSCFFQVTELNIPSESFSPVASPEPSPSTVGGISPSNSDSQMTTSRSTNPYHLTMVPTIGIVVTAVALTMLVVLVILIRRKNRELDESESLDRKSTKSVPSSLPVFKIHEDDSSSAFRKFSYKEMTNATNDFNTVIGQGGFGTVYKAEFNDGLIAAVKKMNKVSEQAEQDFCREIGLLAKLHHRNLVALKGFCINKKERFLVYDYMKNGSLKDHLHAIGKPPPSWGTRMKIAIDVANALVNIPKSFIYIFSVN

SEQ ID NO: 79601 - protein, 450 aa, Arabidopsis thaliana
  peptide (1)..(450): Ceres Seq. ID no. 12652043
  misc_feature (1)..(450): Homolog of NCBI NO: 18402761 NR Description: expressed protein; protein id: At1g49730.1,
  misc_feature (1)..(436): Homolog of NCBI NO: 18402188 NR Description: unknown protein; protein id: At3g19300.1 thaliana] >gi|11994452|dbj|BAB02454.1| contains similarity to
  misc_feature (1)..(436): Homolog of NCBI NO: 38345516 NR Description: OSJNBa0039K24.19 [Oryza sativa (japonica
  misc_feature (1)..(209): Homolog of NCBI NO: 5777621 NR Description: CAA30379.1 protein [Oryza sativa]
  misc_feature (272)..(396): Homolog of NCBI NO: 5777621 NR Description: CAA30379.1 protein [Oryza sativa]
  misc_feature (322)..(437): Homolog of NCBI NO: 34909276 NR Description: P0454H12.21 [Oryza sativa (japonica
  misc_feature (289)..(436): Homolog of NCBI NO: 8778594 NR Description: F5M15.3 [Arabidopsis thaliana]
  misc_feature (255)..(437): Homolog of NCBI NO: 11346408 NR Description: hypothetical protein T20L15.220 - Arabidopsis >gi|7329668|emb|CAB82765.1| putative protein [Arabidopsis
  misc_feature (255)..(437): Homolog of NCBI NO: 30679474 NR Description: leucine-rich repeat transmembrane protein kinase,
  misc_feature (226)..(436): Homolog of NCBI NO: 22328175 NR Description: coded for by A. thaliana cDNA R30513; protein id: supported by cDNA: gi_17381215 [Arabidopsis thaliana]
MVVNSQAFLLALIALLATQLPSLMAADCPLDFSGSNFTLVATVCSNITNRGKCCRYMNAFVAVSVARYANLSTNLGVTSDLSETCIASISRAMEGYGVSRNATSFCGLGTKILVKYDCDGRTTVTQMHQSPGFGHVSRNCRLPFSPGHQCRKCLNSGITYLRNLIGAETNNITLCTCRDATYATLASRIDDTSALELLSCFFQVTELNIPSESFSPVASPEPSPSTVGGISPSNSDSQMTTSRSTNPYHLTMVPTIGIVVTAVALTMLVVLVILIRRKNRELDESESLDRKSTKSVPSSLPVFKIHEDDSSSAFRKFSYKEMTNATNDFNTVIGQGGFGTVYKAEFNDGLIAAVKKMNKVSEQAEQDFCREIGLLAKLHHRNLVALKGFCINKKERFLVYDYMKNGSLKDHLHAIGKPPPSWGTRMKIAIDVANALVNIPKSFIYIFSVN

SEQ ID NO: 79602 - protein, 427 aa, Arabidopsis thaliana
  peptide (1)..(427): Ceres Seq. ID no. 12652044
  misc_feature (1)..(427): Homolog of NCBI NO: 18402761 NR Description: expressed protein; protein id: At1g49730.1,
  misc_feature (1)..(413): Homolog of NCBI NO: 18402188 NR Description: unknown protein; protein id: At3g19300.1 thaliana] >gi|11994452|dbj|BAB02454.1| contains similarity to
  misc_feature (1)..(413): Homolog of NCBI NO: 38345516 NR Description: OSJNBa0039K24.19 [Oryza sativa (japonica
  misc_feature (1)..(186): Homolog of NCBI NO: 5777621 NR Description: CAA30379.1 protein [Oryza sativa]
  misc_feature (249)..(373): Homolog of NCBI NO: 5777621 NR Description: CAA30379.1 protein [Oryza sativa]
  misc_feature (299)..(414): Homolog of NCBI NO: 34909276 NR Description: P0454H12.21 [Oryza sativa (japonica
  misc_feature (266)..(413): Homolog of NCBI NO: 8778594 NR Description: F5M15.3 [Arabidopsis thaliana]
  misc_feature (232)..(414): Homolog of NCBI NO: 11346408 NR Description: hypothetical protein T20L15.220 - Arabidopsis >gi|7329668|emb|CAB82765.1| putative protein [Arabidopsis
  misc_feature (232)..(414): Homolog of NCBI NO: 30679474 NR Description: leucine-rich repeat transmembrane protein kinase,
  misc_feature (203)..(413): Homolog of NCBI NO: 22328175 NR Description: coded for by A. thaliana cDNA R30513; protein id: supported by cDNA: gi_17381215 [Arabidopsis thaliana]
MAADCPLDFSGSNFTLVATVCSNITNRGKCCRYMNAFVAVSVARYANLSTNLGVTSDLSETCIASISRAMEGYGVSRNATSFCGLGTKILVKYDCDGRTTVTQMHQSPGFGHVSRNCRLPFSPGHQCRKCLNSGITYLRNLIGAETNNITLCTCRDATYATLASRIDDTSALELLSCFFQVTELNIPSESFSPVASPEPSPSTVGGISPSNSDSQMTTSRSTNPYHLTMVPTIGIVVTAVALTMLVVLVILIRRKNRELDESESLDRKSTKSVPSSLPVFKIHEDDSSSAFRKFSYKEMTNATNDFNTVIGQGGFGTVYKAEFNDGLIAAVKKMNKVSEQAEQDFCREIGLLAKLHHRNLVALKGFCINKKERFLVYDYMKNGSLKDHLHAIGKPPPSWGTRMKIAIDVANALVNIPKSFIYIFSVN

SEQ ID NO: 79603 - DNA, 1612 bp, Arabidopsis thaliana
  misc_feature (1)..(1612): Ceres Seq. ID no. 12652097
  misc_feature: MA Experiment ID: 20000173 Result: Down-regulated in Transcription
  misc_feature: MA Experiment 20000173 PARAMETER Experiment Name: At_42deg_Heat_P Parameter: Age (day) Value: 14
  misc_feature: MA Experiment 20000173 PARAMETER Experiment Name: At_42deg_Heat_P Parameter: Organism Value: A. thaliana
  misc_feature: MA Experiment 20000173 PARAMETER Experiment Name: At_42deg_Heat_P Parameter: Plant Line Value: WS
  misc_feature: MA Experiment 20000173 PARAMETER Experiment Name: At_42deg_Heat_P Parameter: Temperature (deg C) Value: 42 vs. 22
  misc_feature: MA Experiment 20000173 PARAMETER Experiment Name: At_42deg_Heat_P Parameter: Timepoint (hr) Value: 6
  misc_feature: MA Experiment 20000173 PARAMETER Experiment Name: At_42deg_Heat_P Parameter: Tissue Value: Aerial
  misc_feature: MA Experiment ID: 20000185 Result: Down-regulated in Transcription
  misc_feature: MA Experiment 20000185 PARAMETER Experiment Name: At_Roots__P Parameter: Age (day) Value: 7 vs. 21
  misc_feature: MA Experiment 20000185 PARAMETER Experiment Name: At_Roots__P Parameter: Organism Value: A. thaliana
  misc_feature: MA Experiment 20000185 PARAMETER Experiment Name: At_Roots__P Parameter: Tissue Value: Roots vs. Whole Plant
  misc_feature: MA Experiment ID: 20000234 Result: Down-regulated in Transcription
  misc_feature: MA Experiment 20000234 PARAMETER Experiment Name: At_Siliques_P Parameter: Age (day) Value: 21
  misc_feature: MA Experiment 20000234 PARAMETER Experiment Name: At_Siliques_P Parameter: Organism Value: A. thaliana
  misc_feature: MA Experiment 20000234 PARAMETER Experiment Name: At_Siliques_P Parameter: Plant Line Value: WS
  misc_feature: MA Experiment 20000234 PARAMETER Experiment Name: At_Siliques_P Parameter: Tissue Value: Less Than 5mm Siliques vs. Whole Plant
  misc_feature: MA Experiment ID: 20000235 Result: Down-regulated in Transcription
  misc_feature: MA Experiment 20000235 PARAMETER Experiment Name: At_Siliques_P Parameter: Age (day) Value: 21
  misc_feature: MA Experiment 20000235 PARAMETER Experiment Name: At_Siliques_P Parameter: Organism Value: A. thaliana
  misc_feature: MA Experiment 20000235 PARAMETER Experiment Name: At_Siliques_P Parameter: Plant Line Value: WS
  misc_feature: MA Experiment 20000235 PARAMETER Experiment Name: At_Siliques_P Parameter: Tissue Value: 5-10mm Siliques vs. Whole Plant
  misc_feature: MA Experiment ID: 20000438 Result: Down-regulated in Transcription
  misc_feature: MA Experiment 20000438 PARAMETER Experiment Name: At_Shoots__P Parameter: Age (day) Value: 14
  misc_feature: MA Experiment 20000438 PARAMETER Experiment Name: At_Shoots__P Parameter: Tissue Value: Shoots vs. Whole Plant
  misc_feature: MA Experiment ID: 20000439 Result: Down-regulated in Transcription
  misc_feature: MA Experiment 20000439 PARAMETER Experiment Name: At_Roots__P Parameter: Age (day) Value: 14 vs. 21
  misc_feature: MA Experiment 20000439 PARAMETER Experiment Name: At_Roots__P Parameter: Organism Value: A. thaliana
  misc_feature: MA Experiment 20000439 PARAMETER Experiment Name: At_Roots__P Parameter: Tissue Value: Roots vs. Whole Plant
acggcaaaaatacaaccccaaatctatccatctctctctctatctatcttttttttcctcggcaatggcggaagctaaacccagaaatctgagaatcgtgatgttccctttcatgggacaaggccatatcatcccgtttgtagctttagcccttcgtttagagaagattatgattatgaacagagccaacaaaaccaccatctctatgatcaatactccttcgaacatccccaaaatacgctccaatcttccacctgaatcctccataagtctcatagagttacctttcaacagctctgatcatggccttcctcacgacggcgagaatttcgattctcttccttactctctcgtcatcagccttcttgaagcttctaggtcgcttcgtgagccctttcgagacttcatgacgaagatcttgaaggaagaagggcagagctcggttatagtgatcggtgatttcttcttgggttggatcggtaaggtttgcaaagaggttggtgtttattcagtgatctttagtgcttctggtgcttttggtttaggttgttatagatccatatggttaaacttgccacataaagaaaccaaacaagatcagtttctcttagatgatttccctgaagcaggggagattgagaaaactcagttgaattctttcatgttagaagctgatggaaccgatgattggtctgttttcatgaagaagattatacctggatggtctgacttcgatggattcttgttcaacacggttgctgaaatcgatcagatgggattatcctacttccgtagaataaccggtgttccggtttggccagttgggccggttttgaagtctccggataagaaggtgggatcgaggtcgacagaggaagcagtgaagtcatggcttgactcaaaaccggaccattcggttgtgtacgtatgtttcggttcaatgaactcgattttgcaaacgcatatgttagaattggctatggcattagagagtagcgagaagaacttcatatgggtggtgaggccgcccataggtgtggaggtgaagagtgagtttgatgtgaaagggtatctaccggaaggatttgaggaaagaataacaagatcggaaagagggttacttgtgaagaaatgggcaccacaagttgatatattgtcacacaaggcaacatgtgtgtttttgagtcattgcggatggaactcgatactcgaatcacttagccacggtgtgccactgctcggatggcccatggcagccgagcagttcttcaattccatattgatggagaaacatattggggtatcggttgaggtggcgcgtgggaagagatgtgagatcaaatgtgatgacattgtttctaagatcaaactggtgatggaggagactgaagtagggaaagagattaggaagaaggctagagaggtgaaggagttagtgaggagagcaatggtagatggagttaaaggttcctccgtcattggtttggaagagtttcttgaccaagcaatggtcaagaaagtggagaattgagatagtagatggtatatgtaaacgtcttatttgaaatcacatattgatgaaatgaataaaaccatgtccggtaattatacc

SEQ ID NO: 79604 - protein, 509 aa, Arabidopsis thaliana
  peptide (1)..(509): Ceres Seq. ID no. 12652098
  misc_feature (22)..(509): Homolog of NCBI NO: 15239937 NR Description: glucosyltransferase -like protein; protein id: supported by cDNA: gi_18086350 [Arabidopsis thaliana]
  misc_feature (22)..(509): Homolog of NCBI NO: 18086351 NR Description: AT5g12890/T24H18_60 [Arabidopsis thaliana]
  misc_feature (29)..(499): Homolog of NCBI NO: 38344083 NR Description: OSJNBb0056F09.6 [Oryza sativa (japonica
  misc_feature (32)..(503): Homolog of NCBI NO: 38347037 NR Description: OSJNBb0067G11.12 [Oryza sativa (japonica
  misc_feature (32)..(490): Homolog of NCBI NO: 34015076 NR Description: glucosyltransferase-like protein [Crocus sativus]
  misc_feature (22)..(498): Homolog of NCBI NO: 38344094 NR Description: OSJNBb0056F09.17 [Oryza sativa (japonica
  misc_feature (29)..(392): Homolog of NCBI NO: 38344089 NR Description: OSJNBb0056F09.12 [Oryza sativa (japonica
  misc_feature (233)..(505): Homolog of NCBI NO: 38347000 NR Description: OSJNBb0058J09.1 [Oryza sativa (japonica
  misc_feature (33)..(167): Homolog of NCBI NO: 38347000 NR Description: OSJNBb0058J09.1 [Oryza sativa (japonica
  misc_feature (29)..(503): Homolog of NCBI NO: 15228034 NR Description: putative glucosyl transferase; protein id: supported by cDNA: gi_15028388, supported by cDNA: gi_19310660
RQKYNPKSIHLSLYLSFFSSAMAEAKPRNLRIVMFPFMGQGHIIPFVALALRLEKIMIMNRANKTTISMINTPSNIPKIRSNLPPESSISLIELPFNSSDHGLPHDGENFDSLPYSLVISLLEASRSLREPFRDFMTKILKEEGQSSVIVIGDFFLGWIGKVCKEVGVYSVIFSASGAFGLGCYRSIWLNLPHKETKQDQFLLDDFPEAGEIEKTQLNSFMLEADGTDDWSVFMKKIIPGWSDFDGFLFNTVAEIDQMGLSYFRRITGVPVWPVGPVLKSPDKKVGSRSTEEAVKSWLDSKPDHSVVYVCFGSMNSILQTHMLELAMALESSEKNFIWVVRPPIGVEVKSEFDVKGYLPEGFEERITRSERGLLVKKWAPQVDILSHKATCVFLSHCGWNSILESLSHGVPLLGWPMAAEQFFNSILMEKHIGVSVEVARGKRCEIKCDDIVSKIKLVMEETEVGKEIRKKAREVKELVRRAMVDGVKGSSVIGLEEFLDQAMVKKVEN

SEQ ID NO: 79605 - protein, 488 aa, Arabidopsis thaliana
  peptide (1)..(488): Ceres Seq. ID no. 12652099
  misc_feature (1)..(488): Homolog of NCBI NO: 15239937 NR Description: glucosyltransferase -like protein; protein id: supported by cDNA: gi_18086350 [Arabidopsis thaliana]
  misc_feature (1)..(488): Homolog of NCBI NO: 18086351 NR Description: AT5g12890/T24H18_60 [Arabidopsis thaliana]
  misc_feature (8)..(478): Homolog of NCBI NO: 38344083 NR Description: OSJNBb0056F09.6 [Oryza sativa (japonica
  misc_feature (11)..(482): Homolog of NCBI NO: 38347037 NR Description: OSJNBb0067G11.12 [Oryza sativa (japonica
  misc_feature (11)..(469): Homolog of NCBI NO: 34015076 NR Description: glucosyltransferase-like protein [Crocus sativus]
  misc_feature (1)..(477): Homolog of NCBI NO: 38344094 NR Description: OSJNBb0056F09.17 [Oryza sativa (japonica
  misc_feature (8)..(371): Homolog of NCBI NO: 38344089 NR Description: OSJNBb0056F09.12 [Oryza sativa (japonica
  misc_feature (212)..(484): Homolog of NCBI NO: 38347000 NR Description: OSJNBb0058J09.1 [Oryza sativa (japonica
  misc_feature (12)..(146): Homolog of NCBI NO: 38347000 NR Description: OSJNBb0058J09.1 [Oryza sativa (japonica
  misc_feature (8)..(482): Homolog of NCBI NO: 15228034 NR Description: putative glucosyl transferase; protein id: supported by cDNA: gi_15028388, supported by cDNA: gi_19310660
MAEAKPRNLRIVMFPFMGQGHIIPFVALALRLEKIMIMNRANKTTISMINTPSNIPKIRSNLPPESSISLIELPFNSSDHGLPHDGENFDSLPYSLVISLLEASRSLREPFRDFMTKILKEEGQSSVIVIGDFFLGWIGKVCKEVGVYSVIFSASGAFGLGCYRSIWLNLPHKETKQDQFLLDDFPEAGEIEKTQLNSFMLEADGTDDWSVFMKKIIPGWSDFDGFLFNTVAEIDQMGLSYFRRITGVPVWPVGPVLKSPDKKVGSRSTEEAVKSWLDSKPDHSVVYVCFGSMNSILQTHMLELAMALESSEKNFIWVVRPPIGVEVKSEFDVKGYLPEGFEERITRSERGLLVKKWAPQVDILSHKATCVFLSHCGWNSILESLSHGVPLLGWPMAAEQFFNSILMEKHIGVSVEVARGKRCEIKCDDIVSKIKLVMEETEVGKEIRKKAREVKELVRRAMVDGVKGSSVIGLEEFLDQAMVKKVEN

SEQ ID NO: 79606 - protein, 476 aa, Arabidopsis thaliana
  peptide (1)..(476): Ceres Seq. ID no. 12652100
  misc_feature (1)..(476): Homolog of NCBI NO: 15239937 NR Description: glucosyltransferase -like protein; protein id: supported by cDNA: gi_18086350 [Arabidopsis thaliana]
  misc_feature (1)..(476): Homolog of NCBI NO: 18086351 NR Description: AT5g12890/T24H18_60 [Arabidopsis thaliana]
  misc_feature (1)..(466): Homolog of NCBI NO: 38344083 NR Description: OSJNBb0056F09.6 [Oryza sativa (japonica
  misc_feature (1)..(470): Homolog of NCBI NO: 38347037 NR Description: OSJNBb0067G11.12 [Oryza sativa (japonica
  misc_feature (1)..(457): Homolog of NCBI NO: 34015076 NR Description: glucosyltransferase-like protein [Crocus sativus]
  misc_feature (1)..(465): Homolog of NCBI NO: 38344094 NR Description: OSJNBb0056F09.17 [Oryza sativa (japonica
  misc_feature (1)..(359): Homolog of NCBI NO: 38344089 NR Description: OSJNBb0056F09.12 [Oryza sativa (japonica
  misc_feature (200)..(472): Homolog of NCBI NO: 38347000 NR Description: OSJNBb0058J09.1 [Oryza sativa (japonica
  misc_feature (1)..(134): Homolog of NCBI NO: 38347000 NR Description: OSJNBb0058J09.1 [Oryza sativa (japonica
  misc_feature (1)..(470): Homolog of NCBI NO: 15228034 NR Description: putative glucosyl transferase; protein id: supported by cDNA: gi_15028388, supported by cDNA: gi_19310660
MFPFMGQGHIIPFVALALRLEKIMIMNRANKTTISMINTPSNIPKIRSNLPPESSISLIELPFNSSDHGLPHDGENFDSLPYSLVISLLEASRSLREPFRDFMTKILKEEGQSSVIVIGDFFLGWIGKVCKEVGVYSVIFSASGAFGLGCYRSIWLNLPHKETKQDQFLLDDFPEAGEIEKTQLNSFMLEADGTDDWSVFMKKIIPGWSDFDGFLFNTVAEIDQMGLSYFRRITGVPVWPVGPVLKSPDKKVGSRSTEEAVKSWLDSKPDHSVVYVCFGSMNSILQTHMLELAMALESSEKNFIWVVRPPIGVEVKSEFDVKGYLPEGFEERITRSERGLLVKKWAPQVDILSHKATCVFLSHCGWNSILESLSHGVPLLGWPMAAEQFFNSILMEKHIGVSVEVARGKRCEIKCDDIVSKIKLVMEETEVGKEIRKKAREVKELVRRAMVDGVKGSSVIGLEEFLDQAMVKKVEN

SEQ ID NO: 79607 - DNA, 396 bp, Arabidopsis thaliana
  misc_feature (1)..(396): Ceres Seq. ID no. 12652101
  misc_feature: MA Experiment ID: 20000306 Result: Up-regulated in Transcription
  misc_feature: MA Experiment 20000306 PARAMETER Experiment Name: At_Germinating_Seeds_Sub_P Parameter: Age (hr) Value: 6 vs. 0
  misc_feature: MA Experiment 20000306 PARAMETER Experiment Name: At_Germinating_Seeds_Sub_P Parameter: Organism Value: A. thaliana
  misc_feature: MA Experiment 20000306 PARAMETER Experiment Name: At_Germinating_Seeds_Sub_P Parameter: Plant Line Value: WS
  misc_feature: MA Experiment 20000306 PARAMETER Experiment Name: At_Germinating_Seeds_Sub_P Parameter: Tissue Value: Germinating Seeds
  misc_feature: MA Experiment ID: 20000307 Result: Up-regulated in Transcription
  misc_feature: MA Experiment 20000307 PARAMETER Experiment Name: At_Germinating_Seeds_Sub_P Parameter: Age (hr) Value: 24 vs. 0
  misc_feature: MA Experiment 20000307 PARAMETER Experiment Name: At_Germinating_Seeds_Sub_P Parameter: Organism Value: A. thaliana
  misc_feature: MA Experiment 20000307 PARAMETER Experiment Name: At_Germinating_Seeds_Sub_P Parameter: Plant Line Value: WS
  misc_feature: MA Experiment 20000307 PARAMETER Experiment Name: At_Germinating_Seeds_Sub_P Parameter: Tissue Value: Germinating Seeds
  misc_feature: MA Experiment ID: 20000327 Result: Down-regulated in Transcription
  misc_feature: MA Experiment 20000327 PARAMETER Experiment Name: At_42deg_Heat_Sub_P Parameter: Age (day) Value: 14
  misc_feature: MA Experiment 20000327 PARAMETER Experiment Name: At_42deg_Heat_Sub_P Parameter: Organism Value: A. thaliana
  misc_feature: MA Experiment 20000327 PARAMETER Experiment Name: At_42deg_Heat_Sub_P Parameter: Plant Line Value: WS
  misc_feature: MA Experiment 20000327 PARAMETER Experiment Name: At_42deg_Heat_Sub_P Parameter: Temperature (deg C) Value: 42 vs. 22
  misc_feature: MA Experiment 20000327 PARAMETER Experiment Name: At_42deg_Heat_Sub_P Parameter: Timepoint (hr) Value: 1
  misc_feature: MA Experiment 20000327 PARAMETER Experiment Name: At_42deg_Heat_Sub_P Parameter: Tissue Value: Aerial
  misc_feature: MA Experiment ID: 20000328 Result: Down-regulated in Transcription
  misc_feature: MA Experiment 20000328 PARAMETER Experiment Name: At_42deg_Heat_Sub_P Parameter: Age (day) Value: 14
  misc_feature: MA Experiment 20000328 PARAMETER Experiment Name: At_42deg_Heat_Sub_P Parameter: Organism Value: A. thaliana
  misc_feature: MA Experiment 20000328 PARAMETER Experiment Name: At_42deg_Heat_Sub_P Parameter: Plant Line Value: WS
  misc_feature: MA Experiment 20000328 PARAMETER Experiment Name: At_42deg_Heat_Sub_P Parameter: Temperature (deg C) Value: 42 vs. 22
  misc_feature: MA Experiment 20000328 PARAMETER Experiment Name: At_42deg_Heat_Sub_P Parameter: Timepoint (hr) Value: 6
  misc_feature: MA Experiment 20000328 PARAMETER Experiment Name: At_42deg_Heat_Sub_P Parameter: Tissue Value: Aerial
  misc_feature: MA Experiment ID: 20000329 Result: Up-regulated in Transcription
  misc_feature: MA Experiment 20000329 PARAMETER Experiment Name: At_4deg_Cold_Sub_P Parameter: Age (day) Value: 14
  misc_feature: MA Experiment 20000329 PARAMETER Experiment Name: At_4deg_Cold_Sub_P Parameter: Organism Value: A. thaliana
  misc_feature: MA Experiment 20000329 PARAMETER Experiment Name: At_4deg_Cold_Sub_P Parameter: Plant Line Value: WS
  misc_feature: MA Experiment 20000329 PARAMETER Experiment Name: At_4deg_Cold_Sub_P Parameter: Temperature (deg C) Value: 4 vs. 22
  misc_feature: MA Experiment 20000329 PARAMETER Experiment Name: At_4deg_Cold_Sub_P Parameter: Timepoint (hr) Value: 6
  misc_feature: MA Experiment 20000329 PARAMETER Experiment Name: At_4deg_Cold_Sub_P Parameter: Tissue Value: Aerial
  misc_feature: MA Experiment ID: 20000355 Result: Up-regulated in Transcription
  misc_feature: MA Experiment 20000355 PARAMETER Experiment Name: At_Siliques_Sub_P Parameter: Age (day) Value: 21
  misc_feature: MA Experiment 20000355 PARAMETER Experiment Name: At_Siliques_Sub_P Parameter: Organism Value: A. thaliana
  misc_feature: MA Experiment 20000355 PARAMETER Experiment Name: At_Siliques_Sub_P Parameter: Plant Line Value: WS
  misc_feature: MA Experiment 20000355 PARAMETER Experiment Name: At_Siliques_Sub_P Parameter: Tissue Value: Less Than 5mm Siliques vs. Whole Plant
atggctcgttcgaaccagacagctcgtaaggcaacaggaggtaaggctccacacttcgccatgagagtatggcaacactcaactccgccgcttaagaaaccatatagatacaagccaggaacagtggcactcagggagatcaggaagtaccagaagaccacagacttagttataagaaaactccctttccaaagactggtgaaagagatagctcagagtctcaaggcagatctaaggttccagaccggtgctgtttccgctcttcaagaagccgctgaagcttttatggttggaatgtttgaggacaccaatttgtgtgccatgcatgccaaaagatcaactatcatgcctaaggatatccagctcgctaaaaggcttcgaggcgatagggtttga

SEQ ID NO: 79608 - protein, 131 aa, Arabidopsis thaliana
  peptide (1)..(131): Ceres Seq. ID no. 12652102
  misc_feature (8)..(130): Pfam Name: Core histone H2A/H2B/H3/H4 Pfam Description: Core histone H2A/H2B/H3/H4
  misc_feature (1)..(131): Homolog of NCBI NO: 15239940 NR Description: histone H3 -like protein; protein id: At5g12910.1
  misc_feature (1)..(130): Homolog of NCBI NO: 122087 NR Description: Histone H3 >gi|81849|pir||S04520 histone H3
  misc_feature (1)..(130): Homolog of NCBI NO: 19880141 NR Description: histone 3 [Eimeria tenella]
  misc_feature (1)..(130): Homolog of NCBI NO: 28192620 NR Description: histone H3 [Toxoplasma gondii]
  misc_feature (1)..(130): Homolog of NCBI NO: 21542072 NR Description: Histone H3 >gi|6006731|gb|AAF00588.1|AF140033_1
  misc_feature (1)..(130): Homolog of NCBI NO: 9506767 NR Description: H3 histone, family 2 [Mus musculus]
  misc_feature (1)..(130): Homolog of NCBI NO: 15232146 NR Description: histone H3, putative; protein id: At3g27360.1, by cDNA: gi_14335141, supported by cDNA: gi_18655352 [Arabidopsis >gi|15238433|ref|NP_201339.1| histone H3 (sp|P05203); id:
  misc_feature (1)..(130): Homolog of NCBI NO: 166384 NR Description: histone H3 (H3-1.1)
  misc_feature (1)..(130): Homolog of NCBI NO: 15236103 NR Description: histone H3.3; protein id: At4g40030.1, supported cDNA: gi_14326561 [Arabidopsis thaliana] Histon H3; protein id: At4g40040.1, supported by cDNA: 2670.
  misc_feature (1)..(130): Homolog of NCBI NO: 18265391 NR Description: histone H3.3 [Trichinella pseudospiralis]
MARSNQTARKATGGKAPHFAMRVWQHSTPPLKKPYRYKPGTVALREIRKYQKTTDLVIRKLPFQRLVKEIAQSLKADLRFQTGAVSALQEAAEAFMVGMFEDTNLCAMHAKRSTIMPKDIQLAKRLRGDRV

SEQ ID NO: 79609 - protein, 111 aa, Arabidopsis thaliana
  peptide (1)..(111): Ceres Seq. ID no. 12652103
  misc_feature (1)..(110): Pfam Name: Core histone H2A/H2B/H3/H4 Pfam Description: Core histone H2A/H2B/H3/H4
  misc_feature (1)..(111): Homolog of NCBI NO: 15239940 NR Description: histone H3 -like protein; protein id: At5g12910.1
  misc_feature (1)..(110): Homolog of NCBI NO: 122087 NR Description: Histone H3 >gi|81849|pir||S04520 histone H3
  misc_feature (1)..(110): Homolog of NCBI NO: 19880141 NR Description: histone 3 [Eimeria tenella]
  misc_feature (1)..(110): Homolog of NCBI NO: 28192620 NR Description: histone H3 [Toxoplasma gondii]
  misc_feature (1)..(110): Homolog of NCBI NO: 21542072 NR Description: Histone H3 >gi|6006731|gb|AAF00588.1|AF140033_1
  misc_feature (1)..(110): Homolog of NCBI NO: 9506767 NR Description: H3 histone, family 2 [Mus musculus]
  misc_feature (1)..(110): Homolog of NCBI NO: 15232146 NR Description: histone H3, putative; protein id: At3g27360.1, by cDNA: gi_14335141, supported by cDNA: gi_18655352 [Arabidopsis >gi|15238433|ref|NP_201339.1| histone H3 (sp|P05203); id:
  misc_feature (1)..(110): Homolog of NCBI NO: 166384 NR Description: histone H3 (H3-1.1)
  misc_feature (1)..(110): Homolog of NCBI NO: 18265391 NR Description: histone H3.3 [Trichinella pseudospiralis]
  misc_feature (1)..(110): Homolog of NCBI NO: 15236103 NR Description: histone H3.3; protein id: At4g40030.1, supported cDNA: gi_14326561 [Arabidopsis thaliana] Histon H3; protein id: At4g40040.1, supported by cDNA: 2670.
MRVWQHSTPPLKKPYRYKPGTVALREIRKYQKTTDLVIRKLPFQRLVKEIAQSLKADLRFQTGAVSALQEAAEAFMVGMFEDTNLCAMHAKRSTIMPKDIQLAKRLRGDRV

SEQ ID NO: 79610 - DNA, 2111 bp, Arabidopsis thaliana
  misc_feature (1)..(2111): Ceres Seq. ID no. 12652125
  misc_feature: MA Experiment ID: 20000182 Result: Up-regulated in Transcription
  misc_feature: MA Experiment 20000182 PARAMETER Experiment Name: At_2mM_SA_P Parameter: Age (day) Value: 14
  misc_feature: MA Experiment 20000182 PARAMETER Experiment Name: At_2mM_SA_P Parameter: Organism Value: A. thaliana
  misc_feature: MA Experiment 20000182 PARAMETER Experiment Name: At_2mM_SA_P Parameter: Plant Line Value: WS
  misc_feature: MA Experiment 20000182 PARAMETER Experiment Name: At_2mM_SA_P Parameter: Timepoint (hr) Value: 6
  misc_feature: MA Experiment 20000182 PARAMETER Experiment Name: At_2mM_SA_P Parameter: Tissue Value: Aerial
  misc_feature: MA Experiment 20000182 PARAMETER Experiment Name: At_2mM_SA_P Parameter: Treatment Value: 2mM SA vs. No Treatment
  misc_feature: MA Experiment ID: 20000185 Result: Up-regulated in Transcription
  misc_feature: MA Experiment 20000185 PARAMETER Experiment Name: At_Roots__P Parameter: Age (day) Value: 7 vs. 21
  misc_feature: MA Experiment 20000185 PARAMETER Experiment Name: At_Roots__P Parameter: Organism Value: A. thaliana
  misc_feature: MA Experiment 20000185 PARAMETER Experiment Name: At_Roots__P Parameter: Tissue Value: Roots vs. Whole Plant
  misc_feature: MA Experiment ID: 20000439 Result: Up-regulated in Transcription
  misc_feature: MA Experiment 20000439 PARAMETER Experiment Name: At_Roots__P Parameter: Age (day) Value: 14 vs. 21
  misc_feature: MA Experiment 20000439 PARAMETER Experiment Name: At_Roots__P Parameter: Organism Value: A. thaliana
  misc_feature: MA Experiment 20000439 PARAMETER Experiment Name: At_Roots__P Parameter: Tissue Value: Roots vs. Whole Plant
  misc_feature: MA Experiment ID: 20000709 Result: Up-regulated in Transcription
  misc_feature: MA Experiment 20000709 PARAMETER Experiment Name: At_15mM_NH4NO3_L-to-H_P Parameter: Age (hr) Value: 14
  misc_feature: MA Experiment 20000709 PARAMETER Experiment Name: At_15mM_NH4NO3_L-to-H_P Parameter: Organism Value: A. thaliana
  misc_feature: MA Experiment 20000709 PARAMETER Experiment Name: At_15mM_NH4NO3_L-to-H_P Parameter: Plant Line Value: WS
  misc_feature: MA Experiment 20000709 PARAMETER Experiment Name: At_15mM_NH4NO3_L-to-H_P Parameter: Timepoint (hr) Value: 4
  misc_feature: MA Experiment 20000709 PARAMETER Experiment Name: At_15mM_NH4NO3_L-to-H_P Parameter: Tissue Value: Aerial
  misc_feature: MA Experiment 20000709 PARAMETER Experiment Name: At_15mM_NH4NO3_L-to-H_P Parameter: Treatment Value: 15mM NH4NO3 vs. 30mM Mannitol
  misc_feature: MA Experiment ID: 20001457 Result: Up-regulated in Transcription
  misc_feature: MA Experiment 20001457 PARAMETER Experiment Name: At_50mM_NH4NO3_L-to-H_P Parameter: Age (day) Value: Undefined
  misc_feature: MA Experiment 20001457 PARAMETER Experiment Name: At_50mM_NH4NO3_L-to-H_P Parameter: Organism Value: Undefined
  misc_feature: MA Experiment 20001457 PARAMETER Experiment Name: At_50mM_NH4NO3_L-to-H_P Parameter: Plant Line Value: Undefined
  misc_feature: MA Experiment 20001457 PARAMETER Experiment Name: At_50mM_NH4NO3_L-to-H_P Parameter: Timepoint (hr) Value: 0.5
  misc_feature: MA Experiment 20001457 PARAMETER Experiment Name: At_50mM_NH4NO3_L-to-H_P Parameter: Tissue Value: Siliques
  misc_feature: MA Experiment 20001457 PARAMETER Experiment Name: At_50mM_NH4NO3_L-to-H_P Parameter: Treatment Value: 50mM NH4NO3 vs. 100mM Manitol
  misc_feature: MA Experiment ID: 20001459 Result: Up-regulated in Transcription
  misc_feature: MA Experiment 20001459 PARAMETER Experiment Name: At_50mM_NH4NO3_L-to-H_P Parameter: Age (day) Value: Undefined
  misc_feature: MA Experiment 20001459 PARAMETER Experiment Name: At_50mM_NH4NO3_L-to-H_P Parameter: Organism Value: Undefined
  misc_feature: MA Experiment 20001459 PARAMETER Experiment Name: At_50mM_NH4NO3_L-to-H_P Parameter: Plant Line Value: Undefined
  misc_feature: MA Experiment 20001459 PARAMETER Experiment Name: At_50mM_NH4NO3_L-to-H_P Parameter: Timepoint (hr) Value: 4
  misc_feature: MA Experiment 20001459 PARAMETER Experiment Name: At_50mM_NH4NO3_L-to-H_P Parameter: Tissue Value: Siliques
  misc_feature: MA Experiment 20001459 PARAMETER Experiment Name: At_50mM_NH4NO3_L-to-H_P Parameter: Treatment Value: 50mM NH4NO3 vs. 100mM Manitol
  misc_feature: MA Experiment ID: 20001757 Result: Up-regulated in Transcription
  misc_feature: MA Experiment 20001757 PARAMETER Experiment Name: At_50mM_NH4NO3_L-to-H_P Parameter: Timepoint (hr) Value: 6
  misc_feature: MA Experiment 20001757 PARAMETER Experiment Name: At_50mM_NH4NO3_L-to-H_P Parameter: Tissue Value: Leaf
  misc_feature: MA Experiment 20001757 PARAMETER Experiment Name: At_50mM_NH4NO3_L-to-H_P Parameter: Treatment Value: 50mM NH4NO3 vs 100mM Mannitol
  misc_feature: MA Experiment ID: 20001759 Result: Up-regulated in Transcription
  misc_feature: MA Experiment 20001759 PARAMETER Experiment Name: At_50mM_NH4NO3_L-to-H_P Parameter: Timepoint (hr) Value: 1
  misc_feature: MA Experiment 20001759 PARAMETER Experiment Name: At_50mM_NH4NO3_L-to-H_P Parameter: Tissue Value: Siliques
  misc_feature: MA Experiment 20001759 PARAMETER Experiment Name: At_50mM_NH4NO3_L-to-H_P Parameter: Treatment Value: 50mM NH4NO3 vs 100mM Mannitol
atctcaaaaggttctcttatttgcagtatcgccccttaaatcctttttcgatgtttcttatgttcatcattattttttaactaaaaatctcatctttagacaacaattcaatttgccatctctctgttgtatctttgacgatggcggctttgtcttcctccgtcaccacccgatcatatcattccggttatttggcttctttctcaccggttaacggtgaccgacatcgatcactctcgttcctgtctgcttctcctcaaggattgaatcctcttgacctctgtgttagattccagaggaagtctggtcgtgcttctgtctttatgcaagatggtgcaatagtcactaattcaaattcatcagagagtaaaacttctcttaagggattgaaagatgaggtgctatcagctttatctcaagaagcagccaaggttggagtagaatctgatggtcaaagccagtcaacagttagtattacggtggttggagcctctggtgatcttgctaagaagaagattttcccggctcttttcgccctttactatgaaggttgtctccctgagcattttacaatatttggatattctaggagtaagatgacagatgttgaacttagaaacatggtcagcaaaaccctcacttgcagaattgataagagggcaaactgtggtgaaaagatggaagaatttctcaagagatgtttttaccattctggtcagtatgattctcaggaacattttactgaattggataagaagctcaaggaacatgaggctggaagaatctcaaaccgcctcttttatttgtctatccctccaaatatatttgtagatgctgtgaaatgtgcaagcacttctgcttcatctgtcaatggatggactagggttatcgtcgagaaaccttttggtcgagattctgaaacctcggctgctttaacgaaatccctcaagcagtatttggaggaagatcaaatttttaggatagaccattacctaggaaaggagctagtcgagaacttatctgttcttcgattctcaaaccttatatttgagccgctatggtcaaggcagtacataaggaacgtgcaatttatattttctgaggatttcggcactgaaggacgtggagggtactttgacaattacggaataataagagatataatgcagaatcatctgcttcaaatcttagccctctttgccatggaaacgcctgttagtttggatgcagaggatatcagaaatgaaaaggttaaggtgttacgttcaatgaggccaattcgagttgaagatgtggtaataggacaatacaagagccacacaaagggaggagtcacatatcctgcctacaccgatgataaaactgtaccaaaaggtagtctgactccaacatttgcagctgctgctcttttcatcgacaatgcaagatgggacggtgtgccctttttaatgaaagcgggcaaagcactacacaccaggagtgcagagataagggtgcagttcaggcatgttccggggaatttgtataaccggaatactggttctgatcttgatcaagctacaaatgagcttgtgatccgtgtccaaccagatgaagcaatctatttgaaaatcaacaacaaggtccctggtttaggaatgagattagatcgcagtaacttgaatcttctatactcagcaaggtattcaaaggagataccagatgcatatgagaggcttctgttagatgcaatagaaggagaaagaagattgttcataagaagtgacgagcttgatgcagcttggtcgctattcactccattgcttaaagagattgaagagaagaagagaatccctgagtactatccttatggtagccgtggtcctgttggtgctcattatctagctgctaaacacaaggtgcaatggggtgacgtcagtattgaccagtaaaacattttcttgtttgtattctcttttttttacattgataatagatttatctaggattcaagctttttctacgcctctttttacagctttaatttgtgcaatttggttatgtaccatttaataaataaataaaccaaaggggtttctcttattctctacaaggaaaatgtcttcttttta

SEQ ID NO: 79611 - protein, 596 aa, Arabidopsis thaliana
  peptide (1)..(596): Ceres Seq. ID no. 12652126
  misc_feature (1)..(596): Homolog of NCBI NO: 9955555 NR Description: glucose-6-phosphate 1-dehydrogenase [Arabidopsis
  misc_feature (5)..(596): Homolog of NCBI NO: 22654991 NR Description: At1g24280/F3I6_22 [Arabidopsis thaliana]
  misc_feature (5)..(596): Homolog of NCBI NO: 15221719 NR Description: glucose-6-phosphate 1-dehydrogenase; protein id:
  misc_feature (105)..(596): Homolog of NCBI NO: 2146735 NR Description: glucose-6-phosphate 1-dehydrogenase (EC 1.1.1.49)
  misc_feature (1)..(592): Homolog of NCBI NO: 9392607 NR Description: plastidic glucose 6-phosphate dehydrogenase
  misc_feature (1)..(592): Homolog of NCBI NO: 3023817 NR Description: Glucose-6-phosphate 1-dehydrogenase, chloroplast
  misc_feature (59)..(593): Homolog of NCBI NO: 5734502 NR Description: glucose-6-phosphate 1-dehydrogenase [Solanum
  misc_feature (59)..(593): Homolog of NCBI NO: 24745908 NR Description: glucose 6-phosphate dehydrogenase [Solanum
  misc_feature (72)..(596): Homolog of NCBI NO: 33304517 NR Description: putative plastidic glucose-6-phosphate
  misc_feature (88)..(595): Homolog of NCBI NO: 3023818 NR Description: Glucose-6-phosphate 1-dehydrogenase, chloroplast
MAALSSSVTTRSYHSGYLASFSPVNGDRHRSLSFLSASPQGLNPLDLCVRFQRKSGRASVFMQDGAIVTNSNSSESKTSLKGLKDEVLSALSQEAAKVGVESDGQSQSTVSITVVGASGDLAKKKIFPALFALYYEGCLPEHFTIFGYSRSKMTDVELRNMVSKTLTCRIDKRANCGEKMEEFLKRCFYHSGQYDSQEHFTELDKKLKEHEAGRISNRLFYLSIPPNIFVDAVKCASTSASSVNGWTRVIVEKPFGRDSETSAALTKSLKQYLEEDQIFRIDHYLGKELVENLSVLRFSNLIFEPLWSRQYIRNVQFIFSEDFGTEGRGGYFDNYGIIRDIMQNHLLQILALFAMETPVSLDAEDIRNEKVKVLRSMRPIRVEDVVIGQYKSHTKGGVTYPAYTDDKTVPKGSLTPTFAAAALFIDNARWDGVPFLMKAGKALHTRSAEIRVQFRHVPGNLYNRNTGSDLDQATNELVIRVQPDEAIYLKINNKVPGLGMRLDRSNLNLLYSARYSKEIPDAYERLLLDAIEGERRLFIRSDELDAAWSLFTPLLKEIEEKKRIPEYYPYGSRGPVGAHYLAAKHKVQWGDVSIDQ

SEQ ID NO: 79612 - protein, 535 aa, Arabidopsis thaliana
  peptide (1)..(535): Ceres Seq. ID no. 12652127
  misc_feature (1)..(535): Homolog of NCBI NO: 9955555 NR Description: glucose-6-phosphate 1-dehydrogenase [Arabidopsis
  misc_feature (1)..(535): Homolog of NCBI NO: 22654991 NR Description: At1g24280/F3I6_22 [Arabidopsis thaliana]
  misc_feature (1)..(535): Homolog of NCBI NO: 15221719 NR Description: glucose-6-phosphate 1-dehydrogenase; protein id:
  misc_feature (44)..(535): Homolog of NCBI NO: 2146735 NR Description: glucose-6-phosphate 1-dehydrogenase (EC 1.1.1.49)
  misc_feature (1)..(531): Homolog of NCBI NO: 9392607 NR Description: plastidic glucose 6-phosphate dehydrogenase
  misc_feature (1)..(531): Homolog of NCBI NO: 3023817 NR Description: Glucose-6-phosphate 1-dehydrogenase, chloroplast
  misc_feature (1)..(532): Homolog of NCBI NO: 5734502 NR Description: glucose-6-phosphate 1-dehydrogenase [Solanum
  misc_feature (1)..(532): Homolog of NCBI NO: 24745908 NR Description: glucose 6-phosphate dehydrogenase [Solanum
  misc_feature (11)..(535): Homolog of NCBI NO: 33304517 NR Description: putative plastidic glucose-6-phosphate
  misc_feature (27)..(534): Homolog of NCBI NO: 3023818 NR Description: Glucose-6-phosphate 1-dehydrogenase, chloroplast
MQDGAIVTNSNSSESKTSLKGLKDEVLSALSQEAAKVGVESDGQSQSTVSITVVGASGDLAKKKIFPALFALYYEGCLPEHFTIFGYSRSKMTDVELRNMVSKTLTCRIDKRANCGEKMEEFLKRCFYHSGQYDSQEHFTELDKKLKEHEAGRISNRLFYLSIPPNIFVDAVKCASTSASSVNGWTRVIVEKPFGRDSETSAALTKSLKQYLEEDQIFRIDHYLGKELVENLSVLRFSNLIFEPLWSRQYIRNVQFIFSEDFGTEGRGGYFDNYGIIRDIMQNHLLQILALFAMETPVSLDAEDIRNEKVKVLRSMRPIRVEDVVIGQYKSHTKGGVTYPAYTDDKTVPKGSLTPTFAAAALFIDNARWDGVPFLMKAGKALHTRSAEIRVQFRHVPGNLYNRNTGSDLDQATNELVIRVQPDEAIYLKINNKVPGLGMRLDRSNLNLLYSARYSKEIPDAYERLLLDAIEGERRLFIRSDELDAAWSLFTPLLKEIEEKKRIPEYYPYGSRGPVGAHYLAAKHKVQWGDVSIDQ

SEQ ID NO: 79613 - protein, 444 aa, Arabidopsis thaliana
  peptide (1)..(444): Ceres Seq. ID no. 12652128
  misc_feature (1)..(444): Homolog of NCBI NO: 9955555 NR Description: glucose-6-phosphate 1-dehydrogenase [Arabidopsis
  misc_feature (1)..(444): Homolog of NCBI NO: 22654991 NR Description: At1g24280/F3I6_22 [Arabidopsis thaliana]
  misc_feature (1)..(444): Homolog of NCBI NO: 15221719 NR Description: glucose-6-phosphate 1-dehydrogenase; protein id:
  misc_feature (1)..(444): Homolog of NCBI NO: 2146735 NR Description: glucose-6-phosphate 1-dehydrogenase (EC 1.1.1.49)
  misc_feature (1)..(440): Homolog of NCBI NO: 9392607 NR Description: plastidic glucose 6-phosphate dehydrogenase
  misc_feature (1)..(440): Homolog of NCBI NO: 3023817 NR Description: Glucose-6-phosphate 1-dehydrogenase, chloroplast
  misc_feature (1)..(441): Homolog of NCBI NO: 5734502 NR Description: glucose-6-phosphate 1-dehydrogenase [Solanum
  misc_feature (1)..(441): Homolog of NCBI NO: 24745908 NR Description: glucose 6-phosphate dehydrogenase [Solanum
  misc_feature (1)..(444): Homolog of NCBI NO: 33304517 NR Description: putative plastidic glucose-6-phosphate
  misc_feature (1)..(443): Homolog of NCBI NO: 3023818 NR Description: Glucose-6-phosphate 1-dehydrogenase, chloroplast
MTDVELRNMVSKTLTCRIDKRANCGEKMEEFLKRCFYHSGQYDSQEHFTELDKKLKEHEAGRISNRLFYLSIPPNIFVDAVKCASTSASSVNGWTRVIVEKPFGRDSETSAALTKSLKQYLEEDQIFRIDHYLGKELVENLSVLRFSNLIFEPLWSRQYIRNVQFIFSEDFGTEGRGGYFDNYGIIRDIMQNHLLQILALFAMETPVSLDAEDIRNEKVKVLRSMRPIRVEDVVIGQYKSHTKGGVTYPAYTDDKTVPKGSLTPTFAAAALFIDNARWDGVPFLMKAGKALHTRSAEIRVQFRHVPGNLYNRNTGSDLDQATNELVIRVQPDEAIYLKINNKVPGLGMRLDRSNLNLLYSARYSKEIPDAYERLLLDAIEGERRLFIRSDELDAAWSLFTPLLKEIEEKKRIPEYYPYGSRGPVGAHYLAAKHKVQWGDVSIDQ

SEQ ID NO: 79614 - DNA, 1775 bp, Arabidopsis thaliana
  misc_feature (1)..(1775): Ceres Seq. ID no. 12652129
  misc_feature: MA Experiment ID: 20001451 Result: Up-regulated in Transcription
  misc_feature: MA Experiment 20001451 PARAMETER Experiment Name: At_Far-red-induction_P Parameter: Age (day) Value: 7
  misc_feature: MA Experiment 20001451 PARAMETER Experiment Name: At_Far-red-induction_P Parameter: Light Value: Far-red vs. White
  misc_feature: MA Experiment 20001451 PARAMETER Experiment Name: At_Far-red-induction_P Parameter: Organism Value: A. thaliana
  misc_feature: MA Experiment 20001451 PARAMETER Experiment Name: At_Far-red-induction_P Parameter: Plant Line Value: Columbia
  misc_feature: MA Experiment 20001451 PARAMETER Experiment Name: At_Far-red-induction_P Parameter: Timepoint (hr) Value: 24
  misc_feature: MA Experiment 20001451 PARAMETER Experiment Name: At_Far-red-induction_P Parameter: Tissue Value: Whole Plant
cgacaaaagaagctgcttcttcatctctctctctctccttctctttctctctcaactccaattcgtttttaccagtttcgaatctgaacaaagttgggttttttattggtacccagaatctcaattctccttctttccttctgggtataggaaaagtctcgcctttttttatatttatccaatcgctcctgttcattgattccccagtaggattgtagtttttggttattgggaaaattgagtaaaggaggagatgggttgtttctcgtgttttgattcgagtgatgacgagaagctgaatccagttgatgaatctaatcatggtcagaagaaacaatcacaaccgacagtatccaataacatatctggactcccttcaggtggggagaagcttagctcaaagaccaatggaggatcaaaaagggagctactgcttccaagggatggacttggacaaattgctgctcatacatttgctttccgcgagcttgctgctgcaactatgaactttcatcctgacactttcttaggcgaaggtggatttggacgtgtctacaaaggaaggcttgacagcaccggtcaggttgttgctgttaaacaactagacaggaatggtctacaaggtaacagagaatttctggtagaggttcttatgctcagtcttcttcatcatcccaacttagtcaaccttattggttattgtgctgatggagatcaacgcctcttggtctacgagtttatgccgttaggatcattggaagatcacctccacgatcttccaccggataaggaggccttagattggaacatgagaatgaaaatagctgctggtgcggcgaaaggattggaatttctacatgataaggcaaaccctccggttatttatagagattttaagtcatcaaatattttactggatgagggtttccaccctaagctttctgattttggacttgctaaactcggaccaacgggagacaaatctcatgtctccactagagttatgggaacttatggttattgtgctcccgagtacgcaatgacgggacaattgacagtaaaatcagatgtctacagttttggtgtggtttttctcgagctcattactggtcgcaaagctatagacagcgagatgcctcatggagagcagaacctggtggcttgggctcgcccattgttcaacgacaggcgaaagttcataaaactggctgatccaaggttaaaggggcggtttccaacgcgtgcactctaccaagctttagctgtggcatcaatgtgcatccaagaacaggcggctacacgtcctctcatagcagatgttgtcactgcactctcctatcttgcaaaccaagcttatgatccaagtaaagatgatagtagaagaaaccgggatgaaagaggtgcaaggttaataacaaggaacgacgatggaggtggctcgggaagtaaattcgatttagaaggttcagagaaagaagattcaccgagagagacagctcggatattgaaccgagatatcaatagggagcgtgcggttgcagaggctaagatgtggggagagagtttgagggagaaacgaagacagagcgagcagggtacttcagagagcaacagtaccgggtagaaccggtttgggtcggtcttgacccttttttgttcttatttctctcaagactctcatttattgtcaaacatagaaaacaaacaaaaaaacattgggacgacgagttgctgtacattatatatgtgatgttgcaatatgggcacaaaggtta

SEQ ID NO: 79615 - protein, 456 aa, Arabidopsis thaliana
  peptide (1)..(456): Ceres Seq. ID no. 12652130
  misc_feature (1)..(456): Homolog of NCBI NO: 15240038 NR Description: protein kinase-like; protein id: At5g13160.1, by cDNA: gi_11559837, supported by cDNA: gi_13937146, supported
  misc_feature (22)..(304): Homolog of NCBI NO: 21740745 NR Description: OSJNBa0072K14.10 [Oryza sativa (japonica
  misc_feature (305)..(454): Homolog of NCBI NO: 21740745 NR Description: OSJNBa0072K14.10 [Oryza sativa (japonica
  misc_feature (2)..(456): Homolog of NCBI NO: 15238886 NR Description: protein kinase -like protein; protein id:
  misc_feature (43)..(431): Homolog of NCBI NO: 34907210 NR Description: putative serine/threonine kinase PBS1 protein
  misc_feature (1)..(379): Homolog of NCBI NO: 34395193 NR Description: putative protein serine/threonine kinase [Oryza
  misc_feature (68)..(370): Homolog of NCBI NO: 34394036 NR Description: putative protein serine/threonine kinase BNK1
  misc_feature (1)..(379): Homolog of NCBI NO: 34899302 NR Description: putative protein serine/threonine kinase [Oryza
  misc_feature (65)..(370): Homolog of NCBI NO: 11259782 NR Description: protein kinase-like - Arabidopsis thaliana
  misc_feature (65)..(370): Homolog of NCBI NO: 30679773 NR Description: protein kinase family [Arabidopsis thaliana]
MGCFSCFDSSDDEKLNPVDESNHGQKKQSQPTVSNNISGLPSGGEKLSSKTNGGSKRELLLPRDGLGQIAAHTFAFRELAAATMNFHPDTFLGEGGFGRVYKGRLDSTGQVVAVKQLDRNGLQGNREFLVEVLMLSLLHHPNLVNLIGYCADGDQRLLVYEFMPLGSLEDHLHDLPPDKEALDWNMRMKIAAGAAKGLEFLHDKANPPVIYRDFKSSNILLDEGFHPKLSDFGLAKLGPTGDKSHVSTRVMGTYGYCAPEYAMTGQLTVKSDVYSFGVVFLELITGRKAIDSEMPHGEQNLVAWARPLFNDRRKFIKLADPRLKGRFPTRALYQALAVASMCIQEQAATRPLIADVVTALSYLANQAYDPSKDDSRRNRDERGARLITRNDDGGGSGSKFDLEGSEKEDSPRETARILNRDINRERAVAEAKMWGESLREKRRQSEQGTSESNSTG

SEQ ID NO: 79616 - protein, 373 aa, Arabidopsis thaliana
  peptide (1)..(373): Ceres Seq. ID no. 12652131
  misc_feature (1)..(373): Homolog of NCBI NO: 15240038 NR Description: protein kinase-like; protein id: At5g13160.1, by cDNA: gi_11559837, supported by cDNA: gi_13937146, supported
  misc_feature (1)..(221): Homolog of NCBI NO: 21740745 NR Description: OSJNBa0072K14.10 [Oryza sativa (japonica
  misc_feature (222)..(371): Homolog of NCBI NO: 21740745 NR Description: OSJNBa0072K14.10 [Oryza sativa (japonica
  misc_feature (1)..(373): Homolog of NCBI NO: 15238886 NR Description: protein kinase -like protein; protein id:
  misc_feature (1)..(348): Homolog of NCBI NO: 34907210 NR Description: putative serine/threonine kinase PBS1 protein
  misc_feature (1)..(296): Homolog of NCBI NO: 34395193 NR Description: putative protein serine/threonine kinase [Oryza
  misc_feature (1)..(287): Homolog of NCBI NO: 34394036 NR Description: putative protein serine/threonine kinase BNK1
  misc_feature (1)..(296): Homolog of NCBI NO: 34899302 NR Description: putative protein serine/threonine kinase [Oryza
  misc_feature (1)..(287): Homolog of NCBI NO: 11259782 NR Description: protein kinase-like - Arabidopsis thaliana
  misc_feature (1)..(287): Homolog of NCBI NO: 30679773 NR Description: protein kinase family [Arabidopsis thaliana]
MNFHPDTFLGEGGFGRVYKGRLDSTGQVVAVKQLDRNGLQGNREFLVEVLMLSLLHHPNLVNLIGYCADGDQRLLVYEFMPLGSLEDHLHDLPPDKEALDWNMRMKIAAGAAKGLEFLHDKANPPVIYRDFKSSNILLDEGFHPKLSDFGLAKLGPTGDKSHVSTRVMGTYGYCAPEYAMTGQLTVKSDVYSFGVVFLELITGRKAIDSEMPHGEQNLVAWARPLFNDRRKFIKLADPRLKGRFPTRALYQALAVASMCIQEQAATRPLIADVVTALSYLANQAYDPSKDDSRRNRDERGARLITRNDDGGGSGSKFDLEGSEKEDSPRETARILNRDINRERAVAEAKMWGESLREKRRQSEQGTSESNSTG

SEQ ID NO: 79617 - protein, 323 aa, Arabidopsis thaliana
  peptide (1)..(323): Ceres Seq. ID no. 12652132
  misc_feature (1)..(323): Homolog of NCBI NO: 15240038 NR Description: protein kinase-like; protein id: At5g13160.1, by cDNA: gi_11559837, supported by cDNA: gi_13937146, supported
  misc_feature (1)..(171): Homolog of NCBI NO: 21740745 NR Description: OSJNBa0072K14.10 [Oryza sativa (japonica
  misc_feature (172)..(321): Homolog of NCBI NO: 21740745 NR Description: OSJNBa0072K14.10 [Oryza sativa (japonica
  misc_feature (1)..(323): Homolog of NCBI NO: 15238886 NR Description: protein kinase -like protein; protein id:
  misc_feature (1)..(298): Homolog of NCBI NO: 34907210 NR Description: putative serine/threonine kinase PBS1 protein
  misc_feature (1)..(246): Homolog of NCBI NO: 34395193 NR Description: putative protein serine/threonine kinase [Oryza
  misc_feature (1)..(237): Homolog of NCBI NO: 34394036 NR Description: putative protein serine/threonine kinase BNK1
  misc_feature (1)..(246): Homolog of NCBI NO: 34899302 NR Description: putative protein serine/threonine kinase [Oryza
  misc_feature (1)..(237): Homolog of NCBI NO: 11259782 NR Description: protein kinase-like - Arabidopsis thaliana
  misc_feature (1)..(237): Homolog of NCBI NO: 30679773 NR Description: protein kinase family [Arabidopsis thaliana]
MLSLLHHPNLVNLIGYCADGDQRLLVYEFMPLGSLEDHLHDLPPDKEALDWNMRMKIAAGAAKGLEFLHDKANPPVIYRDFKSSNILLDEGFHPKLSDFGLAKLGPTGDKSHVSTRVMGTYGYCAPEYAMTGQLTVKSDVYSFGVVFLELITGRKAIDSEMPHGEQNLVAWARPLFNDRRKFIKLADPRLKGRFPTRALYQALAVASMCIQEQAATRPLIADVVTALSYLANQAYDPSKDDSRRNRDERGARLITRNDDGGGSGSKFDLEGSEKEDSPRETARILNRDINRERAVAEAKMWGESLREKRRQSEQGTSESNSTG

SEQ ID NO: 79618 - DNA, 921 bp, Arabidopsis thaliana
  misc_feature (1)..(921): Ceres Seq. ID no. 12652189
  misc_feature: MA Experiment ID: 20000185 Result: Up-regulated in Transcription
  misc_feature: MA Experiment 20000185 PARAMETER Experiment Name: At_Roots__P Parameter: Age (day) Value: 7 vs. 21
  misc_feature: MA Experiment 20000185 PARAMETER Experiment Name: At_Roots__P Parameter: Organism Value: A. thaliana
  misc_feature: MA Experiment 20000185 PARAMETER Experiment Name: At_Roots__P Parameter: Tissue Value: Roots vs. Whole Plant
  misc_feature: MA Experiment ID: 20000227 Result: Down-regulated in Transcription
  misc_feature: MA Experiment 20000227 PARAMETER Experiment Name: At_Root-Tips-vs-Tops_P Parameter: Tissue Value: Root Tips vs. Root Tops
  misc_feature: MA Experiment ID: 20000264 Result: Up-regulated in Transcription
  misc_feature: MA Experiment 20000264 PARAMETER Experiment Name: At_Open_Flower_P Parameter: Age (day) Value: 21
  misc_feature: MA Experiment 20000264 PARAMETER Experiment Name: At_Open_Flower_P Parameter: Plant Line Value: WS
  misc_feature: MA Experiment 20000264 PARAMETER Experiment Name: At_Open_Flower_P Parameter: Tissue Value: Open Flower vs. Whole Plant
  misc_feature: MA Experiment ID: 20000265 Result: Up-regulated in Transcription
  misc_feature: MA Experiment 20000265 PARAMETER Experiment Name: At_Open_Flower_P Parameter: Age (day) Value: 21
  misc_feature: MA Experiment 20000265 PARAMETER Experiment Name: At_Open_Flower_P Parameter: Plant Line Value: WS
  misc_feature: MA Experiment 20000265 PARAMETER Experiment Name: At_Open_Flower_P Parameter: Tissue Value: Closed Flower vs. Whole Plant
  misc_feature: MA Experiment ID: 20000439 Result: Up-regulated in Transcription
  misc_feature: MA Experiment 20000439 PARAMETER Experiment Name: At_Roots__P Parameter: Age (day) Value: 14 vs. 21
  misc_feature: MA Experiment 20000439 PARAMETER Experiment Name: At_Roots__P Parameter: Organism Value: A. thaliana
  misc_feature: MA Experiment 20000439 PARAMETER Experiment Name: At_Roots__P Parameter: Tissue Value: Roots vs. Whole Plant
  misc_feature: MA Experiment ID: 20000495 Result: Up-regulated in Transcription
  misc_feature: MA Experiment 20000495 PARAMETER Experiment Name: At_Guard_Cells_P Parameter: Harvest Date Value: 8/2/2002
  misc_feature: MA Experiment 20000495 PARAMETER Experiment Name: At_Guard_Cells_P Parameter: Organism Value: A. thaliana
  misc_feature: MA Experiment 20000495 PARAMETER Experiment Name: At_Guard_Cells_P Parameter: Tissue Value: Guard Cells vs. Leaves
  misc_feature: MA Experiment ID: 20000794 Result: Up-regulated in Transcription
  misc_feature: MA Experiment 20000794 PARAMETER Experiment Name: At_Petals_P Parameter: Age (day) Value: 23-25 days
  misc_feature: MA Experiment 20000794 PARAMETER Experiment Name: At_Petals_P Parameter: Plant Line Value: WS
  misc_feature: MA Experiment 20000794 PARAMETER Experiment Name: At_Petals_P Parameter: Tissue Value: Petals vs. Whole plant
  misc_feature: MA Experiment ID: 20001906 Result: Up-regulated in Transcription
  misc_feature: MA Experiment 20001906 PARAMETER Experiment Name: At_Drought_Reproduction_P Parameter: Age (day) Value: 35
  misc_feature: MA Experiment 20001906 PARAMETER Experiment Name: At_Drought_Reproduction_P Parameter: Organism Value: A. thaliana
  misc_feature: MA Experiment 20001906 PARAMETER Experiment Name: At_Drought_Reproduction_P Parameter: Plant Line Value: WS
  misc_feature: MA Experiment 20001906 PARAMETER Experiment Name: At_Drought_Reproduction_P Parameter: Timepoint (day) Value: 5
  misc_feature: MA Experiment 20001906 PARAMETER Experiment Name: At_Drought_Reproduction_P Parameter: Tissue Value: Siliques
  misc_feature: MA Experiment 20001906 PARAMETER Experiment Name: At_Drought_Reproduction_P Parameter: Treatment Value: Drought vs. No Drought
atgggtcgtggaaaaatcgagataaagaggatcgagaatgcgaatagcagacaagtcactttttccaagaggcgttctgggttacttaagaaagctcgtgagctctctgttctttgtgatgctgaagttgctgtcatcgtcttctctaagtctggcaagctcttcgagtactccagtactggaatgaagcaaacactttccagatacggtaatcaccagagttcttcagcttctaaagcagaggaggattgtgcagaggtggatattttaaaggatcaactttcaaagcttcaagagaaacatttacaactgcagggcaagggcttgaatcctctgacctttaaagagctgcaaagccttgagcagcaactatatcatgcattgattactgtcagagagcgaaaggaacgattgctgactaaccaacttgaagaatcacgcctcaaggaacaacgagcagagttggaaaacgagaccttgcgtagacaggttcaagaactgaggagctttctcccgtcgttcacccactatgttccatcctacatcaaatgctttgctatagatccaaagaacgctctcataaaccacgacagtaaatgcagcctccagaacaccgattcagacacaactttgcaattagggttgccgggagaggcacatgatagaaggacgaatgaaggagaaagagagagcccgtcaagcgattcagtgacaacaaacacgagcagcgaaactgcagaaagaggggatcagtctagtttagcaaattctccacctgaagccaaaagacaaaggttctctgtttagtcctagaaaagtatgggagaaggctactaatgtttcctctttagcaagtatccgattgttttaaaagtaattttagagggatacttgcaaaaagaagagaagattcagttatct

SEQ ID NO: 79619 - protein, 268 aa, Arabidopsis thaliana
  peptide (1)..(268): Ceres Seq. ID no. 12652190
  misc_feature (69)..(166): Pfam Name: K-box region Pfam Description: K-box region
  misc_feature (1)..(268): Homolog of NCBI NO: 15240706 NR Description: floral homeotic protein, AGL15; protein id:
  misc_feature (7)..(268): Homolog of NCBI NO: 862646 NR Description: MADS-box protein AGL15
  misc_feature (1)..(248): Homolog of NCBI NO: 3831486 NR Description: Agamous-like MADS box protein AGL15
  misc_feature (1)..(248): Homolog of NCBI NO: 7446561 NR Description: MADS box protein AGL15 (type 2) - rape
  misc_feature (1)..(246): Homolog of NCBI NO: 15230284 NR Description: MADS-box protein; protein id: At3g57390.1, by cDNA: 37288., supported by cDNA: gi_11545540 [Arabidopsis
  misc_feature (1)..(246): Homolog of NCBI NO: 21593229 NR Description: MADS transcription factor-like protein
  misc_feature (1)..(173): Homolog of NCBI NO: 29467138 NR Description: MADS-box transcription factor SrMADS1
  misc_feature (1)..(173): Homolog of NCBI NO: 21396795 NR Description: MADS-box gene 2 protein [Lycopodium annotinum]
  misc_feature (1)..(164): Homolog of NCBI NO: 21396803 NR Description: MADS-box gene 6 protein [Lycopodium annotinum]
  misc_feature (1)..(214): Homolog of NCBI NO: 7446559 NR Description: MADS box protein MADS2 - Monterey pine
MGRGKIEIKRIENANSRQVTFSKRRSGLLKKARELSVLCDAEVAVIVFSKSGKLFEYSSTGMKQTLSRYGNHQSSSASKAEEDCAEVDILKDQLSKLQEKHLQLQGKGLNPLTFKELQSLEQQLYHALITVRERKERLLTNQLEESRLKEQRAELENETLRRQVQELRSFLPSFTHYVPSYIKCFAIDPKNALINHDSKCSLQNTDSDTTLQLGLPGEAHDRRTNEGERESPSSDSVTTNTSSETAERGDQSSLANSPPEAKRQRFSV

SEQ ID NO: 79620 - protein, 207 aa, Arabidopsis thaliana
  peptide (1)..(207): Ceres Seq. ID no. 12652191
  misc_feature (8)..(105): Pfam Name: K-box region Pfam Description: K-box region
  misc_feature (1)..(207): Homolog of NCBI NO: 15240706 NR Description: floral homeotic protein, AGL15; protein id:
  misc_feature (1)..(207): Homolog of NCBI NO: 862646 NR Description: MADS-box protein AGL15
  misc_feature (1)..(187): Homolog of NCBI NO: 3831486 NR Description: Agamous-like MADS box protein AGL15
  misc_feature (1)..(187): Homolog of NCBI NO: 7446561 NR Description: MADS box protein AGL15 (type 2) - rape
  misc_feature (1)..(185): Homolog of NCBI NO: 15230284 NR Description: MADS-box protein; protein id: At3g57390.1, by cDNA: 37288., supported by cDNA: gi_11545540 [Arabidopsis
  misc_feature (1)..(185): Homolog of NCBI NO: 21593229 NR Description: MADS transcription factor-like protein
  misc_feature (1)..(112): Homolog of NCBI NO: 29467138 NR Description: MADS-box transcription factor SrMADS1
  misc_feature (1)..(112): Homolog of NCBI NO: 21396795 NR Description: MADS-box gene 2 protein [Lycopodium annotinum]
  misc_feature (1)..(103): Homolog of NCBI NO: 21396803 NR Description: MADS-box gene 6 protein [Lycopodium annotinum]
  misc_feature (1)..(153): Homolog of NCBI NO: 7446559 NR Description: MADS box protein MADS2 - Monterey pine
MKQTLSRYGNHQSSSASKAEEDCAEVDILKDQLSKLQEKHLQLQGKGLNPLTFKELQSLEQQLYHALITVRERKERLLTNQLEESRLKEQRAELENETLRRQVQELRSFLPSFTHYVPSYIKCFAIDPKNALINHDSKCSLQNTDSDTTLQLGLPGEAHDRRTNEGERESPSSDSVTTNTSSETAERGDQSSLANSPPEAKRQRFSV

SEQ ID NO: 79621 - DNA, 1107 bp, Arabidopsis thaliana
  misc_feature (1)..(1107): Ceres Seq. ID no. 12652195
  misc_feature: MA Experiment ID: 20000182 Result: Up-regulated in Transcription
  misc_feature: MA Experiment 20000182 PARAMETER Experiment Name: At_2mM_SA_P Parameter: Age (day) Value: 14
  misc_feature: MA Experiment 20000182 PARAMETER Experiment Name: At_2mM_SA_P Parameter: Organism Value: A. thaliana
  misc_feature: MA Experiment 20000182 PARAMETER Experiment Name: At_2mM_SA_P Parameter: Plant Line Value: WS
  misc_feature: MA Experiment 20000182 PARAMETER Experiment Name: At_2mM_SA_P Parameter: Timepoint (hr) Value: 6
  misc_feature: MA Experiment 20000182 PARAMETER Experiment Name: At_2mM_SA_P Parameter: Tissue Value: Aerial
  misc_feature: MA Experiment 20000182 PARAMETER Experiment Name: At_2mM_SA_P Parameter: Treatment Value: 2mM SA vs. No Treatment
  misc_feature: MA Experiment ID: 20000437 Result: Up-regulated in Transcription
  misc_feature: MA Experiment 20000437 PARAMETER Experiment Name: At_Drought_P Parameter: Age (day) Value: 8
  misc_feature: MA Experiment 20000437 PARAMETER Experiment Name: At_Drought_P Parameter: Organism Value: A. thaliana
  misc_feature: MA Experiment 20000437 PARAMETER Experiment Name: At_Drought_P Parameter: Plant Line Value: WS
  misc_feature: MA Experiment 20000437 PARAMETER Experiment Name: At_Drought_P Parameter: Timepoint (hr) Value: 24
  misc_feature: MA Experiment 20000437 PARAMETER Experiment Name: At_Drought_P Parameter: Tissue Value: Whole Plant
  misc_feature: MA Experiment 20000437 PARAMETER Experiment Name: At_Drought_P Parameter: Treatment Value: Drought vs. No Drought
atggctcctcctccggcgaagatgcaagagatccaccaattcctctcctccgcactcacccagcgtggcccttccgctcttccatacgccgagaacaccaagtcgctaatccgtcaacacctcctcaacctaatctcttcctacacttccctcgaccccaaaacggcaacgtttacacacaacgatggccgatccgtgattctcctccaagccgacggtacaatcccgatgcctttccaaggcgtcagctacaacatccccgtcgtgatctggctcctcgaatcttaccctcagtatcctccttgcgtttacgtgaatcctacacgcgacatgatcatcaaacgacctcactctaatgtctctccttctggactcgtctctcttccttacctccaaaattggatttaccctagctccaatctcgtagatctcgcctctcatctcagcgccgccttctctcgtgatccgccgctttactctcagcgccgtcctcctccgcaaccgtctccttcgatcggatctggatactcgagacctcttcctcctcgccagacggatgatgcggcagaggtatataagaagaacgctatcaacaggattgttgagatggttcatggtgatattgtattgatgaggagtgctagagaagtggagacggaaggattactgagtttacaatctgatcttaagagaagagaagaggagatcaacaatggttttaaggagatggtgattgagaaagagaccttagagcagcaactacaggttattgctatgaatactgatgttcttggctcttggattagggagaatcaagggaaagccaaggatttgctagtggatttggatgttgatgattcatttgaatgcattgactcattgtctaagcagatgttagagtgtactgcattggatttagctattgaagatgttgtttattccatggataaatcgtttagagatggttcgttaccgtttgatcagtatttgaggaatgtgaggttgttgtcgagggagcagttcttccaccgagccacggctgagaaagttagggagatacagatggatgctcaggttgcttccattgcagctaggttgcattcgtga

SEQ ID NO: 79622 - protein, 368 aa, Arabidopsis thaliana
  peptide (1)..(368): Ceres Seq. ID no. 12652196
  misc_feature (31)..(355): Pfam Name: Tumour susceptibility gene 101 protein (TSG101) Pfam Description: Tumour susceptibility gene 101 protein (TSG101)
  misc_feature (1)..(368): Homolog of NCBI NO: 15240732 NR Description: putative protein; protein id: At5g13860.1 thaliana] >gi|10177652|dbj|BAB11114.1| contains similarity to polypeptide associated complex alpha chain~gene_id:MAC12.18
  misc_feature (150)..(368): Homolog of NCBI NO: 18399596 NR Description: expressed protein; protein id: At3g12400.1
  misc_feature (1)..(179): Homolog of NCBI NO: 18399596 NR Description: expressed protein; protein id: At3g12400.1
  misc_feature (164)..(352): Homolog of NCBI NO: 5454140 NR Description: tumor susceptibility gene 101 [Homo sapiens] Tumor susceptibility gene 101 protein >gi|3184258|gb|AAC52083.1|
  misc_feature (34)..(181): Homolog of NCBI NO: 5454140 NR Description: tumor susceptibility gene 101 [Homo sapiens] Tumor susceptibility gene 101 protein >gi|3184258|gb|AAC52083.1|
  misc_feature (164)..(352): Homolog of NCBI NO: 12803337 NR Description: tumor susceptibility gene 101 [Homo sapiens]
  misc_feature (34)..(181): Homolog of NCBI NO: 12803337 NR Description: tumor susceptibility gene 101 [Homo sapiens]
  misc_feature (129)..(352): Homolog of NCBI NO: 11230780 NR Description: tumor susceptibility gene 101 protein [Mus >gi|9789789|sp|Q61187|T101_MOUSE Tumor susceptibility gene 101 >gi|3184260|gb|AAC53586.1| tumor susceptibility protein TSG101
  misc_feature (37)..(161): Homolog of NCBI NO: 11230780 NR Description: tumor susceptibility gene 101 protein [Mus >gi|9789789|sp|Q61187|T101_MOUSE Tumor susceptibility gene 101 >gi|3184260|gb|AAC53586.1| tumor susceptibility protein TSG101
  misc_feature (174)..(359): Homolog of NCBI NO: 40745470 NR Description: hypothetical protein AN2521.2 [Aspergillus
MAPPPAKMQEIHQFLSSALTQRGPSALPYAENTKSLIRQHLLNLISSYTSLDPKTATFTHNDGRSVILLQADGTIPMPFQGVSYNIPVVIWLLESYPQYPPCVYVNPTRDMIIKRPHSNVSPSGLVSLPYLQNWIYPSSNLVDLASHLSAAFSRDPPLYSQRRPPPQPSPSIGSGYSRPLPPRQTDDAAEVYKKNAINRIVEMVHGDIVLMRSAREVETEGLLSLQSDLKRREEEINNGFKEMVIEKETLEQQLQVIAMNTDVLGSWIRENQGKAKDLLVDLDVDDSFECIDSLSKQMLECTALDLAIEDVVYSMDKSFRDGSLPFDQYLRNVRLLSREQFFHRATAEKVREIQMDAQVASIAARLHS

SEQ ID NO: 79623 - protein, 361 aa, Arabidopsis thaliana
  peptide (1)..(361): Ceres Seq. ID no. 12652197
  misc_feature (24)..(348): Pfam Name: Tumour susceptibility gene 101 protein (TSG101) Pfam Description: Tumour susceptibility gene 101 protein (TSG101)
  misc_feature (1)..(361): Homolog of NCBI NO: 15240732 NR Description: putative protein; protein id: At5g13860.1 thaliana] >gi|10177652|dbj|BAB11114.1| contains similarity to polypeptide associated complex alpha chain~gene_id:MAC12.18
  misc_feature (143)..(361): Homolog of NCBI NO: 18399596 NR Description: expressed protein; protein id: At3g12400.1
  misc_feature (1)..(172): Homolog of NCBI NO: 18399596 NR Description: expressed protein; protein id: At3g12400.1
  misc_feature (157)..(345): Homolog of NCBI NO: 5454140 NR Description: tumor susceptibility gene 101 [Homo sapiens] Tumor susceptibility gene 101 protein >gi|3184258|gb|AAC52083.1|
  misc_feature (27)..(174): Homolog of NCBI NO: 5454140 NR Description: tumor susceptibility gene 101 [Homo sapiens] Tumor susceptibility gene 101 protein >gi|3184258|gb|AAC52083.1|
  misc_feature (157)..(345): Homolog of NCBI NO: 12803337 NR Description: tumor susceptibility gene 101 [Homo sapiens]
  misc_feature (27)..(174): Homolog of NCBI NO: 12803337 NR Description: tumor susceptibility gene 101 [Homo sapiens]
  misc_feature (122)..(345): Homolog of NCBI NO: 11230780 NR Description: tumor susceptibility gene 101 protein [Mus >gi|9789789|sp|Q61187|T101_MOUSE Tumor susceptibility gene 101 >gi|3184260|gb|AAC53586.1| tumor susceptibility protein TSG101
  misc_feature (30)..(154): Homolog of NCBI NO: 11230780 NR Description: tumor susceptibility gene 101 protein [Mus >gi|9789789|sp|Q61187|T101_MOUSE Tumor susceptibility gene 101 >gi|3184260|gb|AAC53586.1| tumor susceptibility protein TSG101
  misc_feature (167)..(352): Homolog of NCBI NO: 40745470 NR Description: hypothetical protein AN2521.2 [Aspergillus
MQEIHQFLSSALTQRGPSALPYAENTKSLIRQHLLNLISSYTSLDPKTATFTHNDGRSVILLQADGTIPMPFQGVSYNIPVVIWLLESYPQYPPCVYVNPTRDMIIKRPHSNVSPSGLVSLPYLQNWIYPSSNLVDLASHLSAAFSRDPPLYSQRRPPPQPSPSIGSGYSRPLPPRQTDDAAEVYKKNAINRIVEMVHGDIVLMRSAREVETEGLLSLQSDLKRREEEINNGFKEMVIEKETLEQQLQVIAMNTDVLGSWIRENQGKAKDLLVDLDVDDSFECIDSLSKQMLECTALDLAIEDVVYSMDKSFRDGSLPFDQYLRNVRLLSREQFFHRATAEKVREIQMDAQVASIAARLHS

SEQ ID NO: 79624 - protein, 292 aa, Arabidopsis thaliana
  peptide (1)..(292): Ceres Seq. ID no. 12652198
  misc_feature (1)..(279): Pfam Name: Tumour susceptibility gene 101 protein (TSG101) Pfam Description: Tumour susceptibility gene 101 protein (TSG101)
  misc_feature (1)..(292): Homolog of NCBI NO: 15240732 NR Description: putative protein; protein id: At5g13860.1 thaliana] >gi|10177652|dbj|BAB11114.1| contains similarity to polypeptide associated complex alpha chain~gene_id:MAC12.18
  misc_feature (74)..(292): Homolog of NCBI NO: 18399596 NR Description: expressed protein; protein id: At3g12400.1
  misc_feature (1)..(103): Homolog of NCBI NO: 18399596 NR Description: expressed protein; protein id: At3g12400.1
  misc_feature (88)..(276): Homolog of NCBI NO: 5454140 NR Description: tumor susceptibility gene 101 [Homo sapiens] Tumor susceptibility gene 101 protein >gi|3184258|gb|AAC52083.1|
  misc_feature (1)..(105): Homolog of NCBI NO: 5454140 NR Description: tumor susceptibility gene 101 [Homo sapiens] Tumor susceptibility gene 101 protein >gi|3184258|gb|AAC52083.1|
  misc_feature (88)..(276): Homolog of NCBI NO: 12803337 NR Description: tumor susceptibility gene 101 [Homo sapiens]
  misc_feature (1)..(105): Homolog of NCBI NO: 12803337 NR Description: tumor susceptibility gene 101 [Homo sapiens]
  misc_feature (53)..(276): Homolog of NCBI NO: 11230780 NR Description: tumor susceptibility gene 101 protein [Mus >gi|9789789|sp|Q61187|T101_MOUSE Tumor susceptibility gene 101 >gi|3184260|gb|AAC53586.1| tumor susceptibility protein TSG101
  misc_feature (1)..(85): Homolog of NCBI NO: 11230780 NR Description: tumor susceptibility gene 101 protein [Mus >gi|9789789|sp|Q61187|T101_MOUSE Tumor susceptibility gene 101 >gi|3184260|gb|AAC53586.1| tumor susceptibility protein TSG101
  misc_feature (98)..(283): Homolog of NCBI NO: 40745470 NR Description: hypothetical protein AN2521.2 [Aspergillus
MPFQGVSYNIPVVIWLLESYPQYPPCVYVNPTRDMIIKRPHSNVSPSGLVSLPYLQNWIYPSSNLVDLASHLSAAFSRDPPLYSQRRPPPQPSPSIGSGYSRPLPPRQTDDAAEVYKKNAINRIVEMVHGDIVLMRSAREVETEGLLSLQSDLKRREEEINNGFKEMVIEKETLEQQLQVIAMNTDVLGSWIRENQGKAKDLLVDLDVDDSFECIDSLSKQMLECTALDLAIEDVVYSMDKSFRDGSLPFDQYLRNVRLLSREQFFHRATAEKVREIQMDAQVASIAARLHS

SEQ ID NO: 79625 - DNA, 1365 bp, Arabidopsis thaliana
  misc_feature (1)..(1365): Ceres Seq. ID no. 12652219
  misc_feature: MA Experiment ID: 20000173 Result: Up-regulated in Transcription
  misc_feature: MA Experiment 20000173 PARAMETER Experiment Name: At_42deg_Heat_P Parameter: Age (day) Value: 14
  misc_feature: MA Experiment 20000173 PARAMETER Experiment Name: At_42deg_Heat_P Parameter: Organism Value: A. thaliana
  misc_feature: MA Experiment 20000173 PARAMETER Experiment Name: At_42deg_Heat_P Parameter: Plant Line Value: WS
  misc_feature: MA Experiment 20000173 PARAMETER Experiment Name: At_42deg_Heat_P Parameter: Temperature (deg C) Value: 42 vs. 22
  misc_feature: MA Experiment 20000173 PARAMETER Experiment Name: At_42deg_Heat_P Parameter: Timepoint (hr) Value: 6
  misc_feature: MA Experiment 20000173 PARAMETER Experiment Name: At_42deg_Heat_P Parameter: Tissue Value: Aerial
  misc_feature: MA Experiment ID: 20000184 Result: Down-regulated in Transcription
  misc_feature: MA Experiment 20000184 PARAMETER Experiment Name: At_Shoots__P Parameter: Age (day) Value: 7
  misc_feature: MA Experiment 20000184 PARAMETER Experiment Name: At_Shoots__P Parameter: Tissue Value: Shoots vs. Whole Plant
aatggatgagagtttcagagtgaggatagacaaggtttttggatctcttgcatcatcttctacgtcttcagcacctgtgagctctctctggtgtctcgcggaagacgagatcgatggaaaccaacggagcggagaaaaggaactttctgaatcattgaacagcttctcggataatggaaagcaggagcatgaatcagatgatttgagcatagatgaggaaaaaggaaggtctagtgaattgcagaagccgagtgattacgatgacgaagagtgggagatcaaaaactcaattgggatggactctactcttgatatggaggaagagctagatgataatgacaaagtggcattaggtgaaaaagtgtactgttgcatgaaggatgtgaatgacgactatgagactgaagcagacgagtgggtggagcttccagcttctttcaatgaaagagagaaggaccctcgagctaatctcatagcagcaaagcttaggcttaaagaggacgcagaagctgttaacaagttgaattctttacatgtctctgaggaacttcaggataatctgtccatgtcgacggaaaacgagaaaccttttgtggtgtctgaagataacttgctgggggctttcaaggagtcacatgttggctcttcagatgagaatgggctgaaaccgatattgaagaggagagaaaaccaggctgatgattctaagtcgccaaagcgtgttaggtttagttctgatgtcaaagataggaccttgactgaaggtgacaacgattctgtgatggaggcaagttcccctaacgaagataaagtagaggcagtctatccgactgggattccagattatatgcggaacccatcaaaatacactcgatatacattcgagtcaggtgaggttgatgaagaatccaacaggaaagcatacatggactttctcaacatgattaggagcaaagacgagtcccttgtagaccctctgatggagcttccaagatcagtggctttcgtaccaaagagaaaaccaatggctgagagtaaagtagaaaatatagacaaggattgtgagggaagaagagttgcaatagctgttgatactatagaagactgcaccatttctgctatggaagaagatgaaccagaaacagctcaacatgtcacaaaaagacctggccgacagtatcgtgccagagccaaggaagatccagaggaatgttgaagatcatcaaccttagcttgctgatttgttacgttttctttatgtttcttgaatgtggtatttgataggtatttgatgattaagaaatcaaatttgttttgacaaacgatatgctacgtctactgtatctaatatctatcataagccag

SEQ ID NO: 79626 - protein, 404 aa, Arabidopsis thaliana
  peptide (1)..(404): Ceres Seq. ID no. 12652220
  misc_feature (1)..(404): Homolog of NCBI NO: 15240759 NR Description: putative protein; protein id: At5g13970.1, by cDNA: gi_19310485 [Arabidopsis thaliana] emb|CAB86638.1~gene_id:MAC12.6~similar to unknown protein
  misc_feature (209)..(400): Homolog of NCBI NO: 15240598 NR Description: putative protein; protein id: At5g13310.1, by cDNA: 37090. [Arabidopsis thaliana] >gi|11358304|pir||T48578
  misc_feature (2)..(120): Homolog of NCBI NO: 15240598 NR Description: putative protein; protein id: At5g13310.1, by cDNA: 37090. [Arabidopsis thaliana] >gi|11358304|pir||T48578
  misc_feature (34)..(400): Homolog of NCBI NO: 38347160 NR Description: OSJNBa0039C07.6 [Oryza sativa (japonica
MDESFRVRIDKVFGSLASSSTSSAPVSSLWCLAEDEIDGNQRSGEKELSESLNSFSDNGKQEHESDDLSIDEEKGRSSELQKPSDYDDEEWEIKNSIGMDSTLDMEEELDDNDKVALGEKVYCCMKDVNDDYETEADEWVELPASFNEREKDPRANLIAAKLRLKEDAEAVNKLNSLHVSEELQDNLSMSTENEKPFVVSEDNLLGAFKESHVGSSDENGLKPILKRRENQADDSKSPKRVRFSSDVKDRTLTEGDNDSVMEASSPNEDKVEAVYPTGIPDYMRNPSKYTRYTFESGEVDEESNRKAYMDFLNMIRSKDESLVDPLMELPRSVAFVPKRKPMAESKVENIDKDCEGRRVAIAVDTIEDCTISAMEEDEPETAQHVTKRPGRQYRARAKEDPEEC

SEQ ID NO: 79627 - protein, 306 aa, Arabidopsis thaliana
  peptide (1)..(306): Ceres Seq. ID no. 12652221
  misc_feature (1)..(306): Homolog of NCBI NO: 15240759 NR Description: putative protein; protein id: At5g13970.1, by cDNA: gi_19310485 [Arabidopsis thaliana] emb|CAB86638.1~gene_id:MAC12.6~similar to unknown protein
  misc_feature (111)..(302): Homolog of NCBI NO: 15240598 NR Description: putative protein; protein id: At5g13310.1, by cDNA: 37090. [Arabidopsis thaliana] >gi|11358304|pir||T48578
  misc_feature (1)..(22): Homolog of NCBI NO: 15240598 NR Description: putative protein; protein id: At5g13310.1, by cDNA: 37090. [Arabidopsis thaliana] >gi|11358304|pir||T48578
  misc_feature (1)..(302): Homolog of NCBI NO: 38347160 NR Description: OSJNBa0039C07.6 [Oryza sativa (japonica
MDSTLDMEEELDDNDKVALGEKVYCCMKDVNDDYETEADEWVELPASFNEREKDPRANLIAAKLRLKEDAEAVNKLNSLHVSEELQDNLSMSTENEKPFVVSEDNLLGAFKESHVGSSDENGLKPILKRRENQADDSKSPKRVRFSSDVKDRTLTEGDNDSVMEASSPNEDKVEAVYPTGIPDYMRNPSKYTRYTFESGEVDEESNRKAYMDFLNMIRSKDESLVDPLMELPRSVAFVPKRKPMAESKVENIDKDCEGRRVAIAVDTIEDCTISAMEEDEPETAQHVTKRPGRQYRARAKEDPEEC

SEQ ID NO: 79628 - protein, 300 aa, Arabidopsis thaliana
  peptide (1)..(300): Ceres Seq. ID no. 12652222
  misc_feature (1)..(300): Homolog of NCBI NO: 15240759 NR Description: putative protein; protein id: At5g13970.1, by cDNA: gi_19310485 [Arabidopsis thaliana] emb|CAB86638.1~gene_id:MAC12.6~similar to unknown protein
  misc_feature (105)..(296): Homolog of NCBI NO: 15240598 NR Description: putative protein; protein id: At5g13310.1, by cDNA: 37090. [Arabidopsis thaliana] >gi|11358304|pir||T48578
  misc_feature (1)..(16): Homolog of NCBI NO: 15240598 NR Description: putative protein; protein id: At5g13310.1, by cDNA: 37090. [Arabidopsis thaliana] >gi|11358304|pir||T48578
  misc_feature (1)..(296): Homolog of NCBI NO: 38347160 NR Description: OSJNBa0039C07.6 [Oryza sativa (japonica
MEEELDDNDKVALGEKVYCCMKDVNDDYETEADEWVELPASFNEREKDPRANLIAAKLRLKEDAEAVNKLNSLHVSEELQDNLSMSTENEKPFVVSEDNLLGAFKESHVGSSDENGLKPILKRRENQADDSKSPKRVRFSSDVKDRTLTEGDNDSVMEASSPNEDKVEAVYPTGIPDYMRNPSKYTRYTFESGEVDEESNRKAYMDFLNMIRSKDESLVDPLMELPRSVAFVPKRKPMAESKVENIDKDCEGRRVAIAVDTIEDCTISAMEEDEPETAQHVTKRPGRQYRARAKEDPEEC

SEQ ID NO: 79629 - DNA, 2691 bp, Arabidopsis thaliana
  misc_feature (1)..(2691): Ceres Seq. ID no. 12652251
  misc_feature: MA Experiment ID: 20000184 Result: Down-regulated in Transcription
  misc_feature: MA Experiment 20000184 PARAMETER Experiment Name: At_Shoots__P Parameter: Age (day) Value: 7
  misc_feature: MA Experiment 20000184 PARAMETER Experiment Name: At_Shoots__P Parameter: Tissue Value: Shoots vs. Whole Plant
  misc_feature: MA Experiment ID: 20000234 Result: Down-regulated in Transcription
  misc_feature: MA Experiment 20000234 PARAMETER Experiment Name: At_Siliques_P Parameter: Age (day) Value: 21
  misc_feature: MA Experiment 20000234 PARAMETER Experiment Name: At_Siliques_P Parameter: Organism Value: A. thaliana
  misc_feature: MA Experiment 20000234 PARAMETER Experiment Name: At_Siliques_P Parameter: Plant Line Value: WS
  misc_feature: MA Experiment 20000234 PARAMETER Experiment Name: At_Siliques_P Parameter: Tissue Value: Less Than 5mm Siliques vs. Whole Plant
  misc_feature: MA Experiment ID: 20000264 Result: Down-regulated in Transcription
  misc_feature: MA Experiment 20000264 PARAMETER Experiment Name: At_Open_Flower_P Parameter: Age (day) Value: 21
  misc_feature: MA Experiment 20000264 PARAMETER Experiment Name: At_Open_Flower_P Parameter: Plant Line Value: WS
  misc_feature: MA Experiment 20000264 PARAMETER Experiment Name: At_Open_Flower_P Parameter: Tissue Value: Open Flower vs. Whole Plant
  misc_feature: MA Experiment ID: 20000265 Result: Down-regulated in Transcription
  misc_feature: MA Experiment 20000265 PARAMETER Experiment Name: At_Open_Flower_P Parameter: Age (day) Value: 21
  misc_feature: MA Experiment 20000265 PARAMETER Experiment Name: At_Open_Flower_P Parameter: Plant Line Value: WS
  misc_feature: MA Experiment 20000265 PARAMETER Experiment Name: At_Open_Flower_P Parameter: Tissue Value: Closed Flower vs. Whole Plant
  misc_feature: MA Experiment ID: 20000286 Result: Down-regulated in Transcription
  misc_feature: MA Experiment 20000286 PARAMETER Experiment Name: At_Open_Flower_P Parameter: Age (day) Value: 21
  misc_feature: MA Experiment 20000286 PARAMETER Experiment Name: At_Open_Flower_P Parameter: Plant Line Value: WS
  misc_feature: MA Experiment 20000286 PARAMETER Experiment Name: At_Open_Flower_P Parameter: Tissue Value: Half Open vs. Whole Plant
  misc_feature: MA Experiment ID: 20000438 Result: Down-regulated in Transcription
  misc_feature: MA Experiment 20000438 PARAMETER Experiment Name: At_Shoots__P Parameter: Age (day) Value: 14
  misc_feature: MA Experiment 20000438 PARAMETER Experiment Name: At_Shoots__P Parameter: Tissue Value: Shoots vs. Whole Plant
  misc_feature: MA Experiment ID: 20000441 Result: Up-regulated in Transcription
  misc_feature: MA Experiment 20000441 PARAMETER Experiment Name: At_1uM_BR-BRZ__P Parameter: Tissue Value: Shoot Apices
  misc_feature: MA Experiment 20000441 PARAMETER Experiment Name: At_1uM_BR-BRZ__P Parameter: Treatment Value: 1uM BR vs. No Treatment
  misc_feature: MA Experiment ID: 20000443 Result: Up-regulated in Transcription
  misc_feature: MA Experiment 20000443 PARAMETER Experiment Name: At_1uM_BR-BRZ__P Parameter: Tissue Value: Shoot Apices
  misc_feature: MA Experiment 20000443 PARAMETER Experiment Name: At_1uM_BR-BRZ__P Parameter: Treatment Value: 1uM BRZ vs. No Treatment
  misc_feature: MA Experiment ID: 20001560 Result: Down-regulated in Transcription
  misc_feature: MA Experiment 20001560 PARAMETER Experiment Name: At_Drought_Soil_Dry_P Parameter: Age (day) Value: 28
  misc_feature: MA Experiment 20001560 PARAMETER Experiment Name: At_Drought_Soil_Dry_P Parameter: Organism Value: A. thaliana
  misc_feature: MA Experiment 20001560 PARAMETER Experiment Name: At_Drought_Soil_Dry_P Parameter: Plant Line Value: WS
  misc_feature: MA Experiment 20001560 PARAMETER Experiment Name: At_Drought_Soil_Dry_P Parameter: Post Timepoint (hr) Value: None
  misc_feature: MA Experiment 20001560 PARAMETER Experiment Name: At_Drought_Soil_Dry_P Parameter: Post-Treatment Value: None
  misc_feature: MA Experiment 20001560 PARAMETER Experiment Name: At_Drought_Soil_Dry_P Parameter: Timepoint (day) Value: 14
  misc_feature: MA Experiment 20001560 PARAMETER Experiment Name: At_Drought_Soil_Dry_P Parameter: Treatment Value: Drought vs. No Drought
  misc_feature: MA Experiment ID: 20001757 Result: Down-regulated in Transcription
  misc_feature: MA Experiment 20001757 PARAMETER Experiment Name: At_50mM_NH4NO3_L-to-H_P Parameter: Timepoint (hr) Value: 6
  misc_feature: MA Experiment 20001757 PARAMETER Experiment Name: At_50mM_NH4NO3_L-to-H_P Parameter: Tissue Value: Leaf
  misc_feature: MA Experiment 20001757 PARAMETER Experiment Name: At_50mM_NH4NO3_L-to-H_P Parameter: Treatment Value: 50mM NH4NO3 vs 100mM Mannitol
acttatctctctctctttttctcatcggcctttgccatggcagatataatcggcggcgaagttgtgacggagctcgtgaggcagctctatgcggtttctcaaaaaaccctcagatgcagaggcatcgccaaaaatctcgccaccatgatcgatggtcttcaaccaacgatcaaggagatccaatacagcggcgtcgagctcacacctcatcgccaggctcagttgcgtatgttctcggaaaccttagacaagtgtaggaagctcaccgagaaagttcttaaatccagccgttggaacatggttagacagctactccatgttaggaaaatggagaatcttcagagtaaagtgtctagctttctcaacggtcaattgttagtccatgttctcgctgatgttcatcatgttcgagccgattctgaattccggttcgatcggattgataggaaggttgatagtttgaatgagaagcttggttctatgaaactcaggggaagtgaatcgttgcgtgaggcgttgaagacggccgaggctaccgttgagatggtgacaaccgatggtgctgatttgggggtgggattggatttgggaaagaggaaggtgaaggagatgttgtttaaatccattgatggggaaagacttattggtatctctgggatgagtggttcagggaaaaccactcttgccaaagagcttgcccgggacgaggaggttcgaggccactttgggaacaaggttttgtttctgactgtgtcacaatctcccaatcttgaggagcttagagcccatatatggggatttcttactagttatgaggctggggttggtgctactcttccagaatcgaggaagctagtgatccttgatgatgtttggacaagggaatctctggaccagctgatgttcgaaaatattcctggaaccacaactcttgtggtctcacggtctaaactcgcagattctagagtcacttatgatgtagagttactcaatgaacatgaagcaacggccctgttctgtctctctgttttcaatcagaaattagtgccttcagggttcagccaaagtttggtcaagcaggttgttggggagtgtaaaggtctacctttgtctctgaaagtcattggtgcttcattgaaagaacgacctgaaaaatattgggaaggtgcagtggagaggctatcaagaggtgaacctgctgatgaaactcatgagagtagagtgtttgctcaaatcgaagcaactctagaaaatcttgaccctaaaaccagagattgtttcttggttctcggtgctttccctgaagataagaagatccctcttgatgttctcatcaacgtgttggttgagttgcatgatctcgaggatgcaactgcttttgctgttattgttgatttagcaaacaggaatctccttactcttgtgaaagatccaaggtttggacatatgtacactagctactatgatatatttgtcacgcagcatgatgttctaagagatgtagcacttcgtcttagcaatcatgggaaagtaaataacagagagcggttattgatgccaaaaagagagtcaatgcttccgagagaatgggagaggaacaatgatgagccatacaaagccagagtagtttccattcacacaggagaaatgactcagatggattggtttgacatggaactccctaaggctgaagttttgatactacacttctcttctgacaagtatgtattgcctcctttcattgctaagatgggcaagcttacagcgctcgtgatcatcaacaatggtatgtctcctgcgcgtctacatgacttctccatctttaccaatttggccaaactcaagagtctctggcttcagagggttcatgtccctgaactctctagcagtacagtgcccttgcaaaacctccacaagctgtctctcatattctgcaagatcaacactagtcttgatcagacagagctagacattgcccaaatcttcccaaaattgtctgatcttacaatagatcattgtgatgatcttctggaactaccttcgaccatctgtggaatcacctctctcaattccatcagcataacaaattgtccccgcatcaaggaattgcctaagaatctgagtaagctaaaagcccttcagcttctgaggctatacgcttgccatgagctgaattctctgcctgtggaaatctgtgaactgccaagactaaagtatgttgacatttctcaatgtgtcagcctgagttctcttccggaaaagataggaaaggtaaagacacttgagaaaatcgacacgagggaatgcagcttatcgagcataccaaactctgtggttttattgacttctctacgccatgtaatatgcgatagagaggctttatggatgtgggaaaaggtccagaaggcggttgcaggacttcgtgttgaagctgcggaaaaatctttcagcagggattggctcgacgattaggttcgtgattctctccctccgagcccttagaagcatgttgtataaaatacttaattgctaatctgtagcaaagtcttgtataatattatattttatgagcacactcaagagtcaagagtcagtgcaaacttcgttcttgctctttctccagaaatttatctaactataaaatttccattcaagaatcagatttatgttagtatcattccagattccttt

SEQ ID NO: 79630 - protein, 823 aa, Arabidopsis thaliana
  peptide (1)..(823): Ceres Seq. ID no. 12652252
  misc_feature (324)..(449): Pfam Name: NB-ARC domain Pfam Description: NB-ARC domain
  misc_feature (12)..(823): Homolog of NCBI NO: 30689664 NR Description: disease resistance protein (CC-NBS-LRR class),
  misc_feature (171)..(823): Homolog of NCBI NO: 30692890 NR Description: disease resistance protein (CC-NBS-LRR class),
  misc_feature (15)..(222): Homolog of NCBI NO: 30692890 NR Description: disease resistance protein (CC-NBS-LRR class),
  misc_feature (171)..(823): Homolog of NCBI NO: 25403197 NR Description: probable disease resistance protein [imported] - thaliana >gi|10998939|gb|AAG26078.1|AC069299_4 disease resistance putative [Arabidopsis thaliana]
  misc_feature (15)..(222): Homolog of NCBI NO: 25403197 NR Description: probable disease resistance protein [imported] - thaliana >gi|10998939|gb|AAG26078.1|AC069299_4 disease resistance putative [Arabidopsis thaliana]
  misc_feature (204)..(823): Homolog of NCBI NO: 15238054 NR Description: disease resistance protein (NBS-LRR class), protein id: At5g47280.1 [Arabidopsis thaliana]
  misc_feature (12)..(360): Homolog of NCBI NO: 7485661 NR Description: hypothetical protein F17M5.60 - Arabidopsis >gi|4490297|emb|CAB38788.1| putative protein [Arabidopsis >gi|7270278|emb|CAB80047.1| putative protein [Arabidopsis
  misc_feature (546)..(823): Homolog of NCBI NO: 7485661 NR Description: hypothetical protein F17M5.60 - Arabidopsis >gi|4490297|emb|CAB38788.1| putative protein [Arabidopsis >gi|7270278|emb|CAB80047.1| putative protein [Arabidopsis
  misc_feature (17)..(813): Homolog of NCBI NO: 15240127 NR Description: disease resistance protein (CC-NBS-LRR class), protein id: At5g66910.1, supported by cDNA: gi_18087525
  misc_feature (17)..(813): Homolog of NCBI NO: 15240126 NR Description: disease resistance protein (CC-NBS-LRR class), protein id: At5g66900.1 [Arabidopsis thaliana]
TYLSLFFSSAFAMADIIGGEVVTELVRQLYAVSQKTLRCRGIAKNLATMIDGLQPTIKEIQYSGVELTPHRQAQLRMFSETLDKCRKLTEKVLKSSRWNMVRQLLHVRKMENLQSKVSSFLNGQLLVHVLADVHHVRADSEFRFDRIDRKVDSLNEKLGSMKLRGSESLREALKTAEATVEMVTTDGADLGVGLDLGKRKVKEMLFKSIDGERLIGISGMSGSGKTTLAKELARDEEVRGHFGNKVLFLTVSQSPNLEELRAHIWGFLTSYEAGVGATLPESRKLVILDDVWTRESLDQLMFENIPGTTTLVVSRSKLADSRVTYDVELLNEHEATALFCLSVFNQKLVPSGFSQSLVKQVVGECKGLPLSLKVIGASLKERPEKYWEGAVERLSRGEPADETHESRVFAQIEATLENLDPKTRDCFLVLGAFPEDKKIPLDVLINVLVELHDLEDATAFAVIVDLANRNLLTLVKDPRFGHMYTSYYDIFVTQHDVLRDVALRLSNHGKVNNRERLLMPKRESMLPREWERNNDEPYKARVVSIHTGEMTQMDWFDMELPKAEVLILHFSSDKYVLPPFIAKMGKLTALVIINNGMSPARLHDFSIFTNLAKLKSLWLQRVHVPELSSSTVPLQNLHKLSLIFCKINTSLDQTELDIAQIFPKLSDLTIDHCDDLLELPSTICGITSLNSISITNCPRIKELPKNLSKLKALQLLRLYACHELNSLPVEICELPRLKYVDISQCVSLSSLPEKIGKVKTLEKIDTRECSLSSIPNSVVLLTSLRHVICDREALWMWEKVQKAVAGLRVEAAEKSFSRDWLDD

SEQ ID NO: 79631 - protein, 811 aa, Arabidopsis thaliana
  peptide (1)..(811): Ceres Seq. ID no. 12652253
  misc_feature (312)..(437): Pfam Name: NB-ARC domain Pfam Description: NB-ARC domain
  misc_feature (1)..(811): Homolog of NCBI NO: 30689664 NR Description: disease resistance protein (CC-NBS-LRR class),
  misc_feature (159)..(811): Homolog of NCBI NO: 30692890 NR Description: disease resistance protein (CC-NBS-LRR class),
  misc_feature (3)..(210): Homolog of NCBI NO: 30692890 NR Description: disease resistance protein (CC-NBS-LRR class),
  misc_feature (159)..(811): Homolog of NCBI NO: 25403197 NR Description: probable disease resistance protein [imported] - thaliana >gi|10998939|gb|AAG26078.1|AC069299_4 disease resistance putative [Arabidopsis thaliana]
  misc_feature (3)..(210): Homolog of NCBI NO: 25403197 NR Description: probable disease resistance protein [imported] - thaliana >gi|10998939|gb|AAG26078.1|AC069299_4 disease resistance putative [Arabidopsis thaliana]
  misc_feature (192)..(811): Homolog of NCBI NO: 15238054 NR Description: disease resistance protein (NBS-LRR class), protein id: At5g47280.1 [Arabidopsis thaliana]
  misc_feature (1)..(348): Homolog of NCBI NO: 7485661 NR Description: hypothetical protein F17M5.60 - Arabidopsis >gi|4490297|emb|CAB38788.1| putative protein [Arabidopsis >gi|7270278|emb|CAB80047.1| putative protein [Arabidopsis
  misc_feature (534)..(811): Homolog of NCBI NO: 7485661 NR Description: hypothetical protein F17M5.60 - Arabidopsis >gi|4490297|emb|CAB38788.1| putative protein [Arabidopsis >gi|7270278|emb|CAB80047.1| putative protein [Arabidopsis
  misc_feature (5)..(801): Homolog of NCBI NO: 15240127 NR Description: disease resistance protein (CC-NBS-LRR class), protein id: At5g66910.1, supported by cDNA: gi_18087525
  misc_feature (5)..(801): Homolog of NCBI NO: 15240126 NR Description: disease resistance protein (CC-NBS-LRR class), protein id: At5g66900.1 [Arabidopsis thaliana]
MADIIGGEVVTELVRQLYAVSQKTLRCRGIAKNLATMIDGLQPTIKEIQYSGVELTPHRQAQLRMFSETLDKCRKLTEKVLKSSRWNMVRQLLHVRKMENLQSKVSSFLNGQLLVHVLADVHHVRADSEFRFDRIDRKVDSLNEKLGSMKLRGSESLREALKTAEATVEMVTTDGADLGVGLDLGKRKVKEMLFKSIDGERLIGISGMSGSGKTTLAKELARDEEVRGHFGNKVLFLTVSQSPNLEELRAHIWGFLTSYEAGVGATLPESRKLVILDDVWTRESLDQLMFENIPGTTTLVVSRSKLADSRVTYDVELLNEHEATALFCLSVFNQKLVPSGFSQSLVKQVVGECKGLPLSLKVIGASLKERPEKYWEGAVERLSRGEPADETHESRVFAQIEATLENLDPKTRDCFLVLGAFPEDKKIPLDVLINVLVELHDLEDATAFAVIVDLANRNLLTLVKDPRFGHMYTSYYDIFVTQHDVLRDVALRLSNHGKVNNRERLLMPKRESMLPREWERNNDEPYKARVVSIHTGEMTQMDWFDMELPKAEVLILHFSSDKYVLPPFIAKMGKLTALVIINNGMSPARLHDFSIFTNLAKLKSLWLQRVHVPELSSSTVPLQNLHKLSLIFCKINTSLDQTELDIAQIFPKLSDLTIDHCDDLLELPSTICGITSLNSISITNCPRIKELPKNLSKLKALQLLRLYACHELNSLPVEICELPRLKYVDISQCVSLSSLPEKIGKVKTLEKIDTRECSLSSIPNSVVLLTSLRHVICDREALWMWEKVQKAVAGLRVEAAEKSFSRDWLDD

SEQ ID NO: 79632 - protein, 775 aa, Arabidopsis thaliana
  peptide (1)..(775): Ceres Seq. ID no. 12652254
  misc_feature (276)..(401): Pfam Name: NB-ARC domain Pfam Description: NB-ARC domain
  misc_feature (1)..(775): Homolog of NCBI NO: 30689664 NR Description: disease resistance protein (CC-NBS-LRR class),
  misc_feature (123)..(775): Homolog of NCBI NO: 30692890 NR Description: disease resistance protein (CC-NBS-LRR class),
  misc_feature (1)..(174): Homolog of NCBI NO: 30692890 NR Description: disease resistance protein (CC-NBS-LRR class),
  misc_feature (123)..(775): Homolog of NCBI NO: 25403197 NR Description: probable disease resistance protein [imported] - thaliana >gi|10998939|gb|AAG26078.1|AC069299_4 disease resistance putative [Arabidopsis thaliana]
  misc_feature (1)..(174): Homolog of NCBI NO: 25403197 NR Description: probable disease resistance protein [imported] - thaliana >gi|10998939|gb|AAG26078.1|AC069299_4 disease resistance putative [Arabidopsis thaliana]
  misc_feature (156)..(775): Homolog of NCBI NO: 15238054 NR Description: disease resistance protein (NBS-LRR class), protein id: At5g47280.1 [Arabidopsis thaliana]
  misc_feature (1)..(312): Homolog of NCBI NO: 7485661 NR Description: hypothetical protein F17M5.60 - Arabidopsis >gi|4490297|emb|CAB38788.1| putative protein [Arabidopsis >gi|7270278|emb|CAB80047.1| putative protein [Arabidopsis
  misc_feature (498)..(775): Homolog of NCBI NO: 7485661 NR Description: hypothetical protein F17M5.60 - Arabidopsis >gi|4490297|emb|CAB38788.1| putative protein [Arabidopsis >gi|7270278|emb|CAB80047.1| putative protein [Arabidopsis
  misc_feature (1)..(765): Homolog of NCBI NO: 15240127 NR Description: disease resistance protein (CC-NBS-LRR class), protein id: At5g66910.1, supported by cDNA: gi_18087525
  misc_feature (1)..(765): Homolog of NCBI NO: 15240126 NR Description: disease resistance protein (CC-NBS-LRR class), protein id: At5g66900.1 [Arabidopsis thaliana]
MIDGLQPTIKEIQYSGVELTPHRQAQLRMFSETLDKCRKLTEKVLKSSRWNMVRQLLHVRKMENLQSKVSSFLNGQLLVHVLADVHHVRADSEFRFDRIDRKVDSLNEKLGSMKLRGSESLREALKTAEATVEMVTTDGADLGVGLDLGKRKVKEMLFKSIDGERLIGISGMSGSGKTTLAKELARDEEVRGHFGNKVLFLTVSQSPNLEELRAHIWGFLTSYEAGVGATLPESRKLVILDDVWTRESLDQLMFENIPGTTTLVVSRSKLADSRVTYDVELLNEHEATALFCLSVFNQKLVPSGFSQSLVKQVVGECKGLPLSLKVIGASLKERPEKYWEGAVERLSRGEPADETHESRVFAQIEATLENLDPKTRDCFLVLGAFPEDKKIPLDVLINVLVELHDLEDATAFAVIVDLANRNLLTLVKDPRFGHMYTSYYDIFVTQHDVLRDVALRLSNHGKVNNRERLLMPKRESMLPREWERNNDEPYKARVVSIHTGEMTQMDWFDMELPKAEVLILHFSSDKYVLPPFIAKMGKLTALVIINNGMSPARLHDFSIFTNLAKLKSLWLQRVHVPELSSSTVPLQNLHKLSLIFCKINTSLDQTELDIAQIFPKLSDLTIDHCDDLLELPSTICGITSLNSISITNCPRIKELPKNLSKLKALQLLRLYACHELNSLPVEICELPRLKYVDISQCVSLSSLPEKIGKVKTLEKIDTRECSLSSIPNSVVLLTSLRHVICDREALWMWEKVQKAVAGLRVEAAEKSFSRDWLDD

SEQ ID NO: 79633 - DNA, 1154 bp, Arabidopsis thaliana
  misc_feature (1)..(1154): Ceres Seq. ID no. 12652294
  misc_feature: MA Experiment ID: 20000314 Result: Up-regulated in Transcription
  misc_feature: MA Experiment 20000314 PARAMETER Experiment Name: At_14day_Shoots-Roots_Sub_P Parameter: Age (day) Value: 14
  misc_feature: MA Experiment 20000314 PARAMETER Experiment Name: At_14day_Shoots-Roots_Sub_P Parameter: Organism Value: A. thaliana
  misc_feature: MA Experiment 20000314 PARAMETER Experiment Name: At_14day_Shoots-Roots_Sub_P Parameter: Plant Line Value: WS
  misc_feature: MA Experiment 20000314 PARAMETER Experiment Name: At_14day_Shoots-Roots_Sub_P Parameter: Tissue Value: Roots vs. Whole Plant
  misc_feature: MA Experiment ID: 20000315 Result: Up-regulated in Transcription
  misc_feature: MA Experiment 20000315 PARAMETER Experiment Name: At_14day_Shoots-Roots_Sub_P Parameter: Age (day) Value: 14
  misc_feature: MA Experiment 20000315 PARAMETER Experiment Name: At_14day_Shoots-Roots_Sub_P Parameter: Organism Value: A. thaliana
  misc_feature: MA Experiment 20000315 PARAMETER Experiment Name: At_14day_Shoots-Roots_Sub_P Parameter: Plant Line Value: WS
  misc_feature: MA Experiment 20000315 PARAMETER Experiment Name: At_14day_Shoots-Roots_Sub_P Parameter: Tissue Value: Shoots vs. Whole Plant
  misc_feature: MA Experiment ID: 20000352 Result: Down-regulated in Transcription
  misc_feature: MA Experiment 20000352 PARAMETER Experiment Name: At_Drought_Sub_P Parameter: Age (day) Value: 7
  misc_feature: MA Experiment 20000352 PARAMETER Experiment Name: At_Drought_Sub_P Parameter: Organism Value: A. thaliana
  misc_feature: MA Experiment 20000352 PARAMETER Experiment Name: At_Drought_Sub_P Parameter: Plant Line Value: WS
  misc_feature: MA Experiment 20000352 PARAMETER Experiment Name: At_Drought_Sub_P Parameter: Timepoint (hr) Value: 6
  misc_feature: MA Experiment 20000352 PARAMETER Experiment Name: At_Drought_Sub_P Parameter: Tissue Value: Whole Plant
  misc_feature: MA Experiment 20000352 PARAMETER Experiment Name: At_Drought_Sub_P Parameter: Treatment Value: Drought vs. No Drought
  misc_feature: MA Experiment ID: 20001807 Result: Up-regulated in Transcription
  misc_feature: MA Experiment 20001807 PARAMETER Experiment Name: At_50mM_NH4NO3_L-to-H_Sub_P Parameter: Timepoint (hr) Value: 6
  misc_feature: MA Experiment 20001807 PARAMETER Experiment Name: At_50mM_NH4NO3_L-to-H_Sub_P Parameter: Tissue Value: Leaf
  misc_feature: MA Experiment 20001807 PARAMETER Experiment Name: At_50mM_NH4NO3_L-to-H_Sub_P Parameter: Treatment Value: 50mM NH4NO3 vs 100mM Mannitol
gaaataacctcatagtgtcgatatggcttgccaaaacaatctcgttgtgaagcaaatcatcgacttgtacgaccaaatctcaaagctcaagagcttaaaaccttccaaaaatgtcgacactttgttcggacaactcgtgtccacgtgcttacccacggatacaaacatcgatgtcacaaatatgtgtgaagaagtcaaagacatgagagctaatctcatcaagctttgtggtgaagccgaaggttatttagagcaacacttctccacaattttgggatctttacaagaagaccaaaacccacttgaccatttacacatctttccttactactccaactacctcaagctaggcaagctcgagttcgatctcctgagccaacactcaagccatgtccccaccaagattgccttcgtgggttcgggtccgatgcctctcacatccatcgtattggccaagtttcacctccccaacacgacgttccacaactttgacatcgactcacacgcaaacacactcgcttcaaacctcgtctctcgcgacccggacctctcaaaacgcatgatcttccacacaacggacgtactaaacgcaaccgaaggccttgaccaatatgacgtcgttttcttagcggcgcttgtagggatggacaaagagtcaaaggtcaaagccatcgagcacttggagaaacacatggctcctggagctgttcttatgctaaggagtgctcatgctctcagagctttcttatatccaatcgttgactcgtctgatctcaaaggctttcaactcttgaccatctatcatccaaccgatgacgtggttaactcggttgtgatcgcacgtaagctcggtggtccgaccacgcccggggttaatggtactcgtggatgcatgtttatgccttgtaactgctccaagattcacgcgatcatgaacaaccgtggtaagaagaatatgatcgaggagtttagtgccatcgagtaaacaaacaattaataaaacacatctcttttcttaagattgtgttaatgtttttgtcttatattaactgctcttttcatttcatgtcttgtgtgtgtgtggctacgcttattaagtgttaagtttgtgaattttgagttctttgatctttgttatgaatgaaaaagatacc

SEQ ID NO: 79634 - protein, 320 aa, Arabidopsis thaliana
  peptide (1)..(320): Ceres Seq. ID no. 12652295
  misc_feature (3)..(281): Pfam Name: Nicotianamine synthase protein Pfam Description: Nicotianamine synthase protein
  misc_feature (1)..(320): Homolog of NCBI NO: 15238376 NR Description: nicotianamine synthase, putative; protein id:
  misc_feature (1)..(320): Homolog of NCBI NO: 4220612 NR Description: nicotianamine synthase [Arabidopsis thaliana]
  misc_feature (1)..(320): Homolog of NCBI NO: 4220614 NR Description: nicotianamine synathase [Arabidopsis thaliana]
  misc_feature (1)..(320): Homolog of NCBI NO: 15241120 NR Description: nicotianamine synthase, putative; protein id: [Arabidopsis thaliana] >gi|27151632|sp|Q9FKT9|NAS2_ARATH
  misc_feature (1)..(320): Homolog of NCBI NO: 15217462 NR Description: nicotianamine synthase, putative; protein id:
  misc_feature (1)..(320): Homolog of NCBI NO: 27528464 NR Description: nicotianamine synthase [Thlaspi caerulescens]
  misc_feature (1)..(320): Homolog of NCBI NO: 40782199 NR Description: putative nicotianamine synthase [Arabidopsis
  misc_feature (3)..(317): Homolog of NCBI NO: 15223535 NR Description: nicotianamine synthase, putative; protein id: supported by cDNA: gi_20466583 [Arabidopsis thaliana] Probable nicotianamine synthase 4 thaliana
  misc_feature (1)..(320): Homolog of NCBI NO: 27151627 NR Description: Nicotianamine synthase
  misc_feature (8)..(276): Homolog of NCBI NO: 20387262 NR Description: ZmNAS3 [Zea mays]
MACQNNLVVKQIIDLYDQISKLKSLKPSKNVDTLFGQLVSTCLPTDTNIDVTNMCEEVKDMRANLIKLCGEAEGYLEQHFSTILGSLQEDQNPLDHLHIFPYYSNYLKLGKLEFDLLSQHSSHVPTKIAFVGSGPMPLTSIVLAKFHLPNTTFHNFDIDSHANTLASNLVSRDPDLSKRMIFHTTDVLNATEGLDQYDVVFLAALVGMDKESKVKAIEHLEKHMAPGAVLMLRSAHALRAFLYPIVDSSDLKGFQLLTIYHPTDDVVNSVVIARKLGGPTTPGVNGTRGCMFMPCNCSKIHAIMNNRGKKNMIEEFSAIE

SEQ ID NO: 79635 - protein, 267 aa, Arabidopsis thaliana
  peptide (1)..(267): Ceres Seq. ID no. 12652296
  misc_feature (1)..(228): Pfam Name: Nicotianamine synthase protein Pfam Description: Nicotianamine synthase protein
  misc_feature (1)..(267): Homolog of NCBI NO: 15238376 NR Description: nicotianamine synthase, putative; protein id:
  misc_feature (1)..(267): Homolog of NCBI NO: 4220612 NR Description: nicotianamine synthase [Arabidopsis thaliana]
  misc_feature (1)..(267): Homolog of NCBI NO: 4220614 NR Description: nicotianamine synathase [Arabidopsis thaliana]
  misc_feature (1)..(267): Homolog of NCBI NO: 15241120 NR Description: nicotianamine synthase, putative; protein id: [Arabidopsis thaliana] >gi|27151632|sp|Q9FKT9|NAS2_ARATH
  misc_feature (1)..(267): Homolog of NCBI NO: 15217462 NR Description: nicotianamine synthase, putative; protein id:
  misc_feature (1)..(267): Homolog of NCBI NO: 27528464 NR Description: nicotianamine synthase [Thlaspi caerulescens]
  misc_feature (1)..(267): Homolog of NCBI NO: 40782199 NR Description: putative nicotianamine synthase [Arabidopsis
  misc_feature (1)..(264): Homolog of NCBI NO: 15223535 NR Description: nicotianamine synthase, putative; protein id: supported by cDNA: gi_20466583 [Arabidopsis thaliana] Probable nicotianamine synthase 4 thaliana
  misc_feature (1)..(267): Homolog of NCBI NO: 27151627 NR Description: Nicotianamine synthase
  misc_feature (1)..(223): Homolog of NCBI NO: 20387262 NR Description: ZmNAS3 [Zea mays]
MCEEVKDMRANLIKLCGEAEGYLEQHFSTILGSLQEDQNPLDHLHIFPYYSNYLKLGKLEFDLLSQHSSHVPTKIAFVGSGPMPLTSIVLAKFHLPNTTFHNFDIDSHANTLASNLVSRDPDLSKRMIFHTTDVLNATEGLDQYDVVFLAALVGMDKESKVKAIEHLEKHMAPGAVLMLRSAHALRAFLYPIVDSSDLKGFQLLTIYHPTDDVVNSVVIARKLGGPTTPGVNGTRGCMFMPCNCSKIHAIMNNRGKKNMIEEFSAIE

SEQ ID NO: 79636 - protein, 260 aa, Arabidopsis thaliana
  peptide (1)..(260): Ceres Seq. ID no. 12652297
  misc_feature (1)..(221): Pfam Name: Nicotianamine synthase protein Pfam Description: Nicotianamine synthase protein
  misc_feature (1)..(260): Homolog of NCBI NO: 15238376 NR Description: nicotianamine synthase, putative; protein id:
  misc_feature (1)..(260): Homolog of NCBI NO: 4220612 NR Description: nicotianamine synthase [Arabidopsis thaliana]
  misc_feature (1)..(260): Homolog of NCBI NO: 4220614 NR Description: nicotianamine synathase [Arabidopsis thaliana]
  misc_feature (1)..(260): Homolog of NCBI NO: 15241120 NR Description: nicotianamine synthase, putative; protein id: [Arabidopsis thaliana] >gi|27151632|sp|Q9FKT9|NAS2_ARATH
  misc_feature (1)..(260): Homolog of NCBI NO: 15217462 NR Description: nicotianamine synthase, putative; protein id:
  misc_feature (1)..(260): Homolog of NCBI NO: 27528464 NR Description: nicotianamine synthase [Thlaspi caerulescens]
  misc_feature (1)..(260): Homolog of NCBI NO: 40782199 NR Description: putative nicotianamine synthase [Arabidopsis
  misc_feature (1)..(257): Homolog of NCBI NO: 15223535 NR Description: nicotianamine synthase, putative; protein id: supported by cDNA: gi_20466583 [Arabidopsis thaliana] Probable nicotianamine synthase 4 thaliana
  misc_feature (1)..(260): Homolog of NCBI NO: 27151627 NR Description: Nicotianamine synthase
  misc_feature (1)..(216): Homolog of NCBI NO: 20387262 NR Description: ZmNAS3 [Zea mays]
MRANLIKLCGEAEGYLEQHFSTILGSLQEDQNPLDHLHIFPYYSNYLKLGKLEFDLLSQHSSHVPTKIAFVGSGPMPLTSIVLAKFHLPNTTFHNFDIDSHANTLASNLVSRDPDLSKRMIFHTTDVLNATEGLDQYDVVFLAALVGMDKESKVKAIEHLEKHMAPGAVLMLRSAHALRAFLYPIVDSSDLKGFQLLTIYHPTDDVVNSVVIARKLGGPTTPGVNGTRGCMFMPCNCSKIHAIMNNRGKKNMIEEFSAIE

SEQ ID NO: 79637 - DNA, 1572 bp, Arabidopsis thaliana
  misc_feature (1)..(1572): Ceres Seq. ID no. 12652339
  misc_feature: Pfam Name: p450 Pfam Description: Cytochrome P450
atgctcgcgtttattataggtttgcttcttcttgcattaactatgaagcgtaaggagaagaagaaaaccatgttaattagccctacgagaaacctctctctccctcccgggccgaaatcttggcctttaatcggaaacctaccggaaatactagggaggaacaaaccggtgttccggtggatacattctctcatgaaagaactcaacaccgatattgcatgtatccgtcttgcgaatactcacgtgatccccgtgacatccccgagaattgcaagagagattctgaagaagcaagactccgttttcgccactagaccgctaacgatgggcacggagtactgcagccgcgggtacttgaccgttgcggtggagccacaaggagagcagtggaagaagatgaggagagtggtggcatctcacgtgacgagcaagaagagcttccaaatgatgctacaaaagagaaccgaagaggctgataacttagtccggtacatcaataaccgtagtgtcaaaaaccgtggtaatgcttttgtggttattgatttaaggcttgcggtacggcaatacagtggaaatgtagctcggaagatgatgtttggtataaggcattttggtaaaggaagtgaagatggatcgggaccagggttggaagagattgaacatgtggaatctttgtttacggttttaacccatctttacgcctttgcattgtcagattatgtcccgtggctaaggttcttggacttggaaggccatgagaaggttgtgagtaacgcaatgagaaatgtaagtaagtataacgacccttttgttgatgaaagactcatgcaatggcgaaatgggaagatgaaagaacctcaagattttcttgacatgtttataatagctaaagacactgacgggaagcctactctgtcggacgaagagatcaaagcacaagtgacggaactaatgttggcgacggttgataatccgtctaacgcggcagagtggggtatggcggagatgattaacgagccgagcatcatgcaaaaagccgtggaagagattgatagggtagttggaaaagaccgtcttgtcattgagtctgatctcccaaatcttaactatgtgaaggcttgtgtgaaagaagcattccggttacaccccgtggcaccgttcaacctccctcacatgtccaccactgatactgtggtagacggttatttcatccccaagggaagccacgtattgattagtcgtatggggattgggagaaatcctagtgtgtgggacaagccgcataagttcgaccctgagagacatttgagcactaacacatgtgtggatctaaacgagtctgatctgaatataatatcgttcagtgcaggacgaagaggttgtatgggtgtggacattgggtcagccatgacgtacatgttactggctcggttgattcaaggattcacgtggttaccagtgcctggtaagaataagattgatatttcagaaagcaagaatgatctttttatggcaaaaccattatacgcggttgccacacctcgtttagctccacatgtgtatccaacctaa

SEQ ID NO: 79638 - protein, 523 aa, Arabidopsis thaliana
  peptide (1)..(523): Ceres Seq. ID no. 12652340
  misc_feature: Pfam Name: p450 Pfam Description: Cytochrome P450
  misc_feature (1)..(523): Homolog of NCBI NO: 13878375 NR Description: Cytochrome P450 79A2 >gi|10176738|dbj|BAB09969.1|
  misc_feature (1)..(523): Homolog of NCBI NO: 18414836 NR Description: cytochrome P450 CYP79A2; protein id: At5g05260.1, by cDNA: gi_7839382 [Arabidopsis thaliana]
  misc_feature (1)..(440): Homolog of NCBI NO: 22327385 NR Description: similar to cytochrome P450 CYP79A2; protein id:
  misc_feature (468)..(523): Homolog of NCBI NO: 22327385 NR Description: similar to cytochrome P450 CYP79A2; protein id:
  misc_feature (1)..(523): Homolog of NCBI NO: 5915822 NR Description: CYTOCHROME P450 79A1 (CYTOCHROME P450TYR)
  misc_feature (5)..(523): Homolog of NCBI NO: 6739530 NR Description: N-hydroxylating cytochrome P450 [Manihot
  misc_feature (29)..(523): Homolog of NCBI NO: 6739527 NR Description: N-hydroxylating cytochrome P450 [Manihot
  misc_feature (11)..(523): Homolog of NCBI NO: 15236088 NR Description: cytochrome P450 - like protein; protein id: supported by cDNA: gi_15028134, supported by cDNA: gi_20259280
  misc_feature (22)..(523): Homolog of NCBI NO: 25991347 NR Description: cytochrome P450 [Brassica napus]
  misc_feature (11)..(523): Homolog of NCBI NO: 5915824 NR Description: Cytochrome P450 79B1 >gi|3283433|gb|AAD03415.1|
MLAFIIGLLLLALTMKRKEKKKTMLISPTRNLSLPPGPKSWPLIGNLPEILGRNKPVFRWIHSLMKELNTDIACIRLANTHVIPVTSPRIAREILKKQDSVFATRPLTMGTEYCSRGYLTVAVEPQGEQWKKMRRVVASHVTSKKSFQMMLQKRTEEADNLVRYINNRSVKNRGNAFVVIDLRLAVRQYSGNVARKMMFGIRHFGKGSEDGSGPGLEEIEHVESLFTVLTHLYAFALSDYVPWLRFLDLEGHEKVVSNAMRNVSKYNDPFVDERLMQWRNGKMKEPQDFLDMFIIAKDTDGKPTLSDEEIKAQVTELMLATVDNPSNAAEWGMAEMINEPSIMQKAVEEIDRVVGKDRLVIESDLPNLNYVKACVKEAFRLHPVAPFNLPHMSTTDTVVDGYFIPKGSHVLISRMGIGRNPSVWDKPHKFDPERHLSTNTCVDLNESDLNIISFSAGRRGCMGVDIGSAMTYMLLARLIQGFTWLPVPGKNKIDISESKNDLFMAKPLYAVATPRLAPHVYPT

SEQ ID NO: 79639 - protein, 509 aa, Arabidopsis thaliana
  peptide (1)..(509): Ceres Seq. ID no. 12652341
  misc_feature: Pfam Name: p450 Pfam Description: Cytochrome P450
  misc_feature (1)..(509): Homolog of NCBI NO: 13878375 NR Description: Cytochrome P450 79A2 >gi|10176738|dbj|BAB09969.1|
  misc_feature (1)..(509): Homolog of NCBI NO: 18414836 NR Description: cytochrome P450 CYP79A2; protein id: At5g05260.1, by cDNA: gi_7839382 [Arabidopsis thaliana]
  misc_feature (1)..(426): Homolog of NCBI NO: 22327385 NR Description: similar to cytochrome P450 CYP79A2; protein id:
  misc_feature (454)..(509): Homolog of NCBI NO: 22327385 NR Description: similar to cytochrome P450 CYP79A2; protein id:
  misc_feature (1)..(509): Homolog of NCBI NO: 5915822 NR Description: CYTOCHROME P450 79A1 (CYTOCHROME P450TYR)
  misc_feature (1)..(509): Homolog of NCBI NO: 6739530 NR Description: N-hydroxylating cytochrome P450 [Manihot
  misc_feature (15)..(509): Homolog of NCBI NO: 6739527 NR Description: N-hydroxylating cytochrome P450 [Manihot
  misc_feature (1)..(509): Homolog of NCBI NO: 15236088 NR Description: cytochrome P450 - like protein; protein id: supported by cDNA: gi_15028134, supported by cDNA: gi_20259280
  misc_feature (8)..(509): Homolog of NCBI NO: 25991347 NR Description: cytochrome P450 [Brassica napus]
  misc_feature (1)..(509): Homolog of NCBI NO: 5915824 NR Description: Cytochrome P450 79B1 >gi|3283433|gb|AAD03415.1|
MKRKEKKKTMLISPTRNLSLPPGPKSWPLIGNLPEILGRNKPVFRWIHSLMKELNTDIACIRLANTHVIPVTSPRIAREILKKQDSVFATRPLTMGTEYCSRGYLTVAVEPQGEQWKKMRRVVASHVTSKKSFQMMLQKRTEEADNLVRYINNRSVKNRGNAFVVIDLRLAVRQYSGNVARKMMFGIRHFGKGSEDGSGPGLEEIEHVESLFTVLTHLYAFALSDYVPWLRFLDLEGHEKVVSNAMRNVSKYNDPFVDERLMQWRNGKMKEPQDFLDMFIIAKDTDGKPTLSDEEIKAQVTELMLATVDNPSNAAEWGMAEMINEPSIMQKAVEEIDRVVGKDRLVIESDLPNLNYVKACVKEAFRLHPVAPFNLPHMSTTDTVVDGYFIPKGSHVLISRMGIGRNPSVWDKPHKFDPERHLSTNTCVDLNESDLNIISFSAGRRGCMGVDIGSAMTYMLLARLIQGFTWLPVPGKNKIDISESKNDLFMAKPLYAVATPRLAPHVYPT

SEQ ID NO: 79640 - protein, 500 aa, Arabidopsis thaliana
  peptide (1)..(500): Ceres Seq. ID no. 12652342
  misc_feature: Pfam Name: p450 Pfam Description: Cytochrome P450
  misc_feature (1)..(500): Homolog of NCBI NO: 13878375 NR Description: Cytochrome P450 79A2 >gi|10176738|dbj|BAB09969.1|
  misc_feature (1)..(500): Homolog of NCBI NO: 18414836 NR Description: cytochrome P450 CYP79A2; protein id: At5g05260.1, by cDNA: gi_7839382 [Arabidopsis thaliana]
  misc_feature (1)..(417): Homolog of NCBI NO: 22327385 NR Description: similar to cytochrome P450 CYP79A2; protein id:
  misc_feature (445)..(500): Homolog of NCBI NO: 22327385 NR Description: similar to cytochrome P450 CYP79A2; protein id:
  misc_feature (1)..(500): Homolog of NCBI NO: 5915822 NR Description: CYTOCHROME P450 79A1 (CYTOCHROME P450TYR)
  misc_feature (1)..(500): Homolog of NCBI NO: 6739530 NR Description: N-hydroxylating cytochrome P450 [Manihot
  misc_feature (6)..(500): Homolog of NCBI NO: 6739527 NR Description: N-hydroxylating cytochrome P450 [Manihot
  misc_feature (1)..(500): Homolog of NCBI NO: 15236088 NR Description: cytochrome P450 - like protein; protein id: supported by cDNA: gi_15028134, supported by cDNA: gi_20259280
  misc_feature (1)..(500): Homolog of NCBI NO: 25991347 NR Description: cytochrome P450 [Brassica napus]
  misc_feature (1)..(500): Homolog of NCBI NO: 5915824 NR Description: Cytochrome P450 79B1 >gi|3283433|gb|AAD03415.1|
MLISPTRNLSLPPGPKSWPLIGNLPEILGRNKPVFRWIHSLMKELNTDIACIRLANTHVIPVTSPRIAREILKKQDSVFATRPLTMGTEYCSRGYLTVAVEPQGEQWKKMRRVVASHVTSKKSFQMMLQKRTEEADNLVRYINNRSVKNRGNAFVVIDLRLAVRQYSGNVARKMMFGIRHFGKGSEDGSGPGLEEIEHVESLFTVLTHLYAFALSDYVPWLRFLDLEGHEKVVSNAMRNVSKYNDPFVDERLMQWRNGKMKEPQDFLDMFIIAKDTDGKPTLSDEEIKAQVTELMLATVDNPSNAAEWGMAEMINEPSIMQKAVEEIDRVVGKDRLVIESDLPNLNYVKACVKEAFRLHPVAPFNLPHMSTTDTVVDGYFIPKGSHVLISRMGIGRNPSVWDKPHKFDPERHLSTNTCVDLNESDLNIISFSAGRRGCMGVDIGSAMTYMLLARLIQGFTWLPVPGKNKIDISESKNDLFMAKPLYAVATPRLAPHVYPT

SEQ ID NO: 79641 - DNA, 976 bp, Arabidopsis thaliana
  misc_feature (1)..(976): Ceres Seq. ID no. 12652347
  misc_feature: MA Experiment ID: 20000180 Result: Down-regulated in Transcription
  misc_feature: MA Experiment 20000180 PARAMETER Experiment Name: At_Germinating_Seeds_P Parameter: Age (hr) Value: 24 vs. 0
  misc_feature: MA Experiment 20000180 PARAMETER Experiment Name: At_Germinating_Seeds_P Parameter: Tissue Value: Germinating Seeds
  misc_feature: MA Experiment ID: 20000184 Result: Up-regulated in Transcription
  misc_feature: MA Experiment 20000184 PARAMETER Experiment Name: At_Shoots__P Parameter: Age (day) Value: 7
  misc_feature: MA Experiment 20000184 PARAMETER Experiment Name: At_Shoots__P Parameter: Tissue Value: Shoots vs. Whole Plant
  misc_feature: MA Experiment ID: 20001451 Result: Up-regulated in Transcription
  misc_feature: MA Experiment 20001451 PARAMETER Experiment Name: At_Far-red-induction_P Parameter: Age (day) Value: 7
  misc_feature: MA Experiment 20001451 PARAMETER Experiment Name: At_Far-red-induction_P Parameter: Light Value: Far-red vs. White
  misc_feature: MA Experiment 20001451 PARAMETER Experiment Name: At_Far-red-induction_P Parameter: Organism Value: A. thaliana
  misc_feature: MA Experiment 20001451 PARAMETER Experiment Name: At_Far-red-induction_P Parameter: Plant Line Value: Columbia
  misc_feature: MA Experiment 20001451 PARAMETER Experiment Name: At_Far-red-induction_P Parameter: Timepoint (hr) Value: 24
  misc_feature: MA Experiment 20001451 PARAMETER Experiment Name: At_Far-red-induction_P Parameter: Tissue Value: Whole Plant
actactcatccccttttccacttcttacttcctcctctttagcccatcagcaaatatcatgaatcttacagaatattcccatattttgtttctttcactatgcaccctcaacttctgcttgtactccataaactccgacgacaacggaggctgggagagaggccatgctaccttctatggtggagctgatgcatccggcacaatgggtggtgcttgtgggtacggtaacttacacagccaaggctatgggctacaaaccgcggctttgagcacggctttgttcaatagtgggcagaaatgtggggcctgctttgagctacagtgtgaggatgatcctgagtggtgcatccctggttccatcatcgtctcggctacaaacttctgtcctccaaactttgccttagctaatgataatggtggttggtgcaatcctcctcttaagcactttgacttggccgagcctgccttcctccagatcgctcagtaccgagctgggatcgttcctgtcgcattcagaagggttccatgtgagaaaggtggagggataaggtttacgataaacgggaatccatatttcgacctcgtgctaatcacgaatgtgggtggtgctggagatataagggccgtctctttgaaaggctcaaagacagatcagtggcaatccatgtcaagaaactggggacagaattggcaaagcaacacttacctcagaggtcaaagcctttctttccaagtcactgatagtgatggtcggactgttgtgagctacgatgttgtgcctcatgattggcagttcggtcagacttttgaaggcggacaattttagatttatgatcaagtgaaactaatagacgttatatccaagaaaagtcaatgattgtgtttaagataaaactctgcttttcattgatcataaccactcttcgatatataatagtcataagaaagaaatacaatgaaacaattaattttgttt

SEQ ID NO: 79642 - protein, 274 aa, Arabidopsis thaliana
  peptide (1)..(274): Ceres Seq. ID no. 12652348
  misc_feature (182)..(260): Pfam Name: Pollen allergen Pfam Description: Pollen allergen
  misc_feature (20)..(274): Homolog of NCBI NO: 15239064 NR Description: expansin (At-EXP2); protein id: At5g05290.1, by cDNA: gi_13357158, supported by cDNA: gi_17381157 [Arabidopsis
  misc_feature (20)..(274): Homolog of NCBI NO: 20138198 NR Description: Alpha-expansin 2 precursor (At-EXP2) (AtEx2)
  misc_feature (26)..(274): Homolog of NCBI NO: 13898649 NR Description: expansin [Prunus cerasus]
  misc_feature (26)..(274): Homolog of NCBI NO: 3510540 NR Description: expansin [Prunus armeniaca]
  misc_feature (31)..(274): Homolog of NCBI NO: 7025493 NR Description: expansin 2 [Zinnia elegans]
  misc_feature (29)..(274): Homolog of NCBI NO: 10180017 NR Description: expansin 1 [Prunus avium]
  misc_feature (20)..(274): Homolog of NCBI NO: 29467501 NR Description: expansin [Pyrus communis]
  misc_feature (26)..(274): Homolog of NCBI NO: 11907554 NR Description: expansin [Prunus persica]
  misc_feature (29)..(274): Homolog of NCBI NO: 3510538 NR Description: expansin [Prunus armeniaca]
  misc_feature (34)..(274): Homolog of NCBI NO: 38046728 NR Description: alpha-expansin 2 [Populus tremula x Populus
LLIPFSTSYFLLFSPSANIMNLTEYSHILFLSLCTLNFCLYSINSDDNGGWERGHATFYGGADASGTMGGACGYGNLHSQGYGLQTAALSTALFNSGQKCGACFELQCEDDPEWCIPGSIIVSATNFCPPNFALANDNGGWCNPPLKHFDLAEPAFLQIAQYRAGIVPVAFRRVPCEKGGGIRFTINGNPYFDLVLITNVGGAGDIRAVSLKGSKTDQWQSMSRNWGQNWQSNTYLRGQSLSFQVTDSDGRTVVSYDVVPHDWQFGQTFEGGQF

SEQ ID NO: 79643 - protein, 255 aa, Arabidopsis thaliana
  peptide (1)..(255): Ceres Seq. ID no. 12652349
  misc_feature (163)..(241): Pfam Name: Pollen allergen Pfam Description: Pollen allergen
  misc_feature (1)..(255): Homolog of NCBI NO: 15239064 NR Description: expansin (At-EXP2); protein id: At5g05290.1, by cDNA: gi_13357158, supported by cDNA: gi_17381157 [Arabidopsis
  misc_feature (1)..(255): Homolog of NCBI NO: 20138198 NR Description: Alpha-expansin 2 precursor (At-EXP2) (AtEx2)
  misc_feature (7)..(255): Homolog of NCBI NO: 13898649 NR Description: expansin [Prunus cerasus]
  misc_feature (7)..(255): Homolog of NCBI NO: 3510540 NR Description: expansin [Prunus armeniaca]
  misc_feature (12)..(255): Homolog of NCBI NO: 7025493 NR Description: expansin 2 [Zinnia elegans]
  misc_feature (10)..(255): Homolog of NCBI NO: 10180017 NR Description: expansin 1 [Prunus avium]
  misc_feature (1)..(255): Homolog of NCBI NO: 29467501 NR Description: expansin [Pyrus communis]
  misc_feature (7)..(255): Homolog of NCBI NO: 11907554 NR Description: expansin [Prunus persica]
  misc_feature (10)..(255): Homolog of NCBI NO: 3510538 NR Description: expansin [Prunus armeniaca]
  misc_feature (15)..(255): Homolog of NCBI NO: 38046728 NR Description: alpha-expansin 2 [Populus tremula x Populus
MNLTEYSHILFLSLCTLNFCLYSINSDDNGGWERGHATFYGGADASGTMGGACGYGNLHSQGYGLQTAALSTALFNSGQKCGACFELQCEDDPEWCIPGSIIVSATNFCPPNFALANDNGGWCNPPLKHFDLAEPAFLQIAQYRAGIVPVAFRRVPCEKGGGIRFTINGNPYFDLVLITNVGGAGDIRAVSLKGSKTDQWQSMSRNWGQNWQSNTYLRGQSLSFQVTDSDGRTVVSYDVVPHDWQFGQTFEGGQF

SEQ ID NO: 79644 - protein, 207 aa, Arabidopsis thaliana
  peptide (1)..(207): Ceres Seq. ID no. 12652350
  misc_feature (115)..(193): Pfam Name: Pollen allergen Pfam Description: Pollen allergen
  misc_feature (1)..(207): Homolog of NCBI NO: 15239064 NR Description: expansin (At-EXP2); protein id: At5g05290.1, by cDNA: gi_13357158, supported by cDNA: gi_17381157 [Arabidopsis
  misc_feature (1)..(207): Homolog of NCBI NO: 20138198 NR Description: Alpha-expansin 2 precursor (At-EXP2) (AtEx2)
  misc_feature (1)..(207): Homolog of NCBI NO: 13898649 NR Description: expansin [Prunus cerasus]
  misc_feature (1)..(207): Homolog of NCBI NO: 3510540 NR Description: expansin [Prunus armeniaca]
  misc_feature (1)..(207): Homolog of NCBI NO: 7025493 NR Description: expansin 2 [Zinnia elegans]
  misc_feature (1)..(207): Homolog of NCBI NO: 10180017 NR Description: expansin 1 [Prunus avium]
  misc_feature (1)..(207): Homolog of NCBI NO: 29467501 NR Description: expansin [Pyrus communis]
  misc_feature (1)..(207): Homolog of NCBI NO: 11907554 NR Description: expansin [Prunus persica]
  misc_feature (1)..(207): Homolog of NCBI NO: 3510538 NR Description: expansin [Prunus armeniaca]
  misc_feature (1)..(207): Homolog of NCBI NO: 38046728 NR Description: alpha-expansin 2 [Populus tremula x Populus
MGGACGYGNLHSQGYGLQTAALSTALFNSGQKCGACFELQCEDDPEWCIPGSIIVSATNFCPPNFALANDNGGWCNPPLKHFDLAEPAFLQIAQYRAGIVPVAFRRVPCEKGGGIRFTINGNPYFDLVLITNVGGAGDIRAVSLKGSKTDQWQSMSRNWGQNWQSNTYLRGQSLSFQVTDSDGRTVVSYDVVPHDWQFGQTFEGGQF

SEQ ID NO: 79645 - DNA, 1220 bp, Arabidopsis thaliana
  misc_feature (1)..(1220): Ceres Seq. ID no. 12652357
  misc_feature: MA Experiment ID: 20000179 Result: Down-regulated in Transcription
  misc_feature: MA Experiment 20000179 PARAMETER Experiment Name: At_Germinating_Seeds_P Parameter: Age (hr) Value: 6 vs. 0
  misc_feature: MA Experiment 20000179 PARAMETER Experiment Name: At_Germinating_Seeds_P Parameter: Tissue Value: Germinating Seeds
  misc_feature: MA Experiment ID: 20000180 Result: Down-regulated in Transcription
  misc_feature: MA Experiment 20000180 PARAMETER Experiment Name: At_Germinating_Seeds_P Parameter: Age (hr) Value: 24 vs. 0
  misc_feature: MA Experiment 20000180 PARAMETER Experiment Name: At_Germinating_Seeds_P Parameter: Tissue Value: Germinating Seeds
  misc_feature: MA Experiment ID: 20000184 Result: Down-regulated in Transcription
  misc_feature: MA Experiment 20000184 PARAMETER Experiment Name: At_Shoots__P Parameter: Age (day) Value: 7
  misc_feature: MA Experiment 20000184 PARAMETER Experiment Name: At_Shoots__P Parameter: Tissue Value: Shoots vs. Whole Plant
  misc_feature: MA Experiment ID: 20000185 Result: Down-regulated in Transcription
  misc_feature: MA Experiment 20000185 PARAMETER Experiment Name: At_Roots__P Parameter: Age (day) Value: 7 vs. 21
  misc_feature: MA Experiment 20000185 PARAMETER Experiment Name: At_Roots__P Parameter: Organism Value: A. thaliana
  misc_feature: MA Experiment 20000185 PARAMETER Experiment Name: At_Roots__P Parameter: Tissue Value: Roots vs. Whole Plant
  misc_feature: MA Experiment ID: 20000453 Result: Up-regulated in Transcription
  misc_feature: MA Experiment 20000453 PARAMETER Experiment Name: At_100uM_ABA_P Parameter: Age (day) Value: 15
  misc_feature: MA Experiment 20000453 PARAMETER Experiment Name: At_100uM_ABA_P Parameter: Organism Value: A. thaliana
  misc_feature: MA Experiment 20000453 PARAMETER Experiment Name: At_100uM_ABA_P Parameter: Plant Line Value: WS
  misc_feature: MA Experiment 20000453 PARAMETER Experiment Name: At_100uM_ABA_P Parameter: Timepoint (hr) Value: 24
  misc_feature: MA Experiment 20000453 PARAMETER Experiment Name: At_100uM_ABA_P Parameter: Tissue Value: Aerial
  misc_feature: MA Experiment 20000453 PARAMETER Experiment Name: At_100uM_ABA_P Parameter: Treatment Value: 100uM ABA vs. No Treatment
  misc_feature: MA Experiment ID: 20000455 Result: Up-regulated in Transcription
  misc_feature: MA Experiment 20000455 PARAMETER Experiment Name: At_100uM_ABA_P Parameter: Age (day) Value: 16
  misc_feature: MA Experiment 20000455 PARAMETER Experiment Name: At_100uM_ABA_P Parameter: Organism Value: A. thaliana
  misc_feature: MA Experiment 20000455 PARAMETER Experiment Name: At_100uM_ABA_P Parameter: Plant Line Value: WS
  misc_feature: MA Experiment 20000455 PARAMETER Experiment Name: At_100uM_ABA_P Parameter: Timepoint (hr) Value: 48
  misc_feature: MA Experiment 20000455 PARAMETER Experiment Name: At_100uM_ABA_P Parameter: Tissue Value: Aerial
  misc_feature: MA Experiment 20000455 PARAMETER Experiment Name: At_100uM_ABA_P Parameter: Treatment Value: 100uM ABA vs. No Treatment
  misc_feature: MA Experiment ID: 20000527 Result: Down-regulated in Transcription
  misc_feature: MA Experiment 20000527 PARAMETER Experiment Name: At_10percent_PEG_P Parameter: Age (day) Value: 20
  misc_feature: MA Experiment 20000527 PARAMETER Experiment Name: At_10percent_PEG_P Parameter: Organism Value: A. thaliana
  misc_feature: MA Experiment 20000527 PARAMETER Experiment Name: At_10percent_PEG_P Parameter: Plant Line Value: WS
  misc_feature: MA Experiment 20000527 PARAMETER Experiment Name: At_10percent_PEG_P Parameter: Timepoint (day) Value: 20
  misc_feature: MA Experiment 20000527 PARAMETER Experiment Name: At_10percent_PEG_P Parameter: Tissue Value: Whole Plant
  misc_feature: MA Experiment 20000527 PARAMETER Experiment Name: At_10percent_PEG_P Parameter: Treatment Value: 10percent PEG vs. No Treatment
  misc_feature: MA Experiment ID: 20001554 Result: Up-regulated in Transcription
  misc_feature: MA Experiment 20001554 PARAMETER Experiment Name: At_Drought_Soil_Dry_P Parameter: Age (day) Value: 21
  misc_feature: MA Experiment 20001554 PARAMETER Experiment Name: At_Drought_Soil_Dry_P Parameter: Organism Value: A. thaliana
  misc_feature: MA Experiment 20001554 PARAMETER Experiment Name: At_Drought_Soil_Dry_P Parameter: Plant Line Value: WS
  misc_feature: MA Experiment 20001554 PARAMETER Experiment Name: At_Drought_Soil_Dry_P Parameter: Post Timepoint (hr) Value: None
  misc_feature: MA Experiment 20001554 PARAMETER Experiment Name: At_Drought_Soil_Dry_P Parameter: Post-Treatment Value: None
  misc_feature: MA Experiment 20001554 PARAMETER Experiment Name: At_Drought_Soil_Dry_P Parameter: Timepoint (day) Value: 7
  misc_feature: MA Experiment 20001554 PARAMETER Experiment Name: At_Drought_Soil_Dry_P Parameter: Treatment Value: Drought vs. No Drought
  misc_feature: MA Experiment ID: 20001558 Result: Down-regulated in Transcription
  misc_feature: MA Experiment 20001558 PARAMETER Experiment Name: At_Drought_Soil_Dry_P Parameter: Age (day) Value: 27
  misc_feature: MA Experiment 20001558 PARAMETER Experiment Name: At_Drought_Soil_Dry_P Parameter: Organism Value: A. thaliana
  misc_feature: MA Experiment 20001558 PARAMETER Experiment Name: At_Drought_Soil_Dry_P Parameter: Plant Line Value: WS
  misc_feature: MA Experiment 20001558 PARAMETER Experiment Name: At_Drought_Soil_Dry_P Parameter: Post Timepoint (hr) Value: 6
  misc_feature: MA Experiment 20001558 PARAMETER Experiment Name: At_Drought_Soil_Dry_P Parameter: Post-Treatment Value: Re-Water vs. No Drought
  misc_feature: MA Experiment 20001558 PARAMETER Experiment Name: At_Drought_Soil_Dry_P Parameter: Timepoint (day) Value: 13
  misc_feature: MA Experiment 20001558 PARAMETER Experiment Name: At_Drought_Soil_Dry_P Parameter: Treatment Value: Drought vs. No Drought
  misc_feature: MA Experiment ID: 20001757 Result: Up-regulated in Transcription
  misc_feature: MA Experiment 20001757 PARAMETER Experiment Name: At_50mM_NH4NO3_L-to-H_P Parameter: Timepoint (hr) Value: 6
  misc_feature: MA Experiment 20001757 PARAMETER Experiment Name: At_50mM_NH4NO3_L-to-H_P Parameter: Tissue Value: Leaf
  misc_feature: MA Experiment 20001757 PARAMETER Experiment Name: At_50mM_NH4NO3_L-to-H_P Parameter: Treatment Value: 50mM NH4NO3 vs 100mM Mannitol
  misc_feature: MA Experiment ID: 20001904 Result: Up-regulated in Transcription
  misc_feature: MA Experiment 20001904 PARAMETER Experiment Name: At_Drought_Reproduction_P Parameter: Age (day) Value: 37
  misc_feature: MA Experiment 20001904 PARAMETER Experiment Name: At_Drought_Reproduction_P Parameter: Organism Value: A. thaliana
  misc_feature: MA Experiment 20001904 PARAMETER Experiment Name: At_Drought_Reproduction_P Parameter: Plant Line Value: WS
  misc_feature: MA Experiment 20001904 PARAMETER Experiment Name: At_Drought_Reproduction_P Parameter: Timepoint (day) Value: 7
  misc_feature: MA Experiment 20001904 PARAMETER Experiment Name: At_Drought_Reproduction_P Parameter: Tissue Value: Rosettes
  misc_feature: MA Experiment 20001904 PARAMETER Experiment Name: At_Drought_Reproduction_P Parameter: Treatment Value: Drought vs. No Drought
aagtacaacaatcaactctaagtctattatattcaagtctttgttttaacctaacaatggcttcaaataaacttatttcgattctagttctcgtagttacacttttactccaaggtgataacaattacgtcgtcgaagcacaactcacgactaacttctactcaacctcttgccccaacctcctctccaccgtccaaaccgccgttaaatctgccgttaacagcgaggctcgaatgggtgcatctatcctccgtctcttcttccacgattgctttgtcaacggatgcgacggttcgattctactagacgatacgtcaagcttcacaggagaacaaaacgcggctccaaaccgcaattcagctcgtgggtttaatgtgatcgacaacatcaaatcagcggttgagaaagcatgtcccggggttgtgtcttgtgctgatatcttagccattgctgctagagactccgtcgtagcccttggaggaccgaactggaatgtgaaagtaggaagaagagatgcaagaacggcgagtcaagcggcagcgaatagtaacattccggcaccgacttcgagtctgagccaactcattagtagtttcagtgctgttggactctccaccagagatatggttgctctctctggcgcacacacgatcggacaatcccgttgcacgaacttccgagcgagaatctacaacgagacaaacatcaatgccgccttcgccacgacacgtcaacgaacttgccctagagcctccggttccggcgacggaaacctagctccactagacgtcaccacggcagcttctttcgacaacaactacttcaagaatctcatgactcagagagggctcctccattccgaccaagtgctcttcaacggcggctctactgactccatcgtccgtggatacagcaacaatccgtcgagctttaactctgacttcacggcggcgatgataaaaatgggtgatatcagcccgttgactggtagtagcggtgaaatccgcaaggtttgcgggaggaccaactgattcaagtctactccacgtgtctttttcctattggatttaccttttattatttgagttggtgagtataataaagattgatcttctccaaaaaaattcgaaggtccctttcaatgttttttttttgtttgctttgctttgtgttgaagtgtgtatttccgcattaaaaatctaatgaaaattattccattt

SEQ ID NO: 79646 - protein, 342 aa, Arabidopsis thaliana
  peptide (1)..(342): Ceres Seq. ID no. 12652358
  misc_feature (64)..(306): Pfam Name: Peroxidase Pfam Description: Peroxidase
  misc_feature (19)..(342): Homolog of NCBI NO: 15239075 NR Description: peroxidase, putative; protein id: At5g05340.1, by cDNA: gi_17529071 [Arabidopsis thaliana] Peroxidase 52 precursor (Atperox P52) (ATP49)
  misc_feature (47)..(342): Homolog of NCBI NO: 464365 NR Description: Peroxidase P7 (TP7) >gi|66306|pir||OPNB7
  misc_feature (19)..(342): Homolog of NCBI NO: 7433058 NR Description: peroxidase (EC 1.11.1.7) - radish
  misc_feature (19)..(342): Homolog of NCBI NO: 5381253 NR Description: peroxidase [Nicotiana tabacum]
  misc_feature (46)..(342): Homolog of NCBI NO: 28400798 NR Description: peroxidase [Asparagus officinalis]
  misc_feature (46)..(342): Homolog of NCBI NO: 28400796 NR Description: peroxidase [Asparagus officinalis]
  misc_feature (19)..(342): Homolog of NCBI NO: 19698446 NR Description: gaiacol peroxidase [Gossypium hirsutum]
  misc_feature (28)..(342): Homolog of NCBI NO: 28400794 NR Description: peroxidase [Asparagus officinalis]
  misc_feature (31)..(342): Homolog of NCBI NO: 5453379 NR Description: bacterial-induced peroxidase precursor [Gossypium
  misc_feature (20)..(342): Homolog of NCBI NO: 39777532 NR Description: peroxidase precursor [Quercus suber]
VQQSTLSLLYSSLCFNLTMASNKLISILVLVVTLLLQGDNNYVVEAQLTTNFYSTSCPNLLSTVQTAVKSAVNSEARMGASILRLFFHDCFVNGCDGSILLDDTSSFTGEQNAAPNRNSARGFNVIDNIKSAVEKACPGVVSCADILAIAARDSVVALGGPNWNVKVGRRDARTASQAAANSNIPAPTSSLSQLISSFSAVGLSTRDMVALSGAHTIGQSRCTNFRARIYNETNINAAFATTRQRTCPRASGSGDGNLAPLDVTTAASFDNNYFKNLMTQRGLLHSDQVLFNGGSTDSIVRGYSNNPSSFNSDFTAAMIKMGDISPLTGSSGEIRKVCGRTN

SEQ ID NO: 79647 - protein, 324 aa, Arabidopsis thaliana
  peptide (1)..(324): Ceres Seq. ID no. 12652359
  misc_feature (46)..(288): Pfam Name: Peroxidase Pfam Description: Peroxidase
  misc_feature (1)..(324): Homolog of NCBI NO: 15239075 NR Description: peroxidase, putative; protein id: At5g05340.1, by cDNA: gi_17529071 [Arabidopsis thaliana] Peroxidase 52 precursor (Atperox P52) (ATP49)
  misc_feature (29)..(324): Homolog of NCBI NO: 464365 NR Description: Peroxidase P7 (TP7) >gi|66306|pir||OPNB7
  misc_feature (1)..(324): Homolog of NCBI NO: 7433058 NR Description: peroxidase (EC 1.11.1.7) - radish
  misc_feature (1)..(324): Homolog of NCBI NO: 5381253 NR Description: peroxidase [Nicotiana tabacum]
  misc_feature (28)..(324): Homolog of NCBI NO: 28400798 NR Description: peroxidase [Asparagus officinalis]
  misc_feature (28)..(324): Homolog of NCBI NO: 28400796 NR Description: peroxidase [Asparagus officinalis]
  misc_feature (1)..(324): Homolog of NCBI NO: 19698446 NR Description: gaiacol peroxidase [Gossypium hirsutum]
  misc_feature (10)..(324): Homolog of NCBI NO: 28400794 NR Description: peroxidase [Asparagus officinalis]
  misc_feature (13)..(324): Homolog of NCBI NO: 5453379 NR Description: bacterial-induced peroxidase precursor [Gossypium
  misc_feature (2)..(324): Homolog of NCBI NO: 39777532 NR Description: peroxidase precursor [Quercus suber]
MASNKLISILVLVVTLLLQGDNNYVVEAQLTTNFYSTSCPNLLSTVQTAVKSAVNSEARMGASILRLFFHDCFVNGCDGSILLDDTSSFTGEQNAAPNRNSARGFNVIDNIKSAVEKACPGVVSCADILAIAARDSVVALGGPNWNVKVGRRDARTASQAAANSNIPAPTSSLSQLISSFSAVGLSTRDMVALSGAHTIGQSRCTNFRARIYNETNINAAFATTRQRTCPRASGSGDGNLAPLDVTTAASFDNNYFKNLMTQRGLLHSDQVLFNGGSTDSIVRGYSNNPSSFNSDFTAAMIKMGDISPLTGSSGEIRKVCGRTN

SEQ ID NO: 79648 - protein, 265 aa, Arabidopsis thaliana
  peptide (1)..(265): Ceres Seq. ID no. 12652360
  misc_feature (1)..(229): Pfam Name: Peroxidase Pfam Description: Peroxidase
  misc_feature (1)..(265): Homolog of NCBI NO: 15239075 NR Description: peroxidase, putative; protein id: At5g05340.1, by cDNA: gi_17529071 [Arabidopsis thaliana] Peroxidase 52 precursor (Atperox P52) (ATP49)
  misc_feature (1)..(265): Homolog of NCBI NO: 464365 NR Description: Peroxidase P7 (TP7) >gi|66306|pir||OPNB7
  misc_feature (1)..(265): Homolog of NCBI NO: 7433058 NR Description: peroxidase (EC 1.11.1.7) - radish
  misc_feature (1)..(265): Homolog of NCBI NO: 5381253 NR Description: peroxidase [Nicotiana tabacum]
  misc_feature (1)..(265): Homolog of NCBI NO: 28400798 NR Description: peroxidase [Asparagus officinalis]
  misc_feature (1)..(265): Homolog of NCBI NO: 28400796 NR Description: peroxidase [Asparagus officinalis]
  misc_feature (1)..(265): Homolog of NCBI NO: 19698446 NR Description: gaiacol peroxidase [Gossypium hirsutum]
  misc_feature (1)..(265): Homolog of NCBI NO: 28400794 NR Description: peroxidase [Asparagus officinalis]
  misc_feature (1)..(265): Homolog of NCBI NO: 5453379 NR Description: bacterial-induced peroxidase precursor [Gossypium
  misc_feature (1)..(265): Homolog of NCBI NO: 39777532 NR Description: peroxidase precursor [Quercus suber]
MGASILRLFFHDCFVNGCDGSILLDDTSSFTGEQNAAPNRNSARGFNVIDNIKSAVEKACPGVVSCADILAIAARDSVVALGGPNWNVKVGRRDARTASQAAANSNIPAPTSSLSQLISSFSAVGLSTRDMVALSGAHTIGQSRCTNFRARIYNETNINAAFATTRQRTCPRASGSGDGNLAPLDVTTAASFDNNYFKNLMTQRGLLHSDQVLFNGGSTDSIVRGYSNNPSSFNSDFTAAMIKMGDISPLTGSSGEIRKVCGRTN

SEQ ID NO: 79649 - DNA, 1450 bp, Arabidopsis thaliana
  misc_feature (1)..(1450): Ceres Seq. ID no. 12652373
  misc_feature: MA Experiment ID: 20000171 Result: Up-regulated in Transcription
  misc_feature: MA Experiment 20000171 PARAMETER Experiment Name: At_42deg_Heat_P Parameter: Age (day) Value: 14
  misc_feature: MA Experiment 20000171 PARAMETER Experiment Name: At_42deg_Heat_P Parameter: Organism Value: A. thaliana
  misc_feature: MA Experiment 20000171 PARAMETER Experiment Name: At_42deg_Heat_P Parameter: Plant Line Value: WS
  misc_feature: MA Experiment 20000171 PARAMETER Experiment Name: At_42deg_Heat_P Parameter: Temperature (deg C) Value: 42 vs. 22
  misc_feature: MA Experiment 20000171 PARAMETER Experiment Name: At_42deg_Heat_P Parameter: Timepoint (hr) Value: 1
  misc_feature: MA Experiment 20000171 PARAMETER Experiment Name: At_42deg_Heat_P Parameter: Tissue Value: Aerial
  misc_feature: MA Experiment ID: 20000173 Result: Up-regulated in Transcription
  misc_feature: MA Experiment 20000173 PARAMETER Experiment Name: At_42deg_Heat_P Parameter: Age (day) Value: 14
  misc_feature: MA Experiment 20000173 PARAMETER Experiment Name: At_42deg_Heat_P Parameter: Organism Value: A. thaliana
  misc_feature: MA Experiment 20000173 PARAMETER Experiment Name: At_42deg_Heat_P Parameter: Plant Line Value: WS
  misc_feature: MA Experiment 20000173 PARAMETER Experiment Name: At_42deg_Heat_P Parameter: Temperature (deg C) Value: 42 vs. 22
  misc_feature: MA Experiment 20000173 PARAMETER Experiment Name: At_42deg_Heat_P Parameter: Timepoint (hr) Value: 6
  misc_feature: MA Experiment 20000173 PARAMETER Experiment Name: At_42deg_Heat_P Parameter: Tissue Value: Aerial
  misc_feature: MA Experiment ID: 20000180 Result: Down-regulated in Transcription
  misc_feature: MA Experiment 20000180 PARAMETER Experiment Name: At_Germinating_Seeds_P Parameter: Age (hr) Value: 24 vs. 0
  misc_feature: MA Experiment 20000180 PARAMETER Experiment Name: At_Germinating_Seeds_P Parameter: Tissue Value: Germinating Seeds
  misc_feature: MA Experiment ID: 20000182 Result: Up-regulated in Transcription
  misc_feature: MA Experiment 20000182 PARAMETER Experiment Name: At_2mM_SA_P Parameter: Age (day) Value: 14
  misc_feature: MA Experiment 20000182 PARAMETER Experiment Name: At_2mM_SA_P Parameter: Organism Value: A. thaliana
  misc_feature: MA Experiment 20000182 PARAMETER Experiment Name: At_2mM_SA_P Parameter: Plant Line Value: WS
  misc_feature: MA Experiment 20000182 PARAMETER Experiment Name: At_2mM_SA_P Parameter: Timepoint (hr) Value: 6
  misc_feature: MA Experiment 20000182 PARAMETER Experiment Name: At_2mM_SA_P Parameter: Tissue Value: Aerial
  misc_feature: MA Experiment 20000182 PARAMETER Experiment Name: At_2mM_SA_P Parameter: Treatment Value: 2mM SA vs. No Treatment
  misc_feature: MA Experiment ID: 20000184 Result: Down-regulated in Transcription
  misc_feature: MA Experiment 20000184 PARAMETER Experiment Name: At_Shoots__P Parameter: Age (day) Value: 7
  misc_feature: MA Experiment 20000184 PARAMETER Experiment Name: At_Shoots__P Parameter: Tissue Value: Shoots vs. Whole Plant
  misc_feature: MA Experiment ID: 20000234 Result: Down-regulated in Transcription
  misc_feature: MA Experiment 20000234 PARAMETER Experiment Name: At_Siliques_P Parameter: Age (day) Value: 21
  misc_feature: MA Experiment 20000234 PARAMETER Experiment Name: At_Siliques_P Parameter: Organism Value: A. thaliana
  misc_feature: MA Experiment 20000234 PARAMETER Experiment Name: At_Siliques_P Parameter: Plant Line Value: WS
  misc_feature: MA Experiment 20000234 PARAMETER Experiment Name: At_Siliques_P Parameter: Tissue Value: Less Than 5mm Siliques vs. Whole Plant
  misc_feature: MA Experiment ID: 20000235 Result: Down-regulated in Transcription
  misc_feature: MA Experiment 20000235 PARAMETER Experiment Name: At_Siliques_P Parameter: Age (day) Value: 21
  misc_feature: MA Experiment 20000235 PARAMETER Experiment Name: At_Siliques_P Parameter: Organism Value: A. thaliana
  misc_feature: MA Experiment 20000235 PARAMETER Experiment Name: At_Siliques_P Parameter: Plant Line Value: WS
  misc_feature: MA Experiment 20000235 PARAMETER Experiment Name: At_Siliques_P Parameter: Tissue Value: 5-10mm Siliques vs. Whole Plant
  misc_feature: MA Experiment ID: 20000264 Result: Down-regulated in Transcription
  misc_feature: MA Experiment 20000264 PARAMETER Experiment Name: At_Open_Flower_P Parameter: Age (day) Value: 21
  misc_feature: MA Experiment 20000264 PARAMETER Experiment Name: At_Open_Flower_P Parameter: Plant Line Value: WS
  misc_feature: MA Experiment 20000264 PARAMETER Experiment Name: At_Open_Flower_P Parameter: Tissue Value: Open Flower vs. Whole Plant
  misc_feature: MA Experiment ID: 20000265 Result: Down-regulated in Transcription
  misc_feature: MA Experiment 20000265 PARAMETER Experiment Name: At_Open_Flower_P Parameter: Age (day) Value: 21
  misc_feature: MA Experiment 20000265 PARAMETER Experiment Name: At_Open_Flower_P Parameter: Plant Line Value: WS
  misc_feature: MA Experiment 20000265 PARAMETER Experiment Name: At_Open_Flower_P Parameter: Tissue Value: Closed Flower vs. Whole Plant
  misc_feature: MA Experiment ID: 20000267 Result: Up-regulated in Transcription
  misc_feature: MA Experiment 20000267 PARAMETER Experiment Name: At_Drought_P Parameter: Age (day) Value: 7
  misc_feature: MA Experiment 20000267 PARAMETER Experiment Name: At_Drought_P Parameter: Organism Value: A. thaliana
  misc_feature: MA Experiment 20000267 PARAMETER Experiment Name: At_Drought_P Parameter: Plant Line Value: WS
  misc_feature: MA Experiment 20000267 PARAMETER Experiment Name: At_Drought_P Parameter: Timepoint (hr) Value: 6
  misc_feature: MA Experiment 20000267 PARAMETER Experiment Name: At_Drought_P Parameter: Tissue Value: Whole Plant
  misc_feature: MA Experiment 20000267 PARAMETER Experiment Name: At_Drought_P Parameter: Treatment Value: Drought vs. No Drought
  misc_feature: MA Experiment ID: 20000268 Result: Up-regulated in Transcription
  misc_feature: MA Experiment 20000268 PARAMETER Experiment Name: At_100mM_NaCl__P Parameter: Age (day) Value: 14
  misc_feature: MA Experiment 20000268 PARAMETER Experiment Name: At_100mM_NaCl__P Parameter: Organism Value: A. thaliana
  misc_feature: MA Experiment 20000268 PARAMETER Experiment Name: At_100mM_NaCl__P Parameter: Plant Line Value: WS
  misc_feature: MA Experiment 20000268 PARAMETER Experiment Name: At_100mM_NaCl__P Parameter: Timepoint (hr) Value: 6
  misc_feature: MA Experiment 20000268 PARAMETER Experiment Name: At_100mM_NaCl__P Parameter: Tissue Value: Whole Plant
  misc_feature: MA Experiment 20000268 PARAMETER Experiment Name: At_100mM_NaCl__P Parameter: Treatment Value: 100mM NaCl vs. No Treatment
  misc_feature: MA Experiment ID: 20000286 Result: Down-regulated in Transcription
  misc_feature: MA Experiment 20000286 PARAMETER Experiment Name: At_Open_Flower_P Parameter: Age (day) Value: 21
  misc_feature: MA Experiment 20000286 PARAMETER Experiment Name: At_Open_Flower_P Parameter: Plant Line Value: WS
  misc_feature: MA Experiment 20000286 PARAMETER Experiment Name: At_Open_Flower_P Parameter: Tissue Value: Half Open vs. Whole Plant
  misc_feature: MA Experiment ID: 20000436 Result: Up-regulated in Transcription
  misc_feature: MA Experiment 20000436 PARAMETER Experiment Name: At_Drought_P Parameter: Age (day) Value: 7
  misc_feature: MA Experiment 20000436 PARAMETER Experiment Name: At_Drought_P Parameter: Organism Value: A. thaliana
  misc_feature: MA Experiment 20000436 PARAMETER Experiment Name: At_Drought_P Parameter: Plant Line Value: WS
  misc_feature: MA Experiment 20000436 PARAMETER Experiment Name: At_Drought_P Parameter: Timepoint (hr) Value: 12
  misc_feature: MA Experiment 20000436 PARAMETER Experiment Name: At_Drought_P Parameter: Tissue Value: Whole Plant
  misc_feature: MA Experiment 20000436 PARAMETER Experiment Name: At_Drought_P Parameter: Treatment Value: Drought vs. No Drought
  misc_feature: MA Experiment ID: 20000437 Result: Up-regulated in Transcription
  misc_feature: MA Experiment 20000437 PARAMETER Experiment Name: At_Drought_P Parameter: Age (day) Value: 8
  misc_feature: MA Experiment 20000437 PARAMETER Experiment Name: At_Drought_P Parameter: Organism Value: A. thaliana
  misc_feature: MA Experiment 20000437 PARAMETER Experiment Name: At_Drought_P Parameter: Plant Line Value: WS
  misc_feature: MA Experiment 20000437 PARAMETER Experiment Name: At_Drought_P Parameter: Timepoint (hr) Value: 24
  misc_feature: MA Experiment 20000437 PARAMETER Experiment Name: At_Drought_P Parameter: Tissue Value: Whole Plant
  misc_feature: MA Experiment 20000437 PARAMETER Experiment Name: At_Drought_P Parameter: Treatment Value: Drought vs. No Drought
  misc_feature: MA Experiment ID: 20000438 Result: Down-regulated in Transcription
  misc_feature: MA Experiment 20000438 PARAMETER Experiment Name: At_Shoots__P Parameter: Age (day) Value: 14
  misc_feature: MA Experiment 20000438 PARAMETER Experiment Name: At_Shoots__P Parameter: Tissue Value: Shoots vs. Whole Plant
  misc_feature: MA Experiment ID: 20000453 Result: Up-regulated in Transcription
  misc_feature: MA Experiment 20000453 PARAMETER Experiment Name: At_100uM_ABA_P Parameter: Age (day) Value: 15
  misc_feature: MA Experiment 20000453 PARAMETER Experiment Name: At_100uM_ABA_P Parameter: Organism Value: A. thaliana
  misc_feature: MA Experiment 20000453 PARAMETER Experiment Name: At_100uM_ABA_P Parameter: Plant Line Value: WS
  misc_feature: MA Experiment 20000453 PARAMETER Experiment Name: At_100uM_ABA_P Parameter: Timepoint (hr) Value: 24
  misc_feature: MA Experiment 20000453 PARAMETER Experiment Name: At_100uM_ABA_P Parameter: Tissue Value: Aerial
  misc_feature: MA Experiment 20000453 PARAMETER Experiment Name: At_100uM_ABA_P Parameter: Treatment Value: 100uM ABA vs. No Treatment
  misc_feature: MA Experiment ID: 20000460 Result: Up-regulated in Transcription
  misc_feature: MA Experiment 20000460 PARAMETER Experiment Name: At_10percent_PEG_P Parameter: Age (day) Value: 12
  misc_feature: MA Experiment 20000460 PARAMETER Experiment Name: At_10percent_PEG_P Parameter: Organism Value: A. thaliana
  misc_feature: MA Experiment 20000460 PARAMETER Experiment Name: At_10percent_PEG_P Parameter: Plant Line Value: WS
  misc_feature: MA Experiment 20000460 PARAMETER Experiment Name: At_10percent_PEG_P Parameter: Timepoint (day) Value: 12
  misc_feature: MA Experiment 20000460 PARAMETER Experiment Name: At_10percent_PEG_P Parameter: Tissue Value: Whole Plant
  misc_feature: MA Experiment 20000460 PARAMETER Experiment Name: At_10percent_PEG_P Parameter: Treatment Value: 10percent PEG vs. No Treatment
  misc_feature: MA Experiment ID: 20000495 Result: Down-regulated in Transcription
  misc_feature: MA Experiment 20000495 PARAMETER Experiment Name: At_Guard_Cells_P Parameter: Harvest Date Value: 8/2/2002
  misc_feature: MA Experiment 20000495 PARAMETER Experiment Name: At_Guard_Cells_P Parameter: Organism Value: A. thaliana
  misc_feature: MA Experiment 20000495 PARAMETER Experiment Name: At_Guard_Cells_P Parameter: Tissue Value: Guard Cells vs. Leaves
  misc_feature: MA Experiment ID: 20000527 Result: Up-regulated in Transcription
  misc_feature: MA Experiment 20000527 PARAMETER Experiment Name: At_10percent_PEG_P Parameter: Age (day) Value: 20
  misc_feature: MA Experiment 20000527 PARAMETER Experiment Name: At_10percent_PEG_P Parameter: Organism Value: A. thaliana
  misc_feature: MA Experiment 20000527 PARAMETER Experiment Name: At_10percent_PEG_P Parameter: Plant Line Value: WS
  misc_feature: MA Experiment 20000527 PARAMETER Experiment Name: At_10percent_PEG_P Parameter: Timepoint (day) Value: 20
  misc_feature: MA Experiment 20000527 PARAMETER Experiment Name: At_10percent_PEG_P Parameter: Tissue Value: Whole Plant
  misc_feature: MA Experiment 20000527 PARAMETER Experiment Name: At_10percent_PEG_P Parameter: Treatment Value: 10percent PEG vs. No Treatment
  misc_feature: MA Experiment ID: 20000709 Result: Up-regulated in Transcription
  misc_feature: MA Experiment 20000709 PARAMETER Experiment Name: At_15mM_NH4NO3_L-to-H_P Parameter: Age (hr) Value: 14
  misc_feature: MA Experiment 20000709 PARAMETER Experiment Name: At_15mM_NH4NO3_L-to-H_P Parameter: Organism Value: A. thaliana
  misc_feature: MA Experiment 20000709 PARAMETER Experiment Name: At_15mM_NH4NO3_L-to-H_P Parameter: Plant Line Value: WS
  misc_feature: MA Experiment 20000709 PARAMETER Experiment Name: At_15mM_NH4NO3_L-to-H_P Parameter: Timepoint (hr) Value: 4
  misc_feature: MA Experiment 20000709 PARAMETER Experiment Name: At_15mM_NH4NO3_L-to-H_P Parameter: Tissue Value: Aerial
  misc_feature: MA Experiment 20000709 PARAMETER Experiment Name: At_15mM_NH4NO3_L-to-H_P Parameter: Treatment Value: 15mM NH4NO3 vs. 30mM Mannitol
  misc_feature: MA Experiment ID: 20001458 Result: Up-regulated in Transcription
  misc_feature: MA Experiment 20001458 PARAMETER Experiment Name: At_50mM_NH4NO3_L-to-H_P Parameter: Age (day) Value: Undefined
  misc_feature: MA Experiment 20001458 PARAMETER Experiment Name: At_50mM_NH4NO3_L-to-H_P Parameter: Organism Value: Undefined
  misc_feature: MA Experiment 20001458 PARAMETER Experiment Name: At_50mM_NH4NO3_L-to-H_P Parameter: Plant Line Value: Undefined
  misc_feature: MA Experiment 20001458 PARAMETER Experiment Name: At_50mM_NH4NO3_L-to-H_P Parameter: Timepoint (hr) Value: 2
  misc_feature: MA Experiment 20001458 PARAMETER Experiment Name: At_50mM_NH4NO3_L-to-H_P Parameter: Tissue Value: Siliques
  misc_feature: MA Experiment 20001458 PARAMETER Experiment Name: At_50mM_NH4NO3_L-to-H_P Parameter: Treatment Value: 50mM NH4NO3 vs. 100mM Manitol
  misc_feature: MA Experiment ID: 20001554 Result: Up-regulated in Transcription
  misc_feature: MA Experiment 20001554 PARAMETER Experiment Name: At_Drought_Soil_Dry_P Parameter: Age (day) Value: 21
  misc_feature: MA Experiment 20001554 PARAMETER Experiment Name: At_Drought_Soil_Dry_P Parameter: Organism Value: A. thaliana
  misc_feature: MA Experiment 20001554 PARAMETER Experiment Name: At_Drought_Soil_Dry_P Parameter: Plant Line Value: WS
  misc_feature: MA Experiment 20001554 PARAMETER Experiment Name: At_Drought_Soil_Dry_P Parameter: Post Timepoint (hr) Value: None
  misc_feature: MA Experiment 20001554 PARAMETER Experiment Name: At_Drought_Soil_Dry_P Parameter: Post-Treatment Value: None
  misc_feature: MA Experiment 20001554 PARAMETER Experiment Name: At_Drought_Soil_Dry_P Parameter: Timepoint (day) Value: 7
  misc_feature: MA Experiment 20001554 PARAMETER Experiment Name: At_Drought_Soil_Dry_P Parameter: Treatment Value: Drought vs. No Drought
  misc_feature: MA Experiment ID: 20001556 Result: Up-regulated in Transcription
  misc_feature: MA Experiment 20001556 PARAMETER Experiment Name: At_Drought_Soil_Dry_P Parameter: Age (day) Value: 26
  misc_feature: MA Experiment 20001556 PARAMETER Experiment Name: At_Drought_Soil_Dry_P Parameter: Organism Value: A. thaliana
  misc_feature: MA Experiment 20001556 PARAMETER Experiment Name: At_Drought_Soil_Dry_P Parameter: Plant Line Value: WS
  misc_feature: MA Experiment 20001556 PARAMETER Experiment Name: At_Drought_Soil_Dry_P Parameter: Post Timepoint (hr) Value: None
  misc_feature: MA Experiment 20001556 PARAMETER Experiment Name: At_Drought_Soil_Dry_P Parameter: Post-Treatment Value: None
  misc_feature: MA Experiment 20001556 PARAMETER Experiment Name: At_Drought_Soil_Dry_P Parameter: Timepoint (day) Value: 12
  misc_feature: MA Experiment 20001556 PARAMETER Experiment Name: At_Drought_Soil_Dry_P Parameter: Treatment Value: Drought vs. No Drought
  misc_feature: MA Experiment ID: 20001557 Result: Up-regulated in Transcription
  misc_feature: MA Experiment 20001557 PARAMETER Experiment Name: At_Drought_Soil_Dry_P Parameter: Age (day) Value: 27
  misc_feature: MA Experiment 20001557 PARAMETER Experiment Name: At_Drought_Soil_Dry_P Parameter: Organism Value: A. thaliana
  misc_feature: MA Experiment 20001557 PARAMETER Experiment Name: At_Drought_Soil_Dry_P Parameter: Plant Line Value: WS
  misc_feature: MA Experiment 20001557 PARAMETER Experiment Name: At_Drought_Soil_Dry_P Parameter: Post Timepoint (hr) Value: 3
  misc_feature: MA Experiment 20001557 PARAMETER Experiment Name: At_Drought_Soil_Dry_P Parameter: Post-Treatment Value: Re-Water vs. No Drought
  misc_feature: MA Experiment 20001557 PARAMETER Experiment Name: At_Drought_Soil_Dry_P Parameter: Timepoint (day) Value: 13
  misc_feature: MA Experiment 20001557 PARAMETER Experiment Name: At_Drought_Soil_Dry_P Parameter: Treatment Value: Drought vs. No Drought
  misc_feature: MA Experiment ID: 20001559 Result: Up-regulated in Transcription
  misc_feature: MA Experiment 20001559 PARAMETER Experiment Name: At_Drought_Soil_Dry_P Parameter: Age (day) Value: 28
  misc_feature: MA Experiment 20001559 PARAMETER Experiment Name: At_Drought_Soil_Dry_P Parameter: Organism Value: A. thaliana
  misc_feature: MA Experiment 20001559 PARAMETER Experiment Name: At_Drought_Soil_Dry_P Parameter: Plant Line Value: WS
  misc_feature: MA Experiment 20001559 PARAMETER Experiment Name: At_Drought_Soil_Dry_P Parameter: Post Timepoint (hr) Value: 29
  misc_feature: MA Experiment 20001559 PARAMETER Experiment Name: At_Drought_Soil_Dry_P Parameter: Post-Treatment Value: Re-Water vs. No Drought
  misc_feature: MA Experiment 20001559 PARAMETER Experiment Name: At_Drought_Soil_Dry_P Parameter: Timepoint (day) Value: 14
  misc_feature: MA Experiment 20001559 PARAMETER Experiment Name: At_Drought_Soil_Dry_P Parameter: Treatment Value: Drought vs. No Drought
  misc_feature: MA Experiment ID: 20001904 Result: Up-regulated in Transcription
  misc_feature: MA Experiment 20001904 PARAMETER Experiment Name: At_Drought_Reproduction_P Parameter: Age (day) Value: 37
  misc_feature: MA Experiment 20001904 PARAMETER Experiment Name: At_Drought_Reproduction_P Parameter: Organism Value: A. thaliana
  misc_feature: MA Experiment 20001904 PARAMETER Experiment Name: At_Drought_Reproduction_P Parameter: Plant Line Value: WS
  misc_feature: MA Experiment 20001904 PARAMETER Experiment Name: At_Drought_Reproduction_P Parameter: Timepoint (day) Value: 7
  misc_feature: MA Experiment 20001904 PARAMETER Experiment Name: At_Drought_Reproduction_P Parameter: Tissue Value: Rosettes
  misc_feature: MA Experiment 20001904 PARAMETER Experiment Name: At_Drought_Reproduction_P Parameter: Treatment Value: Drought vs. No Drought
  misc_feature: MA Experiment ID: 20001905 Result: Up-regulated in Transcription
  misc_feature: MA Experiment 20001905 PARAMETER Experiment Name: At_Drought_Reproduction_P Parameter: Age (day) Value: 40
  misc_feature: MA Experiment 20001905 PARAMETER Experiment Name: At_Drought_Reproduction_P Parameter: Organism Value: A. thaliana
  misc_feature: MA Experiment 20001905 PARAMETER Experiment Name: At_Drought_Reproduction_P Parameter: Plant Line Value: WS
  misc_feature: MA Experiment 20001905 PARAMETER Experiment Name: At_Drought_Reproduction_P Parameter: Timepoint (day) Value: 10
  misc_feature: MA Experiment 20001905 PARAMETER Experiment Name: At_Drought_Reproduction_P Parameter: Tissue Value: Rosettes
  misc_feature: MA Experiment 20001905 PARAMETER Experiment Name: At_Drought_Reproduction_P Parameter: Treatment Value: Drought vs. No Drought
  misc_feature: MA Experiment ID: 20001906 Result: Up-regulated in Transcription
  misc_feature: MA Experiment 20001906 PARAMETER Experiment Name: At_Drought_Reproduction_P Parameter: Age (day) Value: 35
  misc_feature: MA Experiment 20001906 PARAMETER Experiment Name: At_Drought_Reproduction_P Parameter: Organism Value: A. thaliana
  misc_feature: MA Experiment 20001906 PARAMETER Experiment Name: At_Drought_Reproduction_P Parameter: Plant Line Value: WS
  misc_feature: MA Experiment 20001906 PARAMETER Experiment Name: At_Drought_Reproduction_P Parameter: Timepoint (day) Value: 5
  misc_feature: MA Experiment 20001906 PARAMETER Experiment Name: At_Drought_Reproduction_P Parameter: Tissue Value: Siliques
  misc_feature: MA Experiment 20001906 PARAMETER Experiment Name: At_Drought_Reproduction_P Parameter: Treatment Value: Drought vs. No Drought
  misc_feature: MA Experiment ID: 20001910 Result: Up-regulated in Transcription
  misc_feature: MA Experiment 20001910 PARAMETER Experiment Name: At_Drought_Reproduction_P Parameter: Age (day) Value: 37
  misc_feature: MA Experiment 20001910 PARAMETER Experiment Name: At_Drought_Reproduction_P Parameter: Organism Value: A. thaliana
  misc_feature: MA Experiment 20001910 PARAMETER Experiment Name: At_Drought_Reproduction_P Parameter: Plant Line Value: WS
  misc_feature: MA Experiment 20001910 PARAMETER Experiment Name: At_Drought_Reproduction_P Parameter: Timepoint (day) Value: 7
  misc_feature: MA Experiment 20001910 PARAMETER Experiment Name: At_Drought_Reproduction_P Parameter: Tissue Value: Flowers
  misc_feature: MA Experiment 20001910 PARAMETER Experiment Name: At_Drought_Reproduction_P Parameter: Treatment Value: Drought vs. No Drought
  misc_feature: MA Experiment ID: 20001911 Result: Up-regulated in Transcription
  misc_feature: MA Experiment 20001911 PARAMETER Experiment Name: At_Drought_Reproduction_P Parameter: Age (day) Value: 40
  misc_feature: MA Experiment 20001911 PARAMETER Experiment Name: At_Drought_Reproduction_P Parameter: Organism Value: A. thaliana
  misc_feature: MA Experiment 20001911 PARAMETER Experiment Name: At_Drought_Reproduction_P Parameter: Plant Line Value: WS
  misc_feature: MA Experiment 20001911 PARAMETER Experiment Name: At_Drought_Reproduction_P Parameter: Timepoint (day) Value: 10
  misc_feature: MA Experiment 20001911 PARAMETER Experiment Name: At_Drought_Reproduction_P Parameter: Tissue Value: Flowers
  misc_feature: MA Experiment 20001911 PARAMETER Experiment Name: At_Drought_Reproduction_P Parameter: Treatment Value: Drought vs. No Drought
agatattttgatttctgctaaagctgtctgataaaaagaagaggaaaactcgaaaaagctacacacaagaagaagaagaaaagatacgagcaagaagactaaacacgaaagcgatttatcaactcgaaggaagagactttgattttcaaatttcgtcccctatagattgtgttgtttctgggaaggagatggcagtttatgatcagagtggagatagaaacagaacacaaattgatacatcgaggaaaaggaaatctagaagtagaggtgacggtactactgtggctgagagattaaagagatggaaagagtataacgagaccgtagaagaagtttctaccaagaagaggaaagtacctgcgaaagggtcgaagaagggttgtatgaaaggtaaaggaggaccagagaatagccgatgtagtttcagaggagttaggcaaaggatttggggtaaatgggttgctgagatcagagagcctaatcgaggtagcaggctttggcttggtactttccctactgctcaagaagctgcttctgcttatgatgaggctgctaaagctatgtatggtcctttggctcgtcttaatttccctcggtctgatgcgtctgaggttacgagtacctcaagtcagtctgaggtgtgtactgttgagactcctggttgtgttcatgtgaaaacagaggatccagattgtgaatctaaacccttctccggtggagtggagccgatgtattgtctggagaatggtgcggaagagatgaagagaggtgttaaagcggataagcattggctgagcgagtttgaacataactattggagtgatattctgaaagagaaagagaaacagaaggagcaagggattgtagaaacctgtcagcaacaacagcaggattcgctatctgttgcagactatggttggcccaatgatgtggatcagagtcacttggattcttcagacatgtttgatgtcgatgagcttctacgtgacctaaatggcgacgatgtgtttgcaggcttaaatcaggaccggtacccggggaacagtgttgccaacggttcatacaggcccgagagtcaacaaagtggttttgatccgctacaaagcctcaactacggaatacctccgtttcagctcgagggaaaggatggtaatggattcttcgacgacttgagttacttggatctggagaactaaacaaaacaatatgaagctttttggatttgatatttgccttaatcccacaacgactgttgattctctatccgagttttagtgatatagagaactacagaacacgttttttcttgttataaaggtgaactgtatatatcgaaacagtgatatgacaatagagaagacaactatagtttgttagtctgcttctcttaagttgttctttagatatgttttatgttttgtaacaacaggaatgaataatacacacttgt

SEQ ID NO: 79650 - protein, 335 aa, Arabidopsis thaliana
  peptide (1)..(335): Ceres Seq. ID no. 12652374
  misc_feature (76)..(140): Pfam Name: AP2 domain Pfam Description: AP2 domain
  misc_feature (1)..(335): Homolog of NCBI NO: 15239107 NR Description: DRE binding protein (DREB2A); protein id: supported by cDNA: gi_17381031, supported by cDNA: gi_3738229 thaliana] >gi|11358883|pir||T51833 transcription
  misc_feature (1)..(333): Homolog of NCBI NO: 15228427 NR Description: DRE binding protein (DREB2B); protein id: supported by cDNA: gi_3738231 [Arabidopsis thaliana]
  misc_feature (1)..(153): Homolog of NCBI NO: 8346773 NR Description: AP2-domain DNA-binding protein [Catharanthus
  misc_feature (1)..(154): Homolog of NCBI NO: 25992100 NR Description: dehydration responsive element binding protein
  misc_feature (1)..(273): Homolog of NCBI NO: 30313898 NR Description: AP2 transcriptional activator DRF1.1 [Hordeum
  misc_feature (19)..(273): Homolog of NCBI NO: 27960760 NR Description: dehydration-responsive AP2 domain transcriptional
  misc_feature (19)..(174): Homolog of NCBI NO: 22594971 NR Description: DRE binding protein 2 [Oryza sativa]
  misc_feature (19)..(174): Homolog of NCBI NO: 25989383 NR Description: DREB1 [Oryza sativa]
  misc_feature (19)..(174): Homolog of NCBI NO: 34896106 NR Description: putative AP2-domain DNA-binding protein [Oryza
  misc_feature (19)..(334): Homolog of NCBI NO: 18405354 NR Description: AP2 domain transcription factor; protein id: supported by cDNA: 115358. [Arabidopsis thaliana]
MAVYDQSGDRNRTQIDTSRKRKSRSRGDGTTVAERLKRWKEYNETVEEVSTKKRKVPAKGSKKGCMKGKGGPENSRCSFRGVRQRIWGKWVAEIREPNRGSRLWLGTFPTAQEAASAYDEAAKAMYGPLARLNFPRSDASEVTSTSSQSEVCTVETPGCVHVKTEDPDCESKPFSGGVEPMYCLENGAEEMKRGVKADKHWLSEFEHNYWSDILKEKEKQKEQGIVETCQQQQQDSLSVADYGWPNDVDQSHLDSSDMFDVDELLRDLNGDDVFAGLNQDRYPGNSVANGSYRPESQQSGFDPLQSLNYGIPPFQLEGKDGNGFFDDLSYLDLEN

SEQ ID NO: 79651 - protein, 270 aa, Arabidopsis thaliana
  peptide (1)..(270): Ceres Seq. ID no. 12652375
  misc_feature (11)..(75): Pfam Name: AP2 domain Pfam Description: AP2 domain
  misc_feature (1)..(270): Homolog of NCBI NO: 15239107 NR Description: DRE binding protein (DREB2A); protein id: supported by cDNA: gi_17381031, supported by cDNA: gi_3738229 thaliana] >gi|11358883|pir||T51833 transcription
  misc_feature (1)..(268): Homolog of NCBI NO: 15228427 NR Description: DRE binding protein (DREB2B); protein id: supported by cDNA: gi_3738231 [Arabidopsis thaliana]
  misc_feature (1)..(88): Homolog of NCBI NO: 8346773 NR Description: AP2-domain DNA-binding protein [Catharanthus
  misc_feature (1)..(89): Homolog of NCBI NO: 25992100 NR Description: dehydration responsive element binding protein
  misc_feature (1)..(208): Homolog of NCBI NO: 30313898 NR Description: AP2 transcriptional activator DRF1.1 [Hordeum
  misc_feature (1)..(208): Homolog of NCBI NO: 27960760 NR Description: dehydration-responsive AP2 domain transcriptional
  misc_feature (1)..(109): Homolog of NCBI NO: 22594971 NR Description: DRE binding protein 2 [Oryza sativa]
  misc_feature (1)..(109): Homolog of NCBI NO: 25989383 NR Description: DREB1 [Oryza sativa]
  misc_feature (1)..(109): Homolog of NCBI NO: 34896106 NR Description: putative AP2-domain DNA-binding protein [Oryza
  misc_feature (1)..(269): Homolog of NCBI NO: 18405354 NR Description: AP2 domain transcription factor; protein id: supported by cDNA: 115358. [Arabidopsis thaliana]
MKGKGGPENSRCSFRGVRQRIWGKWVAEIREPNRGSRLWLGTFPTAQEAASAYDEAAKAMYGPLARLNFPRSDASEVTSTSSQSEVCTVETPGCVHVKTEDPDCESKPFSGGVEPMYCLENGAEEMKRGVKADKHWLSEFEHNYWSDILKEKEKQKEQGIVETCQQQQQDSLSVADYGWPNDVDQSHLDSSDMFDVDELLRDLNGDDVFAGLNQDRYPGNSVANGSYRPESQQSGFDPLQSLNYGIPPFQLEGKDGNGFFDDLSYLDLEN

SEQ ID NO: 79652 - protein, 211 aa, Arabidopsis thaliana
  peptide (1)..(211): Ceres Seq. ID no. 12652376
  misc_feature (1)..(211): Homolog of NCBI NO: 15239107 NR Description: DRE binding protein (DREB2A); protein id: supported by cDNA: gi_17381031, supported by cDNA: gi_3738229 thaliana] >gi|11358883|pir||T51833 transcription
  misc_feature (1)..(209): Homolog of NCBI NO: 15228427 NR Description: DRE binding protein (DREB2B); protein id: supported by cDNA: gi_3738231 [Arabidopsis thaliana]
  misc_feature (1)..(29): Homolog of NCBI NO: 8346773 NR Description: AP2-domain DNA-binding protein [Catharanthus
  misc_feature (1)..(30): Homolog of NCBI NO: 25992100 NR Description: dehydration responsive element binding protein
  misc_feature (1)..(149): Homolog of NCBI NO: 30313898 NR Description: AP2 transcriptional activator DRF1.1 [Hordeum
  misc_feature (1)..(149): Homolog of NCBI NO: 27960760 NR Description: dehydration-responsive AP2 domain transcriptional
  misc_feature (1)..(50): Homolog of NCBI NO: 22594971 NR Description: DRE binding protein 2 [Oryza sativa]
  misc_feature (1)..(50): Homolog of NCBI NO: 25989383 NR Description: DREB1 [Oryza sativa]
  misc_feature (1)..(50): Homolog of NCBI NO: 34896106 NR Description: putative AP2-domain DNA-binding protein [Oryza
  misc_feature (1)..(210): Homolog of NCBI NO: 18405354 NR Description: AP2 domain transcription factor; protein id: supported by cDNA: 115358. [Arabidopsis thaliana]
MYGPLARLNFPRSDASEVTSTSSQSEVCTVETPGCVHVKTEDPDCESKPFSGGVEPMYCLENGAEEMKRGVKADKHWLSEFEHNYWSDILKEKEKQKEQGIVETCQQQQQDSLSVADYGWPNDVDQSHLDSSDMFDVDELLRDLNGDDVFAGLNQDRYPGNSVANGSYRPESQQSGFDPLQSLNYGIPPFQLEGKDGNGFFDDLSYLDLEN

SEQ ID NO: 79653 - DNA, 1641 bp, Arabidopsis thaliana
  misc_feature (1)..(1641): Ceres Seq. ID no. 12652414
  misc_feature: MA Experiment ID: 20001905 Result: Up-regulated in Transcription
  misc_feature: MA Experiment 20001905 PARAMETER Experiment Name: At_Drought_Reproduction_P Parameter: Age (day) Value: 40
  misc_feature: MA Experiment 20001905 PARAMETER Experiment Name: At_Drought_Reproduction_P Parameter: Organism Value: A. thaliana
  misc_feature: MA Experiment 20001905 PARAMETER Experiment Name: At_Drought_Reproduction_P Parameter: Plant Line Value: WS
  misc_feature: MA Experiment 20001905 PARAMETER Experiment Name: At_Drought_Reproduction_P Parameter: Timepoint (day) Value: 10
  misc_feature: MA Experiment 20001905 PARAMETER Experiment Name: At_Drought_Reproduction_P Parameter: Tissue Value: Rosettes
  misc_feature: MA Experiment 20001905 PARAMETER Experiment Name: At_Drought_Reproduction_P Parameter: Treatment Value: Drought vs. No Drought
atggatggttcgtcggaaaatttgccagaagtggaagagaaaggtagagaaagcagttgctgcagctcggaaacaaccagacaagaggaggaagaacaaagccctagctgtacggaggatttcacggcttctccggtttcatctcgttggtctgtgaagaacatcgatggagagaagaagaagattcgttcggattcaagagtttcagaggttgagatgatgaaggaaagattttcgaaactgctgcttggagaagatatgtcaggttctggaaatggtgtctgtacagctttagctatctcaaacgcaatcactaatctttgtgctaccttgtttggacaactatggaggttagaaccactgcctacagagaagaaagagatgtggagaagagaaatggaatggcttctctgtgtcagtgatcacattgtagagatgactcctacttggcaaacatttcctgatggaaccaaacttgagataatgacttgcagaccaagatcagatctttatgttaacctcccagctctcaggaaactagataacatgcttcttgagatattagatagttttgaggagacagagttttggtatgttgaccaaggaatcatggcacacgaatcagcagcggacggatcatcttctttccgaaaatcttttcagagacaagaagacaaatggtggcttcctgttccacgggtttcaccaggaggtttacaagaaaactcaagaaaacagttgcagcataaacgcgactgtactaatcagatattaaaagctgctatggccatcaacagtatcacactcgctgacatggaaatccctgaatcataccttgaatctcttccgcggaaagggagatcttgccttggtgacttaatctacagatacatttcatcggatcaattttcacctgaatgtcttcttgattgccttgacttatcctctgaacatcaagccatagagatagctaaccgagtcgagtcatcgatctatctatggcacaaaagaactaattccaaaccagctactaataccaaaacgtcgtgggaaatggtgaaagaactaatggttgatgcagataagctagagctaatggcggatcgagctgaaagtttattgctttctttaaaacaacgattcccaggtcttcctcaaaccgctctagacatgagcaaaatccaatacaacaaggacatcgggaaatcgattctggaaagctattcaagagttctagagagcttagcattcaacattgttgcacgcatcgatgatttgctctttgttgatgatcttacaagacattcatcggatcagattcctacaacattaggcaacaacgggaatgacgctcctaagagcattgcagtgccggtttcaaactacacaactccgagctactcgccttcaaaacaggagcttcgatcatcaattacagttccaccatctccctcccggttcaagattcctcacagtagcagtgttaaaagggttttgacagcttatgtaacaaagaacgaaccaagactgaagaatcttcctttagaaagatcgagccgttcttcgtcgagtgagagattgtctctggagaaatgcatgaaggagtcgttgaatgtatcgaaccttgatcctgggatttga

SEQ ID NO: 79654 - protein, 546 aa, Arabidopsis thaliana
  peptide (1)..(546): Ceres Seq. ID no. 12652415
  misc_feature (1)..(437): Pfam Name: Domain of unknown function (DUF315) Pfam Description: Domain of unknown function (DUF315)
  misc_feature (1)..(546): Homolog of NCBI NO: 15241663 NR Description: putative protein; protein id: At5g02010.1
  misc_feature (55)..(471): Homolog of NCBI NO: 34908302 NR Description: P0005H10.23 [Oryza sativa (japonica
  misc_feature (66)..(546): Homolog of NCBI NO: 15239292 NR Description: putative protein; protein id: At5g05940.1 thaliana] >gi|10177567|dbj|BAB10799.1|
  misc_feature (65)..(482): Homolog of NCBI NO: 15233845 NR Description: putative protein; protein id: At4g38430.1, by cDNA: gi_15810308, supported by cDNA: gi_15912194 [Arabidopsis >gi|18421309|ref|NP_568515.1| Expressed protein [Arabidopsis
  misc_feature (65)..(482): Homolog of NCBI NO: 15810309 NR Description: unknown protein [Arabidopsis thaliana]
  misc_feature (63)..(438): Homolog of NCBI NO: 15228166 NR Description: putative protein; protein id: At3g55660.1
  misc_feature (32)..(436): Homolog of NCBI NO: 15236138 NR Description: putative protein; protein id: At4g00460.1
  misc_feature (43)..(434): Homolog of NCBI NO: 37536670 NR Description: hypothetical protein [Oryza sativa (japonica group)] >gi|10140653|gb|AAG13489.1| hypothetical protein [Oryza
  misc_feature (32)..(434): Homolog of NCBI NO: 15223455 NR Description: hypothetical protein; protein id: At1g01700.1
  misc_feature (172)..(434): Homolog of NCBI NO: 25349309 NR Description: hypothetical protein T1N6.8 - Arabidopsis >gi|8671837|gb|AAF78400.1|AC009273_6 Contains strong similarity an unknown protein CAB81591 gi|7263554 from Arabidopsis thaliana
MDGSSENLPEVEEKGRESSCCSSETTRQEEEEQSPSCTEDFTASPVSSRWSVKNIDGEKKKIRSDSRVSEVEMMKERFSKLLLGEDMSGSGNGVCTALAISNAITNLCATLFGQLWRLEPLPTEKKEMWRREMEWLLCVSDHIVEMTPTWQTFPDGTKLEIMTCRPRSDLYVNLPALRKLDNMLLEILDSFEETEFWYVDQGIMAHESAADGSSSFRKSFQRQEDKWWLPVPRVSPGGLQENSRKQLQHKRDCTNQILKAAMAINSITLADMEIPESYLESLPRKGRSCLGDLIYRYISSDQFSPECLLDCLDLSSEHQAIEIANRVESSIYLWHKRTNSKPATNTKTSWEMVKELMVDADKLELMADRAESLLLSLKQRFPGLPQTALDMSKIQYNKDIGKSILESYSRVLESLAFNIVARIDDLLFVDDLTRHSSDQIPTTLGNNGNDAPKSIAVPVSNYTTPSYSPSKQELRSSITVPPSPSRFKIPHSSSVKRVLTAYVTKNEPRLKNLPLERSSRSSSSERLSLEKCMKESLNVSNLDPGI

SEQ ID NO: 79655 - protein, 474 aa, Arabidopsis thaliana
  peptide (1)..(474): Ceres Seq. ID no. 12652416
  misc_feature (1)..(365): Pfam Name: Domain of unknown function (DUF315) Pfam Description: Domain of unknown function (DUF315)
  misc_feature (1)..(474): Homolog of NCBI NO: 15241663 NR Description: putative protein; protein id: At5g02010.1
  misc_feature (1)..(399): Homolog of NCBI NO: 34908302 NR Description: P0005H10.23 [Oryza sativa (japonica
  misc_feature (1)..(474): Homolog of NCBI NO: 15239292 NR Description: putative protein; protein id: At5g05940.1 thaliana] >gi|10177567|dbj|BAB10799.1|
  misc_feature (1)..(410): Homolog of NCBI NO: 15233845 NR Description: putative protein; protein id: At4g38430.1, by cDNA: gi_15810308, supported by cDNA: gi_15912194 [Arabidopsis >gi|18421309|ref|NP_568515.1| Expressed protein [Arabidopsis
  misc_feature (1)..(410): Homolog of NCBI NO: 15810309 NR Description: unknown protein [Arabidopsis thaliana]
  misc_feature (1)..(366): Homolog of NCBI NO: 15228166 NR Description: putative protein; protein id: At3g55660.1
  misc_feature (1)..(364): Homolog of NCBI NO: 15236138 NR Description: putative protein; protein id: At4g00460.1
  misc_feature (1)..(362): Homolog of NCBI NO: 37536670 NR Description: hypothetical protein [Oryza sativa (japonica group)] >gi|10140653|gb|AAG13489.1| hypothetical protein [Oryza
  misc_feature (1)..(362): Homolog of NCBI NO: 15223455 NR Description: hypothetical protein; protein id: At1g01700.1
  misc_feature (100)..(362): Homolog of NCBI NO: 25349309 NR Description: hypothetical protein T1N6.8 - Arabidopsis >gi|8671837|gb|AAF78400.1|AC009273_6 Contains strong similarity an unknown protein CAB81591 gi|7263554 from Arabidopsis thaliana
MMKERFSKLLLGEDMSGSGNGVCTALAISNAITNLCATLFGQLWRLEPLPTEKKEMWRREMEWLLCVSDHIVEMTPTWQTFPDGTKLEIMTCRPRSDLYVNLPALRKLDNMLLEILDSFEETEFWYVDQGIMAHESAADGSSSFRKSFQRQEDKWWLPVPRVSPGGLQENSRKQLQHKRDCTNQILKAAMAINSITLADMEIPESYLESLPRKGRSCLGDLIYRYISSDQFSPECLLDCLDLSSEHQAIEIANRVESSIYLWHKRTNSKPATNTKTSWEMVKELMVDADKLELMADRAESLLLSLKQRFPGLPQTALDMSKIQYNKDIGKSILESYSRVLESLAFNIVARIDDLLFVDDLTRHSSDQIPTTLGNNGNDAPKSIAVPVSNYTTPSYSPSKQELRSSITVPPSPSRFKIPHSSSVKRVLTAYVTKNEPRLKNLPLERSSRSSSSERLSLEKCMKESLNVSNLDPGI

SEQ ID NO: 79656 - protein, 473 aa, Arabidopsis thaliana
  peptide (1)..(473): Ceres Seq. ID no. 12652417
  misc_feature (1)..(364): Pfam Name: Domain of unknown function (DUF315) Pfam Description: Domain of unknown function (DUF315)
  misc_feature (1)..(473): Homolog of NCBI NO: 15241663 NR Description: putative protein; protein id: At5g02010.1
  misc_feature (1)..(398): Homolog of NCBI NO: 34908302 NR Description: P0005H10.23 [Oryza sativa (japonica
  misc_feature (1)..(473): Homolog of NCBI NO: 15239292 NR Description: putative protein; protein id: At5g05940.1 thaliana] >gi|10177567|dbj|BAB10799.1|
  misc_feature (1)..(409): Homolog of NCBI NO: 15233845 NR Description: putative protein; protein id: At4g38430.1, by cDNA: gi_15810308, supported by cDNA: gi_15912194 [Arabidopsis >gi|18421309|ref|NP_568515.1| Expressed protein [Arabidopsis
  misc_feature (1)..(409): Homolog of NCBI NO: 15810309 NR Description: unknown protein [Arabidopsis thaliana]
  misc_feature (1)..(365): Homolog of NCBI NO: 15228166 NR Description: putative protein; protein id: At3g55660.1
  misc_feature (1)..(363): Homolog of NCBI NO: 15236138 NR Description: putative protein; protein id: At4g00460.1
  misc_feature (1)..(361): Homolog of NCBI NO: 37536670 NR Description: hypothetical protein [Oryza sativa (japonica group)] >gi|10140653|gb|AAG13489.1| hypothetical protein [Oryza
  misc_feature (1)..(361): Homolog of NCBI NO: 15223455 NR Description: hypothetical protein; protein id: At1g01700.1
  misc_feature (99)..(361): Homolog of NCBI NO: 25349309 NR Description: hypothetical protein T1N6.8 - Arabidopsis >gi|8671837|gb|AAF78400.1|AC009273_6 Contains strong similarity an unknown protein CAB81591 gi|7263554 from Arabidopsis thaliana
MKERFSKLLLGEDMSGSGNGVCTALAISNAITNLCATLFGQLWRLEPLPTEKKEMWRREMEWLLCVSDHIVEMTPTWQTFPDGTKLEIMTCRPRSDLYVNLPALRKLDNMLLEILDSFEETEFWYVDQGIMAHESAADGSSSFRKSFQRQEDKWWLPVPRVSPGGLQENSRKQLQHKRDCTNQILKAAMAINSITLADMEIPESYLESLPRKGRSCLGDLIYRYISSDQFSPECLLDCLDLSSEHQAIEIANRVESSIYLWHKRTNSKPATNTKTSWEMVKELMVDADKLELMADRAESLLLSLKQRFPGLPQTALDMSKIQYNKDIGKSILESYSRVLESLAFNIVARIDDLLFVDDLTRHSSDQIPTTLGNNGNDAPKSIAVPVSNYTTPSYSPSKQELRSSITVPPSPSRFKIPHSSSVKRVLTAYVTKNEPRLKNLPLERSSRSSSSERLSLEKCMKESLNVSNLDPGI

SEQ ID NO: 79657 - DNA, 1974 bp, Arabidopsis thaliana
  misc_feature (1)..(1974): Ceres Seq. ID no. 12652422
  misc_feature: MA Experiment ID: 20000227 Result: Up-regulated in Transcription
  misc_feature: MA Experiment 20000227 PARAMETER Experiment Name: At_Root-Tips-vs-Tops_P Parameter: Tissue Value: Root Tips vs. Root Tops
atggagaagaagcgatcatactacgccttattgatacctactctcttgaccgtatggctagcatgcgcgggtcattcttgtgcccgacatgctaaggcaaaacctcccatggccggaccaccacggtgtcctaactgcggacctatggttgtaccttatcctctaagcacgggtccaacctgcggggatcaagcctataggataaattgtgttggtggtaagctttatttcggtgccctccatgggtcatcttatgtcattacgtccatcaactcagtgacccagcggatcgttctacgcccgcctggtcttgctagctcagtatcctgtatctcagctgatgtctctaaacagggcctcgagctcgacccccatctccctttcagcatcactagtagcaacactatcttgctccttaattgctctcaggctatgctgcaggcgccaatagattgtagtcctaccagcttatgttacagctacatcaagaacaatgcatcaccttgttctaaggctcccttgtgttgcaccttcagaaccgacgggtctcaaaccgcttacacgatcaggatcaacggtgggggatgcctcgcgtaccaaagcttcgtggggctgaatccaaacaaagaggttcctcctcccgggaaaaaatggcctgacacggggctcgagttgcaatgggcattgcctaaagaaccagtttgcaaaactgatgtagattgtaacctcttgttgggtaaatcaaaatgcttgcctgatccaacgagtctcggcctgaaacgatgctcctgcaaaaaaggtttggaatgggatccggttaacgcaatatgtggtaaatgtcgccatgggaaacactgcaaaaagaagaagaagaccgttgttttcgcaggtgcggctgttgcggttgtgggagttacgctagcgattgcggtagcagtaattggaaccaaacatagccaccaaaaggttaaaaaggatatccacaagaacattgttaaggagcgagaagagatgcttagcgcaaattccactggaaaatcatcaagaatcttcactggcagagaaatcacgaaagcaaccaacaatttctcaaaagacaatctcataggcactggaggttttggagaagtgtttaaagctgttcttgaggatggaaccataaccgcgatcaaacgagcaaagcttaacaacaccaaaggcactgatcagatcctaaacgaagtccggattctctgccaagtcaatcatagaagcttagttaggcttctcggttgctgtgttgatcttgaattgcctctcttgatctacgagtttattcccaacggaacgctgttcgaacatctccatggcagttcagaccgtacttggaaaccgctgacttggcggcgcagactgcagattgcataccaaaccgctgaaggattagcttatctccactccgcagcacagccacccatttaccaccgcgacgtaaagtcaagcaatattttgcttgacgagaagctaaacgccaaggtttcagactttgggctgtcaagacttgtggatttgacagaaaccgctaataacgagagccatatcttcacgggtgcgcaaggtacattgggatacctcgatccagaatactaccggaatttccagctaactgataagagcgatgtgtacagcttcggggttgtgcttctggagatggttacatcgaagaaggcgatagatttcactagagaagaggaagatgtgaacctggtgatgtatattaacaagatgatggatcaagagagattgactgaatgcatcgatccactgctgaagaagacagctaacaagattgacatgcagacgatacagcagctcgggaatttagcatctgcgtgccttaacgaacggagacaaaaccgaccttcgatgaaagaggttgctgatgagattgaatacatcatcaatattctgtcacaagaggttactgagacatag

SEQ ID NO: 79658 - protein, 657 aa, Arabidopsis thaliana
  peptide (1)..(657): Ceres Seq. ID no. 12652423
  misc_feature (42)..(648): Homolog of NCBI NO: 15232348 NR Description: protein kinase-like protein; protein id:
  misc_feature (223)..(646): Homolog of NCBI NO: 9758129 NR Description: contains similarity to protein
  misc_feature (223)..(646): Homolog of NCBI NO: 30698255 NR Description: protein kinase family [Arabidopsis thaliana]
  misc_feature (223)..(646): Homolog of NCBI NO: 26450415 NR Description: unknown protein [Arabidopsis thaliana]
  misc_feature (128)..(646): Homolog of NCBI NO: 34902300 NR Description: Putative protein kinase [Oryza sativa (japonica group)] >gi|24308627|gb|AAN52750.1| Putative protein kinase
  misc_feature (264)..(646): Homolog of NCBI NO: 15219447 NR Description: WAK-like kinase (WLK); protein id: At1g79680.1,
  misc_feature (264)..(646): Homolog of NCBI NO: 25405037 NR Description: protein F20B17.10 [imported] - Arabidopsis >gi|7715604|gb|AAF68122.1|AC010793_17 F20B17.10 [Arabidopsis
  misc_feature (348)..(655): Homolog of NCBI NO: 38567980 NR Description: OSJNBa0093F12.21 [Oryza sativa (japonica
  misc_feature (280)..(646): Homolog of NCBI NO: 15219132 NR Description: WAK-like kinase (WLK); protein id: At1g16120.1
  misc_feature (225)..(644): Homolog of NCBI NO: 25287657 NR Description: F16F4.8 protein - Arabidopsis thaliana
MEKKRSYYALLIPTLLTVWLACAGHSCARHAKAKPPMAGPPRCPNCGPMVVPYPLSTGPTCGDQAYRINCVGGKLYFGALHGSSYVITSINSVTQRIVLRPPGLASSVSCISADVSKQGLELDPHLPFSITSSNTILLLNCSQAMLQAPIDCSPTSLCYSYIKNNASPCSKAPLCCTFRTDGSQTAYTIRINGGGCLAYQSFVGLNPNKEVPPPGKKWPDTGLELQWALPKEPVCKTDVDCNLLLGKSKCLPDPTSLGLKRCSCKKGLEWDPVNAICGKCRHGKHCKKKKKTVVFAGAAVAVVGVTLAIAVAVIGTKHSHQKVKKDIHKNIVKEREEMLSANSTGKSSRIFTGREITKATNNFSKDNLIGTGGFGEVFKAVLEDGTITAIKRAKLNNTKGTDQILNEVRILCQVNHRSLVRLLGCCVDLELPLLIYEFIPNGTLFEHLHGSSDRTWKPLTWRRRLQIAYQTAEGLAYLHSAAQPPIYHRDVKSSNILLDEKLNAKVSDFGLSRLVDLTETANNESHIFTGAQGTLGYLDPEYYRNFQLTDKSDVYSFGVVLLEMVTSKKAIDFTREEEDVNLVMYINKMMDQERLTECIDPLLKKTANKIDMQTIQQLGNLASACLNERRQNRPSMKEVADEIEYIINILSQEVTET

SEQ ID NO: 79659 - protein, 621 aa, Arabidopsis thaliana
  peptide (1)..(621): Ceres Seq. ID no. 12652424
  misc_feature (6)..(612): Homolog of NCBI NO: 15232348 NR Description: protein kinase-like protein; protein id:
  misc_feature (187)..(610): Homolog of NCBI NO: 9758129 NR Description: contains similarity to protein
  misc_feature (187)..(610): Homolog of NCBI NO: 30698255 NR Description: protein kinase family [Arabidopsis thaliana]
  misc_feature (187)..(610): Homolog of NCBI NO: 26450415 NR Description: unknown protein [Arabidopsis thaliana]
  misc_feature (92)..(610): Homolog of NCBI NO: 34902300 NR Description: Putative protein kinase [Oryza sativa (japonica group)] >gi|24308627|gb|AAN52750.1| Putative protein kinase
  misc_feature (228)..(610): Homolog of NCBI NO: 15219447 NR Description: WAK-like kinase (WLK); protein id: At1g79680.1,
  misc_feature (228)..(610): Homolog of NCBI NO: 25405037 NR Description: protein F20B17.10 [imported] - Arabidopsis >gi|7715604|gb|AAF68122.1|AC010793_17 F20B17.10 [Arabidopsis
  misc_feature (312)..(619): Homolog of NCBI NO: 38567980 NR Description: OSJNBa0093F12.21 [Oryza sativa (japonica
  misc_feature (244)..(610): Homolog of NCBI NO: 15219132 NR Description: WAK-like kinase (WLK); protein id: At1g16120.1
  misc_feature (189)..(608): Homolog of NCBI NO: 25287657 NR Description: F16F4.8 protein - Arabidopsis thaliana
MAGPPRCPNCGPMVVPYPLSTGPTCGDQAYRINCVGGKLYFGALHGSSYVITSINSVTQRIVLRPPGLASSVSCISADVSKQGLELDPHLPFSITSSNTILLLNCSQAMLQAPIDCSPTSLCYSYIKNNASPCSKAPLCCTFRTDGSQTAYTIRINGGGCLAYQSFVGLNPNKEVPPPGKKWPDTGLELQWALPKEPVCKTDVDCNLLLGKSKCLPDPTSLGLKRCSCKKGLEWDPVNAICGKCRHGKHCKKKKKTVVFAGAAVAVVGVTLAIAVAVIGTKHSHQKVKKDIHKNIVKEREEMLSANSTGKSSRIFTGREITKATNNFSKDNLIGTGGFGEVFKAVLEDGTITAIKRAKLNNTKGTDQILNEVRILCQVNHRSLVRLLGCCVDLELPLLIYEFIPNGTLFEHLHGSSDRTWKPLTWRRRLQIAYQTAEGLAYLHSAAQPPIYHRDVKSSNILLDEKLNAKVSDFGLSRLVDLTETANNESHIFTGAQGTLGYLDPEYYRNFQLTDKSDVYSFGVVLLEMVTSKKAIDFTREEEDVNLVMYINKMMDQERLTECIDPLLKKTANKIDMQTIQQLGNLASACLNERRQNRPSMKEVADEIEYIINILSQEVTET

SEQ ID NO: 79660 - protein, 609 aa, Arabidopsis thaliana
  peptide (1)..(609): Ceres Seq. ID no. 12652425
  misc_feature (1)..(600): Homolog of NCBI NO: 15232348 NR Description: protein kinase-like protein; protein id:
  misc_feature (175)..(598): Homolog of NCBI NO: 9758129 NR Description: contains similarity to protein
  misc_feature (175)..(598): Homolog of NCBI NO: 30698255 NR Description: protein kinase family [Arabidopsis thaliana]
  misc_feature (175)..(598): Homolog of NCBI NO: 26450415 NR Description: unknown protein [Arabidopsis thaliana]
  misc_feature (80)..(598): Homolog of NCBI NO: 34902300 NR Description: Putative protein kinase [Oryza sativa (japonica group)] >gi|24308627|gb|AAN52750.1| Putative protein kinase
  misc_feature (216)..(598): Homolog of NCBI NO: 15219447 NR Description: WAK-like kinase (WLK); protein id: At1g79680.1,
  misc_feature (216)..(598): Homolog of NCBI NO: 25405037 NR Description: protein F20B17.10 [imported] - Arabidopsis >gi|7715604|gb|AAF68122.1|AC010793_17 F20B17.10 [Arabidopsis
  misc_feature (300)..(607): Homolog of NCBI NO: 38567980 NR Description: OSJNBa0093F12.21 [Oryza sativa (japonica
  misc_feature (232)..(598): Homolog of NCBI NO: 15219132 NR Description: WAK-like kinase (WLK); protein id: At1g16120.1
  misc_feature (177)..(596): Homolog of NCBI NO: 25287657 NR Description: F16F4.8 protein - Arabidopsis thaliana
MVVPYPLSTGPTCGDQAYRINCVGGKLYFGALHGSSYVITSINSVTQRIVLRPPGLASSVSCISADVSKQGLELDPHLPFSITSSNTILLLNCSQAMLQAPIDCSPTSLCYSYIKNNASPCSKAPLCCTFRTDGSQTAYTIRINGGGCLAYQSFVGLNPNKEVPPPGKKWPDTGLELQWALPKEPVCKTDVDCNLLLGKSKCLPDPTSLGLKRCSCKKGLEWDPVNAICGKCRHGKHCKKKKKTVVFAGAAVAVVGVTLAIAVAVIGTKHSHQKVKKDIHKNIVKEREEMLSANSTGKSSRIFTGREITKATNNFSKDNLIGTGGFGEVFKAVLEDGTITAIKRAKLNNTKGTDQILNEVRILCQVNHRSLVRLLGCCVDLELPLLIYEFIPNGTLFEHLHGSSDRTWKPLTWRRRLQIAYQTAEGLAYLHSAAQPPIYHRDVKSSNILLDEKLNAKVSDFGLSRLVDLTETANNESHIFTGAQGTLGYLDPEYYRNFQLTDKSDVYSFGVVLLEMVTSKKAIDFTREEEDVNLVMYINKMMDQERLTECIDPLLKKTANKIDMQTIQQLGNLASACLNERRQNRPSMKEVADEIEYIINILSQEVTET

SEQ ID NO: 79661 - DNA, 1829 bp, Arabidopsis thaliana
  misc_feature (1)..(1829): Ceres Seq. ID no. 12652438
  misc_feature: MA Experiment ID: 20000306 Result: Up-regulated in Transcription
  misc_feature: MA Experiment 20000306 PARAMETER Experiment Name: At_Germinating_Seeds_Sub_P Parameter: Age (hr) Value: 6 vs. 0
  misc_feature: MA Experiment 20000306 PARAMETER Experiment Name: At_Germinating_Seeds_Sub_P Parameter: Organism Value: A. thaliana
  misc_feature: MA Experiment 20000306 PARAMETER Experiment Name: At_Germinating_Seeds_Sub_P Parameter: Plant Line Value: WS
  misc_feature: MA Experiment 20000306 PARAMETER Experiment Name: At_Germinating_Seeds_Sub_P Parameter: Tissue Value: Germinating Seeds
  misc_feature: MA Experiment ID: 20000352 Result: Up-regulated in Transcription
  misc_feature: MA Experiment 20000352 PARAMETER Experiment Name: At_Drought_Sub_P Parameter: Age (day) Value: 7
  misc_feature: MA Experiment 20000352 PARAMETER Experiment Name: At_Drought_Sub_P Parameter: Organism Value: A. thaliana
  misc_feature: MA Experiment 20000352 PARAMETER Experiment Name: At_Drought_Sub_P Parameter: Plant Line Value: WS
  misc_feature: MA Experiment 20000352 PARAMETER Experiment Name: At_Drought_Sub_P Parameter: Timepoint (hr) Value: 6
  misc_feature: MA Experiment 20000352 PARAMETER Experiment Name: At_Drought_Sub_P Parameter: Tissue Value: Whole Plant
  misc_feature: MA Experiment 20000352 PARAMETER Experiment Name: At_Drought_Sub_P Parameter: Treatment Value: Drought vs. No Drought
  misc_feature: MA Experiment ID: 20000355 Result: Down-regulated in Transcription
  misc_feature: MA Experiment 20000355 PARAMETER Experiment Name: At_Siliques_Sub_P Parameter: Age (day) Value: 21
  misc_feature: MA Experiment 20000355 PARAMETER Experiment Name: At_Siliques_Sub_P Parameter: Organism Value: A. thaliana
  misc_feature: MA Experiment 20000355 PARAMETER Experiment Name: At_Siliques_Sub_P Parameter: Plant Line Value: WS
  misc_feature: MA Experiment 20000355 PARAMETER Experiment Name: At_Siliques_Sub_P Parameter: Tissue Value: Less Than 5mm Siliques vs. Whole Plant
  misc_feature: MA Experiment ID: 20000440 Result: Up-regulated in Transcription
  misc_feature: MA Experiment 20000440 PARAMETER Experiment Name: At_Closed-Flower__Sub_P Parameter: Tissue Value: Closed Flower vs. Whole Plant
acagtagaagaatacaaacaaagtagatgaagcaaaacgagacattcgatcaagaaagggaagatttgtatcacacgttcgatgaggaagatgaagaaagccaaacagagagctccgttccctcaactcctttatctcgtaacagatccgaagacgttcccgttccgtggcctcgaagttatcgacaatctatggatttgttgactggagttacacctccgactagtacaagttttgtctcttcatttcgccagagacgacaaagctctgttttcggttcgtttacttcttcaccaagcaaacagcaacttctcatagacaaagacgagatccaaagctctgttgtgtcctccatcaaatcatttcttgcttctcatctccagctatcagtcccaggggatcttttaactccccaagaaaaccgcagttgcacattctctcaatccgttctcaacggaattaacgttctatgtggagtagctttacttacaatgccttacgcagttaaagaaggaggatggttagggcttttcatactcttctcctttggcattatcactttctacaccggcattctcctcaagagatgtctcgagaactcccctggaatccacacttacccggacatcggtcaagctgcattcggaaccactggacgcatcctcgtctctatacttctctacgtagagttatacgcatcttgtgtggaatacataatcatgatgagtgataatttgtcaagaatgttcccaaatacctccttatacatcaacggattttctttagattctactcaagttttcgccattaccacgactcttattgttcttcctactgtctggctcaaagacctcagcttattgtcctatctctcagccggaggtgtcatctcctcaatcttgcttgcgctttgcctcttttgggctggatcagtagacggggttggatttcacataagcggacaagctcttgatataactaacatacctgtcgcaatcggaatttacgggttcggtttcgggagtcactctgttttccccaacatttactcatccatgaaagaaccttccaagtttcctacggtgcttctcatcagttttgcgttttgcactctattttacattgcggtagcggtttgtggattcacgatgtttggtgatgcgattcaatcccaatttacactgaacatgccaccacatttcacctcatctaaaatcgcagtctggacagcggtcgtaacaccaatgacgaaatacgctttaacgatcactccagtaatgctaagcctagaagaactcataccgtcttcatcaagaaagatgagatccaaaggtgtctctatgctctttagaaccatattagttctctccactttggtcgttgcactcacagttccattcttcgctactgtggcggctctgattggatctttcatcgcaatgcttatcgcgttaatattcccgtgtctctgttatatcagcattatgaagggtagattaactaactttcagattggaatttgtattttaatcgtgataatcggcattgtaagcggttgttgcgggacttattctgctatcgccagattaatcggcgaaatgacctgattggttttgcagaataagtacgtatattcgaaggaataaaccggtatatacttgaataaaaccggtttttgataaaccaatggttttttgtgtgaagataatccaatttgatttttttttttggtattttattcatagttttaagtccattttactcaatgtagtcttcatttttttttttcatttgctcatttaaaaataaataaataacagaatattttg

SEQ ID NO: 79662 - protein, 526 aa, Arabidopsis thaliana
  peptide (1)..(526): Ceres Seq. ID no. 12652439
  misc_feature (1)..(526): Homolog of NCBI NO: 22326569 NR Description: putative protein; protein id: At5g02170.1, by cDNA: gi_20856760 [Arabidopsis thaliana] AT5g02170/T7H20_220 [Arabidopsis thaliana]
  misc_feature (1)..(526): Homolog of NCBI NO: 11358405 NR Description: hypothetical protein T7H20.220 - Arabidopsis >gi|7340691|emb|CAB82990.1| putative protein [Arabidopsis
  misc_feature (6)..(526): Homolog of NCBI NO: 30679549 NR Description: amino acid transporter family [Arabidopsis >gi|26449931|dbj|BAC42086.1| unknown protein [Arabidopsis
  misc_feature (6)..(526): Homolog of NCBI NO: 11358406 NR Description: hypothetical protein T7H20.230 - Arabidopsis >gi|7340692|emb|CAB82991.1| putative protein [Arabidopsis
  misc_feature (8)..(474): Homolog of NCBI NO: 15232639 NR Description: hypothetical protein; protein id: At3g09340.1 thaliana] >gi|6478926|gb|AAF14031.1|AC011436_15 hypothetical
  misc_feature (5)..(434): Homolog of NCBI NO: 15232638 NR Description: hypothetical protein; protein id: At3g09330.1 thaliana] >gi|6478925|gb|AAF14030.1|AC011436_14 hypothetical
  misc_feature (132)..(526): Homolog of NCBI NO: 30687791 NR Description: amino acid transporter family [Arabidopsis
  misc_feature (132)..(526): Homolog of NCBI NO: 15292735 NR Description: unknown protein [Arabidopsis thaliana]
  misc_feature (132)..(404): Homolog of NCBI NO: 25408639 NR Description: hypothetical protein At2g39130 [imported] -
  misc_feature (424)..(526): Homolog of NCBI NO: 25408639 NR Description: hypothetical protein At2g39130 [imported] -
MKQNETFDQEREDLYHTFDEEDEESQTESSVPSTPLSRNRSEDVPVPWPRSYRQSMDLLTGVTPPTSTSFVSSFRQRRQSSVFGSFTSSPSKQQLLIDKDEIQSSVVSSIKSFLASHLQLSVPGDLLTPQENRSCTFSQSVLNGINVLCGVALLTMPYAVKEGGWLGLFILFSFGIITFYTGILLKRCLENSPGIHTYPDIGQAAFGTTGRILVSILLYVELYASCVEYIIMMSDNLSRMFPNTSLYINGFSLDSTQVFAITTTLIVLPTVWLKDLSLLSYLSAGGVISSILLALCLFWAGSVDGVGFHISGQALDITNIPVAIGIYGFGFGSHSVFPNIYSSMKEPSKFPTVLLISFAFCTLFYIAVAVCGFTMFGDAIQSQFTLNMPPHFTSSKIAVWTAVVTPMTKYALTITPVMLSLEELIPSSSRKMRSKGVSMLFRTILVLSTLVVALTVPFFATVAALIGSFIAMLIALIFPCLCYISIMKGRLTNFQIGICILIVIIGIVSGCCGTYSAIARLIGEMT

SEQ ID NO: 79663 - protein, 471 aa, Arabidopsis thaliana
  peptide (1)..(471): Ceres Seq. ID no. 12652440
  misc_feature (1)..(471): Homolog of NCBI NO: 22326569 NR Description: putative protein; protein id: At5g02170.1, by cDNA: gi_20856760 [Arabidopsis thaliana] AT5g02170/T7H20_220 [Arabidopsis thaliana]
  misc_feature (1)..(471): Homolog of NCBI NO: 11358405 NR Description: hypothetical protein T7H20.220 - Arabidopsis >gi|7340691|emb|CAB82990.1| putative protein [Arabidopsis
  misc_feature (1)..(471): Homolog of NCBI NO: 30679549 NR Description: amino acid transporter family [Arabidopsis >gi|26449931|dbj|BAC42086.1| unknown protein [Arabidopsis
  misc_feature (1)..(471): Homolog of NCBI NO: 11358406 NR Description: hypothetical protein T7H20.230 - Arabidopsis >gi|7340692|emb|CAB82991.1| putative protein [Arabidopsis
  misc_feature (1)..(419): Homolog of NCBI NO: 15232639 NR Description: hypothetical protein; protein id: At3g09340.1 thaliana] >gi|6478926|gb|AAF14031.1|AC011436_15 hypothetical
  misc_feature (1)..(379): Homolog of NCBI NO: 15232638 NR Description: hypothetical protein; protein id: At3g09330.1 thaliana] >gi|6478925|gb|AAF14030.1|AC011436_14 hypothetical
  misc_feature (77)..(471): Homolog of NCBI NO: 30687791 NR Description: amino acid transporter family [Arabidopsis
  misc_feature (77)..(471): Homolog of NCBI NO: 15292735 NR Description: unknown protein [Arabidopsis thaliana]
  misc_feature (77)..(349): Homolog of NCBI NO: 25408639 NR Description: hypothetical protein At2g39130 [imported] -
  misc_feature (369)..(471): Homolog of NCBI NO: 25408639 NR Description: hypothetical protein At2g39130 [imported] -
MDLLTGVTPPTSTSFVSSFRQRRQSSVFGSFTSSPSKQQLLIDKDEIQSSVVSSIKSFLASHLQLSVPGDLLTPQENRSCTFSQSVLNGINVLCGVALLTMPYAVKEGGWLGLFILFSFGIITFYTGILLKRCLENSPGIHTYPDIGQAAFGTTGRILVSILLYVELYASCVEYIIMMSDNLSRMFPNTSLYINGFSLDSTQVFAITTTLIVLPTVWLKDLSLLSYLSAGGVISSILLALCLFWAGSVDGVGFHISGQALDITNIPVAIGIYGFGFGSHSVFPNIYSSMKEPSKFPTVLLISFAFCTLFYIAVAVCGFTMFGDAIQSQFTLNMPPHFTSSKIAVWTAVVTPMTKYALTITPVMLSLEELIPSSSRKMRSKGVSMLFRTILVLSTLVVALTVPFFATVAALIGSFIAMLIALIFPCLCYISIMKGRLTNFQIGICILIVIIGIVSGCCGTYSAIARLIGEMT

SEQ ID NO: 79664 - protein, 371 aa, Arabidopsis thaliana
  peptide (1)..(371): Ceres Seq. ID no. 12652441
  misc_feature (1)..(371): Homolog of NCBI NO: 22326569 NR Description: putative protein; protein id: At5g02170.1, by cDNA: gi_20856760 [Arabidopsis thaliana] AT5g02170/T7H20_220 [Arabidopsis thaliana]
  misc_feature (1)..(371): Homolog of NCBI NO: 11358405 NR Description: hypothetical protein T7H20.220 - Arabidopsis >gi|7340691|emb|CAB82990.1| putative protein [Arabidopsis
  misc_feature (1)..(371): Homolog of NCBI NO: 30679549 NR Description: amino acid transporter family [Arabidopsis >gi|26449931|dbj|BAC42086.1| unknown protein [Arabidopsis
  misc_feature (1)..(371): Homolog of NCBI NO: 11358406 NR Description: hypothetical protein T7H20.230 - Arabidopsis >gi|7340692|emb|CAB82991.1| putative protein [Arabidopsis
  misc_feature (1)..(319): Homolog of NCBI NO: 15232639 NR Description: hypothetical protein; protein id: At3g09340.1 thaliana] >gi|6478926|gb|AAF14031.1|AC011436_15 hypothetical
  misc_feature (1)..(279): Homolog of NCBI NO: 15232638 NR Description: hypothetical protein; protein id: At3g09330.1 thaliana] >gi|6478925|gb|AAF14030.1|AC011436_14 hypothetical
  misc_feature (1)..(371): Homolog of NCBI NO: 30687791 NR Description: amino acid transporter family [Arabidopsis
  misc_feature (1)..(371): Homolog of NCBI NO: 15292735 NR Description: unknown protein [Arabidopsis thaliana]
  misc_feature (1)..(249): Homolog of NCBI NO: 25408639 NR Description: hypothetical protein At2g39130 [imported] -
  misc_feature (269)..(371): Homolog of NCBI NO: 25408639 NR Description: hypothetical protein At2g39130 [imported] -
MPYAVKEGGWLGLFILFSFGIITFYTGILLKRCLENSPGIHTYPDIGQAAFGTTGRILVSILLYVELYASCVEYIIMMSDNLSRMFPNTSLYINGFSLDSTQVFAITTTLIVLPTVWLKDLSLLSYLSAGGVISSILLALCLFWAGSVDGVGFHISGQALDITNIPVAIGIYGFGFGSHSVFPNIYSSMKEPSKFPTVLLISFAFCTLFYIAVAVCGFTMFGDAIQSQFTLNMPPHFTSSKIAVWTAVVTPMTKYALTITPVMLSLEELIPSSSRKMRSKGVSMLFRTILVLSTLVVALTVPFFATVAALIGSFIAMLIALIFPCLCYISIMKGRLTNFQIGICILIVIIGIVSGCCGTYSAIARLIGEMT

SEQ ID NO: 79665 - DNA, 1995 bp, Arabidopsis thaliana
  misc_feature (1)..(1995): Ceres Seq. ID no. 12652481
  misc_feature: MA Experiment ID: 20000180 Result: Up-regulated in Transcription
  misc_feature: MA Experiment 20000180 PARAMETER Experiment Name: At_Germinating_Seeds_P Parameter: Age (hr) Value: 24 vs. 0
  misc_feature: MA Experiment 20000180 PARAMETER Experiment Name: At_Germinating_Seeds_P Parameter: Tissue Value: Germinating Seeds
  misc_feature: MA Experiment ID: 20000185 Result: Up-regulated in Transcription
  misc_feature: MA Experiment 20000185 PARAMETER Experiment Name: At_Roots__P Parameter: Age (day) Value: 7 vs. 21
  misc_feature: MA Experiment 20000185 PARAMETER Experiment Name: At_Roots__P Parameter: Organism Value: A. thaliana
  misc_feature: MA Experiment 20000185 PARAMETER Experiment Name: At_Roots__P Parameter: Tissue Value: Roots vs. Whole Plant
  misc_feature: MA Experiment ID: 20000495 Result: Up-regulated in Transcription
  misc_feature: MA Experiment 20000495 PARAMETER Experiment Name: At_Guard_Cells_P Parameter: Harvest Date Value: 8/2/2002
  misc_feature: MA Experiment 20000495 PARAMETER Experiment Name: At_Guard_Cells_P Parameter: Organism Value: A. thaliana
  misc_feature: MA Experiment 20000495 PARAMETER Experiment Name: At_Guard_Cells_P Parameter: Tissue Value: Guard Cells vs. Leaves
atggttagtggtaagatattgaaacccgggaaagtcaacaaagcacatgggatttttagcgaacgtgaactgccgttgagggcgattgtttcgaagtttagacctcaaagtaacaaacgacagttttggctccccagtgtgaaccgtcggatcatggagataactcatctaacgagaatggtggattcgaaaacccctgcgaaaaccaaattgttagattcgtcttcgatttctaatgtcagagtcgtccttagggttcgtccttttcttccccgggagatttcggacgagagttgtgacgggagatcgtgcgtttccgtaatcggcggcgatggaggagataccagcgaagtggcggtttacctcaaagatccagatagctgtcgtaacgaaagctatcagctggatgcgttttacgggagagaggatgataatgtgaagcatatattcgatagagaagtaagccctttgattcctgggatctttcatggtttcaatgctactgtgcttgcttatggagccaccggaagcggaaagacttttacgatgcagggaatcgatgagctaccaggtctgatgccattgaccatgtccaccattctgtctatgtgcgagaagacaaggagtagggctgagatttcatattatgaagtttacatggacagatgttgggatcttctagaagttaaagacaacgagattgctgtttgggatgataaagatggacaagttcatcttaagggactttctagtgtccctgttaagtccatgtctgagtttcaagaggcgtatttgtgtggcgttcagaggaggaaagttgcacacactggtttaaatgatgtctctagtagaagccatggagtgcttgtgatctcagtaacctcacaagggcttgtcactggtaaaatcaatctgattgatcttgcaggtaacgaagacaatagaaggacaggcaatgaagggatccgtttacaagagagtgccaagattaatcagtcattatttgcattgtccaatgtggtttatgcactgaataataacctccctagagtgccatacagggaaaccaaattgactagaatactgcaggattcacttggtggaacaagtagggctctcatggtcgcatgtctgaatcctggagaataccaagaatctcttcgcaccgttagcctggctgcaaggtcaaggcacatctcaaacaatgtttctctgaatcccaaggtagagacccccaaggttaagatagacatggaagcaaaactgcaagcttggcttgaatcaaaaggcaagatgaagagcgcgcatagaatgatggcaatacggtctccattgatgggtacaaaccagacttcaatttctcaaagctcagtcaagaaattactctgtcatagatcagccattgcagaaagtgctaagcttgccggcacaggacagagggacgcatttgtgaccgcaagaaacttatttggtgtggaaactcttgctgcttcacatttatgggaacctatacggaatctgcagttagcttctccaaccaaagaagatgagagagacacatctggcgaagagaatctattggtatcagaagcaagcttgagagataacacattggatgtcgagaagaaatatactgaactgagtcctcttcgagaagctctatctccaatagactccaatgcaaaaccaaattcagcacacggaagctctccttttctgaagccaatgaccccaaaaacaccttttctttctacaaaccctgaaattatgcagatggaaggcacttgccagaagttcaatgcatggagcaataatttaaagggaattgggcagaagatggctgagtacatcattgaactcagagaaacaagccctttaaaatcgcttaccgacttagaaaagatcggtttcacctcaagacaggtacataacctattcaaaaaagccactgaaggagtcctcgagaagccagtttctgcttcaacaacaccttag

SEQ ID NO: 79666 - protein, 664 aa, Arabidopsis thaliana
  peptide (1)..(664): Ceres Seq. ID no. 12652482
  misc_feature (62)..(660): Homolog of NCBI NO: 6901499 NR Description: kinesin [Xenopus laevis]
  misc_feature (62)..(660): Homolog of NCBI NO: 9049953 NR Description: chromokinesin Xkid [Xenopus laevis]
  misc_feature (68)..(651): Homolog of NCBI NO: 27882016 NR Description: Similar to kinesin family member 22 [Xenopus
  misc_feature (68)..(651): Homolog of NCBI NO: 6901503 NR Description: kinesin [Xenopus laevis]
  misc_feature (76)..(636): Homolog of NCBI NO: 39645862 NR Description: Unknown (protein for MGC:75575) [Silurana
  misc_feature (77)..(642): Homolog of NCBI NO: 21704182 NR Description: kinesin family member 22, pseudo; kinesin family
  misc_feature (78)..(470): Homolog of NCBI NO: 6453818 NR Description: kinesin family member 22; Kid; origin of plasmid
  misc_feature (78)..(470): Homolog of NCBI NO: 30584615 NR Description: Homo sapiens kinesin-like 4 [synthetic construct]
  misc_feature (117)..(563): Homolog of NCBI NO: 34859268 NR Description: similar to kinesin family member 22, pseudo
  misc_feature (79)..(574): Homolog of NCBI NO: 22532874 NR Description: Osmotic avoidance abnormal protein 3, isoform b
MVSGKILKPGKVNKAHGIFSERELPLRAIVSKFRPQSNKRQFWLPSVNRRIMEITHLTRMVDSKTPAKTKLLDSSSISNVRVVLRVRPFLPREISDESCDGRSCVSVIGGDGGDTSEVAVYLKDPDSCRNESYQLDAFYGREDDNVKHIFDREVSPLIPGIFHGFNATVLAYGATGSGKTFTMQGIDELPGLMPLTMSTILSMCEKTRSRAEISYYEVYMDRCWDLLEVKDNEIAVWDDKDGQVHLKGLSSVPVKSMSEFQEAYLCGVQRRKVAHTGLNDVSSRSHGVLVISVTSQGLVTGKINLIDLAGNEDNRRTGNEGIRLQESAKINQSLFALSNVVYALNNNLPRVPYRETKLTRILQDSLGGTSRALMVACLNPGEYQESLRTVSLAARSRHISNNVSLNPKVETPKVKIDMEAKLQAWLESKGKMKSAHRMMAIRSPLMGTNQTSISQSSVKKLLCHRSAIAESAKLAGTGQRDAFVTARNLFGVETLAASHLWEPIRNLQLASPTKEDERDTSGEENLLVSEASLRDNTLDVEKKYTELSPLREALSPIDSNAKPNSAHGSSPFLKPMTPKTPFLSTNPEIMQMEGTCQKFNAWSNNLKGIGQKMAEYIIELRETSPLKSLTDLEKIGFTSRQVHNLFKKATEGVLEKPVSASTTP

SEQ ID NO: 79667 - protein, 613 aa, Arabidopsis thaliana
  peptide (1)..(613): Ceres Seq. ID no. 12652483
  misc_feature (11)..(609): Homolog of NCBI NO: 6901499 NR Description: kinesin [Xenopus laevis]
  misc_feature (11)..(609): Homolog of NCBI NO: 9049953 NR Description: chromokinesin Xkid [Xenopus laevis]
  misc_feature (17)..(600): Homolog of NCBI NO: 27882016 NR Description: Similar to kinesin family member 22 [Xenopus
  misc_feature (17)..(600): Homolog of NCBI NO: 6901503 NR Description: kinesin [Xenopus laevis]
  misc_feature (25)..(585): Homolog of NCBI NO: 39645862 NR Description: Unknown (protein for MGC:75575) [Silurana
  misc_feature (26)..(591): Homolog of NCBI NO: 21704182 NR Description: kinesin family member 22, pseudo; kinesin family
  misc_feature (27)..(419): Homolog of NCBI NO: 6453818 NR Description: kinesin family member 22; Kid; origin of plasmid
  misc_feature (27)..(419): Homolog of NCBI NO: 30584615 NR Description: Homo sapiens kinesin-like 4 [synthetic construct]
  misc_feature (66)..(512): Homolog of NCBI NO: 34859268 NR Description: similar to kinesin family member 22, pseudo
  misc_feature (28)..(523): Homolog of NCBI NO: 22532874 NR Description: Osmotic avoidance abnormal protein 3, isoform b
MEITHLTRMVDSKTPAKTKLLDSSSISNVRVVLRVRPFLPREISDESCDGRSCVSVIGGDGGDTSEVAVYLKDPDSCRNESYQLDAFYGREDDNVKHIFDREVSPLIPGIFHGFNATVLAYGATGSGKTFTMQGIDELPGLMPLTMSTILSMCEKTRSRAEISYYEVYMDRCWDLLEVKDNEIAVWDDKDGQVHLKGLSSVPVKSMSEFQEAYLCGVQRRKVAHTGLNDVSSRSHGVLVISVTSQGLVTGKINLIDLAGNEDNRRTGNEGIRLQESAKINQSLFALSNVVYALNNNLPRVPYRETKLTRILQDSLGGTSRALMVACLNPGEYQESLRTVSLAARSRHISNNVSLNPKVETPKVKIDMEAKLQAWLESKGKMKSAHRMMAIRSPLMGTNQTSISQSSVKKLLCHRSAIAESAKLAGTGQRDAFVTARNLFGVETLAASHLWEPIRNLQLASPTKEDERDTSGEENLLVSEASLRDNTLDVEKKYTELSPLREALSPIDSNAKPNSAHGSSPFLKPMTPKTPFLSTNPEIMQMEGTCQKFNAWSNNLKGIGQKMAEYIIELRETSPLKSLTDLEKIGFTSRQVHNLFKKATEGVLEKPVSASTTP

SEQ ID NO: 79668 - protein, 605 aa, Arabidopsis thaliana
  peptide (1)..(605): Ceres Seq. ID no. 12652484
  misc_feature (3)..(601): Homolog of NCBI NO: 6901499 NR Description: kinesin [Xenopus laevis]
  misc_feature (3)..(601): Homolog of NCBI NO: 9049953 NR Description: chromokinesin Xkid [Xenopus laevis]
  misc_feature (9)..(592): Homolog of NCBI NO: 27882016 NR Description: Similar to kinesin family member 22 [Xenopus
  misc_feature (9)..(592): Homolog of NCBI NO: 6901503 NR Description: kinesin [Xenopus laevis]
  misc_feature (17)..(577): Homolog of NCBI NO: 39645862 NR Description: Unknown (protein for MGC:75575) [Silurana
  misc_feature (18)..(583): Homolog of NCBI NO: 21704182 NR Description: kinesin family member 22, pseudo; kinesin family
  misc_feature (19)..(411): Homolog of NCBI NO: 6453818 NR Description: kinesin family member 22; Kid; origin of plasmid
  misc_feature (19)..(411): Homolog of NCBI NO: 30584615 NR Description: Homo sapiens kinesin-like 4 [synthetic construct]
  misc_feature (58)..(504): Homolog of NCBI NO: 34859268 NR Description: similar to kinesin family member 22, pseudo
  misc_feature (20)..(515): Homolog of NCBI NO: 22532874 NR Description: Osmotic avoidance abnormal protein 3, isoform b
MVDSKTPAKTKLLDSSSISNVRVVLRVRPFLPREISDESCDGRSCVSVIGGDGGDTSEVAVYLKDPDSCRNESYQLDAFYGREDDNVKHIFDREVSPLIPGIFHGFNATVLAYGATGSGKTFTMQGIDELPGLMPLTMSTILSMCEKTRSRAEISYYEVYMDRCWDLLEVKDNEIAVWDDKDGQVHLKGLSSVPVKSMSEFQEAYLCGVQRRKVAHTGLNDVSSRSHGVLVISVTSQGLVTGKINLIDLAGNEDNRRTGNEGIRLQESAKINQSLFALSNVVYALNNNLPRVPYRETKLTRILQDSLGGTSRALMVACLNPGEYQESLRTVSLAARSRHISNNVSLNPKVETPKVKIDMEAKLQAWLESKGKMKSAHRMMAIRSPLMGTNQTSISQSSVKKLLCHRSAIAESAKLAGTGQRDAFVTARNLFGVETLAASHLWEPIRNLQLASPTKEDERDTSGEENLLVSEASLRDNTLDVEKKYTELSPLREALSPIDSNAKPNSAHGSSPFLKPMTPKTPFLSTNPEIMQMEGTCQKFNAWSNNLKGIGQKMAEYIIELRETSPLKSLTDLEKIGFTSRQVHNLFKKATEGVLEKPVSASTTP

SEQ ID NO: 79669 - DNA, 1200 bp, Arabidopsis thaliana
  misc_feature (1)..(1200): Ceres Seq. ID no. 12652499
  misc_feature: MA Experiment ID: 20000451 Result: Up-regulated in Transcription
  misc_feature: MA Experiment 20000451 PARAMETER Experiment Name: At_CS6879_Shoots-Roots_P Parameter: Age (day) Value: 14
  misc_feature: MA Experiment 20000451 PARAMETER Experiment Name: At_CS6879_Shoots-Roots_P Parameter: Organism Value: A. thaliana
  misc_feature: MA Experiment 20000451 PARAMETER Experiment Name: At_CS6879_Shoots-Roots_P Parameter: Plant Line Value: CS6879 vs. WS
  misc_feature: MA Experiment 20000451 PARAMETER Experiment Name: At_CS6879_Shoots-Roots_P Parameter: Tissue Value: Roots
atggttttttcttcatttcctacttatcctgatcattcatcaaactggcaacaacaacatcaaccaatcacaaccaccgttggattcacgggaaataacatcaaccaacagtttcttcctcaccatcccctcccaccgcaacagcaacaaacgcctccgcagcttcaccacaacaacggtaacggcggagtcgctgttcccggtggacctggcgggttaatccgaccaggttcgatggcggaaagagcaaggctagccaacataccattacctgaaacagccttgaagtgtccaagatgtgactcaactaacaccaaattctgttacttcaacaactacagtctcactcaacctcgccacttctgcaaagcatgccgtcgttactggacacgtggcggtgctctaaggagcgttcccgtcggtggcggttgccgtagaaacaaaagaaccaaaaacagcagcggtggaggtggcggtagcaccagtagcggtaacagcaagtcacaagacagcgccacgagcaacgaccaataccaccaccgagccatggctaacaatcagatgggaccaccttcttcgtcatcgtctctaagctcgttgctgtcttcttacaacgcagggttaatccccggacatgatcataacagcaataacaacaacatacttggacttggatcatctttgcctcctcttaagcttatgcctcctttagacttcacagacaacttcaccttacaatacggtgccgtttcagctccttcttatcatataggcggtggaagcagtggaggagcggcggctcttttaaacggttttgaccagtggagattcccggcaacaaaccaacttcctttaggcggtttagacccgtttgatcaacaacatcaaatggagcagcagaatccaggttacggattggttaccgggtcgggtcagtatcgacctaagaacattttccataaccttatctcctcttcttcgtctgcttcatcagctatggttacagccaccgcgtcgcaattagcttcagtgaaaatggaagatagtaacaatcagctcaacttgtctagacaactttttggagacgaacaacagctctggaatattcatggcgctgctgcagcatccaccgcagctgcaacaagttcgtggagtgaagtctctaataatttcagttcttcttctactagcaatatataa

SEQ ID NO: 79670 - protein, 399 aa, Arabidopsis thaliana
  peptide (1)..(399): Ceres Seq. ID no. 12652500
  misc_feature (90)..(152): Pfam Name: Dof domain, zinc finger Pfam Description: Dof domain, zinc finger
  misc_feature (1)..(399): Homolog of NCBI NO: 15241827 NR Description: Dof zinc finger protein; protein id: At5g02460.1
  misc_feature (1)..(278): Homolog of NCBI NO: 15224320 NR Description: Dof zinc finger protein; protein id: At2g37590.1 thaliana] >gi|7485442|pir||T02525 probable DOF zinc finger
  misc_feature (40)..(399): Homolog of NCBI NO: 29124139 NR Description: putative DNA-binding protein [Oryza sativa
  misc_feature (39)..(330): Homolog of NCBI NO: 21538785 NR Description: dof zinc finger protein [Hordeum vulgare subsp.
  misc_feature (42)..(173): Homolog of NCBI NO: 7688355 NR Description: Dof zinc finger protein [Solanum tuberosum]
  misc_feature (1)..(227): Homolog of NCBI NO: 25352305 NR Description: probable DOF zinc finger protein [imported] - thaliana >gi|3927829|gb|AAC79586.1| putative DOF zinc finger
  misc_feature (1)..(220): Homolog of NCBI NO: 30684022 NR Description: Dof zinc finger protein [Arabidopsis thaliana]
  misc_feature (5)..(228): Homolog of NCBI NO: 25406987 NR Description: hypothetical protein [imported] - Arabidopsis >gi|8439908|gb|AAF75094.1|AC007583_30 Strong similarity to zinc protein OBP2 from Arabidopsis thaliana gb|AF155816. EST gb|N65215
  misc_feature (75)..(221): Homolog of NCBI NO: 11282341 NR Description: zinc finger protein OBP3 - Arabidopsis thaliana
  misc_feature (7)..(228): Homolog of NCBI NO: 30680246 NR Description: Dof zinc finger protein [Arabidopsis thaliana]
MVFSSFPTYPDHSSNWQQQHQPITTTVGFTGNNINQQFLPHHPLPPQQQQTPPQLHHNNGNGGVAVPGGPGGLIRPGSMAERARLANIPLPETALKCPRCDSTNTKFCYFNNYSLTQPRHFCKACRRYWTRGGALRSVPVGGGCRRNKRTKNSSGGGGGSTSSGNSKSQDSATSNDQYHHRAMANNQMGPPSSSSSLSSLLSSYNAGLIPGHDHNSNNNNILGLGSSLPPLKLMPPLDFTDNFTLQYGAVSAPSYHIGGGSSGGAAALLNGFDQWRFPATNQLPLGGLDPFDQQHQMEQQNPGYGLVTGSGQYRPKNIFHNLISSSSSASSAMVTATASQLASVKMEDSNNQLNLSRQLFGDEQQLWNIHGAAAASTAAATSSWSEVSNNFSSSSTSNI

SEQ ID NO: 79671 - protein, 321 aa, Arabidopsis thaliana
  peptide (1)..(321): Ceres Seq. ID no. 12652501
  misc_feature (12)..(74): Pfam Name: Dof domain, zinc finger Pfam Description: Dof domain, zinc finger
  misc_feature (1)..(321): Homolog of NCBI NO: 15241827 NR Description: Dof zinc finger protein; protein id: At5g02460.1
  misc_feature (1)..(200): Homolog of NCBI NO: 15224320 NR Description: Dof zinc finger protein; protein id: At2g37590.1 thaliana] >gi|7485442|pir||T02525 probable DOF zinc finger
  misc_feature (1)..(321): Homolog of NCBI NO: 29124139 NR Description: putative DNA-binding protein [Oryza sativa
  misc_feature (1)..(252): Homolog of NCBI NO: 21538785 NR Description: dof zinc finger protein [Hordeum vulgare subsp.
  misc_feature (1)..(95): Homolog of NCBI NO: 7688355 NR Description: Dof zinc finger protein [Solanum tuberosum]
  misc_feature (1)..(149): Homolog of NCBI NO: 25352305 NR Description: probable DOF zinc finger protein [imported] - thaliana >gi|3927829|gb|AAC79586.1| putative DOF zinc finger
  misc_feature (1)..(142): Homolog of NCBI NO: 30684022 NR Description: Dof zinc finger protein [Arabidopsis thaliana]
  misc_feature (1)..(150): Homolog of NCBI NO: 25406987 NR Description: hypothetical protein [imported] - Arabidopsis >gi|8439908|gb|AAF75094.1|AC007583_30 Strong similarity to zinc protein OBP2 from Arabidopsis thaliana gb|AF155816. EST gb|N65215
  misc_feature (1)..(143): Homolog of NCBI NO: 11282341 NR Description: zinc finger protein OBP3 - Arabidopsis thaliana
  misc_feature (1)..(150): Homolog of NCBI NO: 30680246 NR Description: Dof zinc finger protein [Arabidopsis thaliana]
MAERARLANIPLPETALKCPRCDSTNTKFCYFNNYSLTQPRHFCKACRRYWTRGGALRSVPVGGGCRRNKRTKNSSGGGGGSTSSGNSKSQDSATSNDQYHHRAMANNQMGPPSSSSSLSSLLSSYNAGLIPGHDHNSNNNNILGLGSSLPPLKLMPPLDFTDNFTLQYGAVSAPSYHIGGGSSGGAAALLNGFDQWRFPATNQLPLGGLDPFDQQHQMEQQNPGYGLVTGSGQYRPKNIFHNLISSSSSASSAMVTATASQLASVKMEDSNNQLNLSRQLFGDEQQLWNIHGAAAASTAAATSSWSEVSNNFSSSSTSNI

SEQ ID NO: 79672 - protein, 217 aa, Arabidopsis thaliana
  peptide (1)..(217): Ceres Seq. ID no. 12652502
  misc_feature (1)..(217): Homolog of NCBI NO: 15241827 NR Description: Dof zinc finger protein; protein id: At5g02460.1
  misc_feature (1)..(96): Homolog of NCBI NO: 15224320 NR Description: Dof zinc finger protein; protein id: At2g37590.1 thaliana] >gi|7485442|pir||T02525 probable DOF zinc finger
  misc_feature (1)..(217): Homolog of NCBI NO: 29124139 NR Description: putative DNA-binding protein [Oryza sativa
  misc_feature (1)..(148): Homolog of NCBI NO: 21538785 NR Description: dof zinc finger protein [Hordeum vulgare subsp.
  misc_feature (1)..(45): Homolog of NCBI NO: 25352305 NR Description: probable DOF zinc finger protein [imported] - thaliana >gi|3927829|gb|AAC79586.1| putative DOF zinc finger
  misc_feature (1)..(38): Homolog of NCBI NO: 30684022 NR Description: Dof zinc finger protein [Arabidopsis thaliana]
  misc_feature (1)..(46): Homolog of NCBI NO: 25406987 NR Description: hypothetical protein [imported] - Arabidopsis >gi|8439908|gb|AAF75094.1|AC007583_30 Strong similarity to zinc protein OBP2 from Arabidopsis thaliana gb|AF155816. EST gb|N65215
  misc_feature (1)..(39): Homolog of NCBI NO: 11282341 NR Description: zinc finger protein OBP3 - Arabidopsis thaliana
  misc_feature (1)..(46): Homolog of NCBI NO: 30680246 NR Description: Dof zinc finger protein [Arabidopsis thaliana]
  misc_feature (1)..(39): Homolog of NCBI NO: 30694234 NR Description: Dof zinc finger protein [Arabidopsis thaliana]
MANNQMGPPSSSSSLSSLLSSYNAGLIPGHDHNSNNNNILGLGSSLPPLKLMPPLDFTDNFTLQYGAVSAPSYHIGGGSSGGAAALLNGFDQWRFPATNQLPLGGLDPFDQQHQMEQQNPGYGLVTGSGQYRPKNIFHNLISSSSSASSAMVTATASQLASVKMEDSNNQLNLSRQLFGDEQQLWNIHGAAAASTAAATSSWSEVSNNFSSSSTSNI

SEQ ID NO: 79673 - DNA, 2348 bp, Arabidopsis thaliana
  misc_feature (1)..(2348): Ceres Seq. ID no. 12652507
  misc_feature: MA Experiment ID: 20000171 Result: Down-regulated in Transcription
  misc_feature: MA Experiment 20000171 PARAMETER Experiment Name: At_42deg_Heat_P Parameter: Age (day) Value: 14
  misc_feature: MA Experiment 20000171 PARAMETER Experiment Name: At_42deg_Heat_P Parameter: Organism Value: A. thaliana
  misc_feature: MA Experiment 20000171 PARAMETER Experiment Name: At_42deg_Heat_P Parameter: Plant Line Value: WS
  misc_feature: MA Experiment 20000171 PARAMETER Experiment Name: At_42deg_Heat_P Parameter: Temperature (deg C) Value: 42 vs. 22
  misc_feature: MA Experiment 20000171 PARAMETER Experiment Name: At_42deg_Heat_P Parameter: Timepoint (hr) Value: 1
  misc_feature: MA Experiment 20000171 PARAMETER Experiment Name: At_42deg_Heat_P Parameter: Tissue Value: Aerial
  misc_feature: MA Experiment ID: 20000438 Result: Up-regulated in Transcription
  misc_feature: MA Experiment 20000438 PARAMETER Experiment Name: At_Shoots__P Parameter: Age (day) Value: 14
  misc_feature: MA Experiment 20000438 PARAMETER Experiment Name: At_Shoots__P Parameter: Tissue Value: Shoots vs. Whole Plant
aatccaatcttcttcttacataaacacctctcctcccccaccgtttccaaaagagagaagctttctcactaacaccaaaaacaagtctttgaagaagaataaaaagattggattttgataagtttagtgaaaatgggggagcttttgtgttcttcactgtggaacccgtcacgattcattgttgcttctctcaaaaggtattttctgggtttagcttcttagaggttcttcgttcttaaaggtctgtttttttttaggttgtgatactttgaatgtaaaaaagggaagatttttagtttcgatatgtatatctctcggatgggtttgagtcggagtttcccgccgctttttgggggatttcgggaaattctagggttagggttggatattgtcttcctctagcagtctctgccacttttaaaatctcttcatctttctttgagagtgaaagaggtttttttatttgtttgtgtcttcctgggaatcgagattctggatcttaatcaatatgtgggttaattgggagatctgggatttgggagatcttgtggtggattgaagaaaaagcaaggttgtagattttgaaaaatgaaaggttcaattcttactgttttgtcaatggagaatcatcatccgtcaacgcttttatctatggattctagtggctcatctcatgaagagcttgatttggagatgaacaatggtaataggcaaatcactctttataatccaccagacattaatctgcctttgtctgtaggaagaagctctccttcttggaatttggattcttgtgataacattttggatgttggtcttagctctcatgtctatgagaccgagacgtttctcaatgtggtcccgagtaaagtagctaagaagtgtttgaaacgaggggatagtatgtggggagcttggtttttctttagcttctacttcagaccggcgttgaatgagaaatccaagtctaaggtcattagggaaagtggtggtggtggaggaggaggaggaggatgttttactgggtttgataaatctgatctcaagctcgatgtttttcttgttcagcatgatatggagaacatgtatatgtgggcttttaaggataaacctgagaatgcgcttgggaaaatgcagttgagaagctatatgaatgggcattctcgtcaaggtgagcgtccgtttccgtttagtgcggagaaagggtttgttcggtctcacagaatgcagaggaagcattacaggggactctctaatcctcagtgtcttcacgggattgagtttgtggcttcgccgagtttgtttggtgtcggtgaagaagataagaagagatggatggagctcacgggtcgagatttgaagttcactatccctcctgatgctagtgatttcggttcatggagaaatcttcccaacacagacatcgagctagagagaccagctcatgttactaaagcagcaccgaataacgccaagaagattctcaatggctccggcttacatttgacaagcaatgcgtctttcagtagcaatggggactcgtctgatcaatctccaggaggaggagtcatcaacaacaagaagagaaaagagtttctatctcctggaagcagcgaagaagaatgctgtttgactgttaacaacatcgagacccaccacgccaaggacccgcccagttgggtaaacgacttcacgggagtgatgaagaatagctgcggacctgtaactgctgcaaaaaccgtctatgaggacgaagaagcttatctggtcgtaataactctaccatttgtggatttgaacaccgtgaaggtttcatggaggaacaatatcacaaatggaatcgtgaaggtcacgggactaagcacttcgagggcttcgtttgtgaagagacgggaccggactttcaagctggttgatcagatggctgagcattgtcctccaggggaattcatgagggagatacaattgccgaatcggattccggaagaagcaaatattgaagcatactttgatgggactggaccagttttagagattgtggttccaaaattgagaggaggagtggaggaagaacacgaggttagagtttgtctacggtcacaccacctcggatgaaagatgcaaccatgttttaaagtgtttgtagaagcattttgttgtgtacaatggggaaataagcataagcaaaagcagaaagtgctgttttttaagtataactttttcactttagttttttttttgtcttcgtttctaaaaagtatattcttcagagcaagttgtatttaaccacaattttatttgattagtaaacactattttatttataaaaaggctaaattgtctacaac

SEQ ID NO: 79674 - protein, 508 aa, Arabidopsis thaliana
  peptide (1)..(508): Ceres Seq. ID no. 12652508
  misc_feature (1)..(508): Homolog of NCBI NO: 18413934 NR Description: putative protein; protein id: At5g02480.1, by cDNA: gi_13430449, supported by cDNA: gi_15724273 [Arabidopsis >gi|13430450|gb|AAK25847.1|AF360137_1 unknown protein
  misc_feature (11)..(508): Homolog of NCBI NO: 11280862 NR Description: hypothetical protein T22P11.70 - Arabidopsis >gi|7413637|emb|CAB85985.1| putative protein [Arabidopsis
  misc_feature (11)..(508): Homolog of NCBI NO: 18404463 NR Description: expressed protein; protein id: At2g37570.1, by cDNA: gi_11611668, supported by cDNA: gi_15451173, supported
  misc_feature (1)..(508): Homolog of NCBI NO: 11611667 NR Description: SLT1 protein [Nicotiana tabacum]
  misc_feature (1)..(503): Homolog of NCBI NO: 18399669 NR Description: expressed protein; protein id: At3g12570.1, by cDNA: gi_13430761 [Arabidopsis thaliana] gene_id:T16H11.6~pir||T02523~strong similarity to unknown protein
  misc_feature (48)..(508): Homolog of NCBI NO: 34895866 NR Description: P0009G03.13 [Oryza sativa (japonica
  misc_feature (1)..(507): Homolog of NCBI NO: 34908142 NR Description: putative SLT1 protein (ion homeostasis related
MKGSILTVLSMENHHPSTLLSMDSSGSSHEELDLEMNNGNRQITLYNPPDINLPLSVGRSSPSWNLDSCDNILDVGLSSHVYETETFLNVVPSKVAKKCLKRGDSMWGAWFFFSFYFRPALNEKSKSKVIRESGGGGGGGGGCFTGFDKSDLKLDVFLVQHDMENMYMWAFKDKPENALGKMQLRSYMNGHSRQGERPFPFSAEKGFVRSHRMQRKHYRGLSNPQCLHGIEFVASPSLFGVGEEDKKRWMELTGRDLKFTIPPDASDFGSWRNLPNTDIELERPAHVTKAAPNNAKKILNGSGLHLTSNASFSSNGDSSDQSPGGGVINNKKRKEFLSPGSSEEECCLTVNNIETHHAKDPPSWVNDFTGVMKNSCGPVTAAKTVYEDEEAYLVVITLPFVDLNTVKVSWRNNITNGIVKVTGLSTSRASFVKRRDRTFKLVDQMAEHCPPGEFMREIQLPNRIPEEANIEAYFDGTGPVLEIVVPKLRGGVEEEHEVRVCLRSHHLG

SEQ ID NO: 79675 - protein, 498 aa, Arabidopsis thaliana
  peptide (1)..(498): Ceres Seq. ID no. 12652509
  misc_feature (1)..(498): Homolog of NCBI NO: 18413934 NR Description: putative protein; protein id: At5g02480.1, by cDNA: gi_13430449, supported by cDNA: gi_15724273 [Arabidopsis >gi|13430450|gb|AAK25847.1|AF360137_1 unknown protein
  misc_feature (1)..(498): Homolog of NCBI NO: 11280862 NR Description: hypothetical protein T22P11.70 - Arabidopsis >gi|7413637|emb|CAB85985.1| putative protein [Arabidopsis
  misc_feature (1)..(498): Homolog of NCBI NO: 18404463 NR Description: expressed protein; protein id: At2g37570.1, by cDNA: gi_11611668, supported by cDNA: gi_15451173, supported
  misc_feature (1)..(498): Homolog of NCBI NO: 11611667 NR Description: SLT1 protein [Nicotiana tabacum]
  misc_feature (1)..(493): Homolog of NCBI NO: 18399669 NR Description: expressed protein; protein id: At3g12570.1, by cDNA: gi_13430761 [Arabidopsis thaliana] gene_id:T16H11.6~pir||T02523~strong similarity to unknown protein
  misc_feature (38)..(498): Homolog of NCBI NO: 34895866 NR Description: P0009G03.13 [Oryza sativa (japonica
  misc_feature (1)..(497): Homolog of NCBI NO: 34908142 NR Description: putative SLT1 protein (ion homeostasis related
MENHHPSTLLSMDSSGSSHEELDLEMNNGNRQITLYNPPDINLPLSVGRSSPSWNLDSCDNILDVGLSSHVYETETFLNVVPSKVAKKCLKRGDSMWGAWFFFSFYFRPALNEKSKSKVIRESGGGGGGGGGCFTGFDKSDLKLDVFLVQHDMENMYMWAFKDKPENALGKMQLRSYMNGHSRQGERPFPFSAEKGFVRSHRMQRKHYRGLSNPQCLHGIEFVASPSLFGVGEEDKKRWMELTGRDLKFTIPPDASDFGSWRNLPNTDIELERPAHVTKAAPNNAKKILNGSGLHLTSNASFSSNGDSSDQSPGGGVINNKKRKEFLSPGSSEEECCLTVNNIETHHAKDPPSWVNDFTGVMKNSCGPVTAAKTVYEDEEAYLVVITLPFVDLNTVKVSWRNNITNGIVKVTGLSTSRASFVKRRDRTFKLVDQMAEHCPPGEFMREIQLPNRIPEEANIEAYFDGTGPVLEIVVPKLRGGVEEEHEVRVCLRSHHLG

SEQ ID NO: 79676 - protein, 487 aa, Arabidopsis thaliana
  peptide (1)..(487): Ceres Seq. ID no. 12652510
  misc_feature (1)..(487): Homolog of NCBI NO: 18413934 NR Description: putative protein; protein id: At5g02480.1, by cDNA: gi_13430449, supported by cDNA: gi_15724273 [Arabidopsis >gi|13430450|gb|AAK25847.1|AF360137_1 unknown protein
  misc_feature (1)..(487): Homolog of NCBI NO: 11280862 NR Description: hypothetical protein T22P11.70 - Arabidopsis >gi|7413637|emb|CAB85985.1| putative protein [Arabidopsis
  misc_feature (1)..(487): Homolog of NCBI NO: 18404463 NR Description: expressed protein; protein id: At2g37570.1, by cDNA: gi_11611668, supported by cDNA: gi_15451173, supported
  misc_feature (1)..(487): Homolog of NCBI NO: 11611667 NR Description: SLT1 protein [Nicotiana tabacum]
  misc_feature (1)..(482): Homolog of NCBI NO: 18399669 NR Description: expressed protein; protein id: At3g12570.1, by cDNA: gi_13430761 [Arabidopsis thaliana] gene_id:T16H11.6~pir||T02523~strong similarity to unknown protein
  misc_feature (27)..(487): Homolog of NCBI NO: 34895866 NR Description: P0009G03.13 [Oryza sativa (japonica
  misc_feature (1)..(486): Homolog of NCBI NO: 34908142 NR Description: putative SLT1 protein (ion homeostasis related
MDSSGSSHEELDLEMNNGNRQITLYNPPDINLPLSVGRSSPSWNLDSCDNILDVGLSSHVYETETFLNVVPSKVAKKCLKRGDSMWGAWFFFSFYFRPALNEKSKSKVIRESGGGGGGGGGCFTGFDKSDLKLDVFLVQHDMENMYMWAFKDKPENALGKMQLRSYMNGHSRQGERPFPFSAEKGFVRSHRMQRKHYRGLSNPQCLHGIEFVASPSLFGVGEEDKKRWMELTGRDLKFTIPPDASDFGSWRNLPNTDIELERPAHVTKAAPNNAKKILNGSGLHLTSNASFSSNGDSSDQSPGGGVINNKKRKEFLSPGSSEEECCLTVNNIETHHAKDPPSWVNDFTGVMKNSCGPVTAAKTVYEDEEAYLVVITLPFVDLNTVKVSWRNNITNGIVKVTGLSTSRASFVKRRDRTFKLVDQMAEHCPPGEFMREIQLPNRIPEEANIEAYFDGTGPVLEIVVPKLRGGVEEEHEVRVCLRSHHLG

SEQ ID NO: 79677 - DNA, 2460 bp, Arabidopsis thaliana
  misc_feature (1)..(2460): Ceres Seq. ID no. 12652538
  misc_feature: MA Experiment ID: 20001451 Result: Down-regulated in Transcription
  misc_feature: MA Experiment 20001451 PARAMETER Experiment Name: At_Far-red-induction_P Parameter: Age (day) Value: 7
  misc_feature: MA Experiment 20001451 PARAMETER Experiment Name: At_Far-red-induction_P Parameter: Light Value: Far-red vs. White
  misc_feature: MA Experiment 20001451 PARAMETER Experiment Name: At_Far-red-induction_P Parameter: Organism Value: A. thaliana
  misc_feature: MA Experiment 20001451 PARAMETER Experiment Name: At_Far-red-induction_P Parameter: Plant Line Value: Columbia
  misc_feature: MA Experiment 20001451 PARAMETER Experiment Name: At_Far-red-induction_P Parameter: Timepoint (hr) Value: 24
  misc_feature: MA Experiment 20001451 PARAMETER Experiment Name: At_Far-red-induction_P Parameter: Tissue Value: Whole Plant
  misc_feature: MA Experiment ID: 20001757 Result: Up-regulated in Transcription
  misc_feature: MA Experiment 20001757 PARAMETER Experiment Name: At_50mM_NH4NO3_L-to-H_P Parameter: Timepoint (hr) Value: 6
  misc_feature: MA Experiment 20001757 PARAMETER Experiment Name: At_50mM_NH4NO3_L-to-H_P Parameter: Tissue Value: Leaf
  misc_feature: MA Experiment 20001757 PARAMETER Experiment Name: At_50mM_NH4NO3_L-to-H_P Parameter: Treatment Value: 50mM NH4NO3 vs 100mM Mannitol
atggcggacaagctagctcttcctcttctccttccctgcactccttcctctaaaccttattctcacgaccaaaaccaccatatctctcggacgccttttcttactacgtctctttcgtcaccacctcctccgcctgtagagcctctcctccacgatgttttccttcaccagaaccctaattccagacaacccatcagctctcaaacatctagaaaccgtaaccggactcgaattggcaagtcacgtgaccctaacctcggtaaaccttggtcttaccatggtctttctccacaaggtcagcaagttcttcgttccctcatcgaacccaattttgattccggtcaattagattctgtactctctgagctattcgagccttttaaggataaaccagagtctacctcgtcggagttactagcttttcttaaaggattaggatttcataagaaattcgatttggctctgcgtgcttttgattggtttatgaagcaaaaggattatcaatccatgttggataactctgttgttgctataatcatcagtatgctaggtaaagaaggcagagtatcttccgctgcaaatatgttcaatggtttgcaggaagacgggttttcgcttgatgtctactcttatacttcgttgatatcagcgtttgctaatagcggaaggtatagggaagctgtaaatgtgttcaagaagatggaggaagatggttgtaaaccgactttgataacgtataatgttatcttgaatgtgtttgggaaaatgggtactccttggaataagattacgtctcttgttgagaagatgaagagtgatgggattgctccggatgcgtatacttacaacactcttataacttgttgtaaacgaggctctttgcatcaggaagctgctcaggtttttgaagaaatgaaggctgctgggtttagttatgataaggttacttataatgcgttattagatgtttatggaaagtctcatcggcctaaggaagctatgaaggttttgaatgaaatggtgctcaatggattttctccgagcattgtgacttacaactccttgatctctgcatatgcgagggatggtatgctggatgaggcaatggagcttaaaaatcagatggcggaaaagggaacgaaacctgatgtttttacttatacaacacttttgtcagggtttgagagggctgggaaggtcgaatctgctatgagtatttttgaagagatgagaaatgcagggtgcaaaccaaatatttgtacttttaatgcctttataaagatgtatggtaacaggggaaagtttactgaaatgatgaagatatttgacgagatcaatgtgtgtggtctctcccccgacattgtcacttggaatacactattagcagtctttggccaaaacgggatggattcagaagtatcgggtgtattcaaggaaatgaagagagctgggttcgtacccgaaagggaaactttcaacaccctaatcagtgcgtatagccgctgtggttcgtttgaacaagctatgactgtttacagacgaatgcttgatgctggggtcactcctgacctttccacctataacactgtgttggcagctttggcccgtggaggaatgtgggaacaatctgaaaaagttcttgcagagatggaggatggtcggtgcaaaccaaatgaattaacttactgctctctacttcatgcatatgcaaatggcaaggagattggtctgatgcattctctagcagaagaggtttattctggagttatcgagcctcgagctgtgcttttgaagacccttgtcttggtttgtagtaagtgtgatcttttgccagaggctgaacgtgcattctctgagctcaaagaaagagggttttcaccagacataaccacattaaattccatggtctccatatatggaagaaggcagatggtggcaaaggcgaacggagtcttggactacatgaaagaaaggggtttcacaccaagcatggcgacctacaatagcctcatgtatatgcatagtcggtctgcagatttcggaaaatcagaggaaatcttgagggaaatactggctaaggggatcaagccagacatcatatcgtacaacacagtcatttacgcctattgtagaaatactcggatgagagatgcatctagaatattttcagagatgaggaattcagggattgtccctgatgttatcacctacaatacgtttattggttcttatgcagctgactcaatgtttgaggaggccatcggcgtcgttaggtacatgatcaagcatggttgtagaccaaaccagaacacctacaactccattgtcgatggatactgcaagctaaacaggaaagatgaggcaaaactttttgtcgaagatctgaggaatcttgatccccatgctcccaaaggcgaggatcttaggttgctggaacggatagtgaagaagtggccatag

SEQ ID NO: 79678 - protein, 819 aa, Arabidopsis thaliana
  peptide (1)..(819): Ceres Seq. ID no. 12652539
  misc_feature (420)..(454): Pfam Name: PPR repeat Pfam Description: PPR repeat
  misc_feature (38)..(816): Homolog of NCBI NO: 34393454 NR Description: putative pentatricopeptide (PPR)
  misc_feature (12)..(800): Homolog of NCBI NO: 15224262 NR Description: putative salt-inducible protein; protein id: supported by cDNA: gi_15983784 [Arabidopsis thaliana]
  misc_feature (120)..(751): Homolog of NCBI NO: 15221411 NR Description: hypothetical protein; protein id: At1g74850.1
  misc_feature (189)..(795): Homolog of NCBI NO: 34910106 NR Description: B1100D10.28 [Oryza sativa (japonica
  misc_feature (117)..(752): Homolog of NCBI NO: 15231338 NR Description: hypothetical protein; protein id: At3g06920.1 thaliana] >gi|6728999|gb|AAF26996.1|AC016827_7 hypothetical
  misc_feature (178)..(802): Homolog of NCBI NO: 15239874 NR Description: putative protein; protein id: At5g12100.1 thaliana] >gi|9759377|dbj|BAB10028.1| to unknown protein [Arabidopsis thaliana]
  misc_feature (169)..(804): Homolog of NCBI NO: 33146978 NR Description: putative pentatricopeptide (PPR)
  misc_feature (106)..(800): Homolog of NCBI NO: 15236546 NR Description: putative protein; protein id: At4g31850.1
  misc_feature (24)..(584): Homolog of NCBI NO: 15224671 NR Description: unknown protein; protein id: At2g31400.1
  misc_feature (106)..(800): Homolog of NCBI NO: 37534450 NR Description: unknown protein [Oryza sativa (japonica
MADKLALPLLLPCTPSSKPYSHDQNHHISRTPFLTTSLSSPPPPPVEPLLHDVFLHQNPNSRQPISSQTSRNRNRTRIGKSRDPNLGKPWSYHGLSPQGQQVLRSLIEPNFDSGQLDSVLSELFEPFKDKPESTSSELLAFLKGLGFHKKFDLALRAFDWFMKQKDYQSMLDNSVVAIIISMLGKEGRVSSAANMFNGLQEDGFSLDVYSYTSLISAFANSGRYREAVNVFKKMEEDGCKPTLITYNVILNVFGKMGTPWNKITSLVEKMKSDGIAPDAYTYNTLITCCKRGSLHQEAAQVFEEMKAAGFSYDKVTYNALLDVYGKSHRPKEAMKVLNEMVLNGFSPSIVTYNSLISAYARDGMLDEAMELKNQMAEKGTKPDVFTYTTLLSGFERAGKVESAMSIFEEMRNAGCKPNICTFNAFIKMYGNRGKFTEMMKIFDEINVCGLSPDIVTWNTLLAVFGQNGMDSEVSGVFKEMKRAGFVPERETFNTLISAYSRCGSFEQAMTVYRRMLDAGVTPDLSTYNTVLAALARGGMWEQSEKVLAEMEDGRCKPNELTYCSLLHAYANGKEIGLMHSLAEEVYSGVIEPRAVLLKTLVLVCSKCDLLPEAERAFSELKERGFSPDITTLNSMVSIYGRRQMVAKANGVLDYMKERGFTPSMATYNSLMYMHSRSADFGKSEEILREILAKGIKPDIISYNTVIYAYCRNTRMRDASRIFSEMRNSGIVPDVITYNTFIGSYAADSMFEEAIGVVRYMIKHGCRPNQNTYNSIVDGYCKLNRKDEAKLFVEDLRNLDPHAPKGEDLRLLERIVKKWP

SEQ ID NO: 79679 - protein, 658 aa, Arabidopsis thaliana
  peptide (1)..(658): Ceres Seq. ID no. 12652540
  misc_feature (259)..(293): Pfam Name: PPR repeat Pfam Description: PPR repeat
  misc_feature (1)..(655): Homolog of NCBI NO: 34393454 NR Description: putative pentatricopeptide (PPR)
  misc_feature (1)..(639): Homolog of NCBI NO: 15224262 NR Description: putative salt-inducible protein; protein id: supported by cDNA: gi_15983784 [Arabidopsis thaliana]
  misc_feature (1)..(590): Homolog of NCBI NO: 15221411 NR Description: hypothetical protein; protein id: At1g74850.1
  misc_feature (28)..(634): Homolog of NCBI NO: 34910106 NR Description: B1100D10.28 [Oryza sativa (japonica
  misc_feature (1)..(591): Homolog of NCBI NO: 15231338 NR Description: hypothetical protein; protein id: At3g06920.1 thaliana] >gi|6728999|gb|AAF26996.1|AC016827_7 hypothetical
  misc_feature (17)..(641): Homolog of NCBI NO: 15239874 NR Description: putative protein; protein id: At5g12100.1 thaliana] >gi|9759377|dbj|BAB10028.1| to unknown protein [Arabidopsis thaliana]
  misc_feature (8)..(643): Homolog of NCBI NO: 33146978 NR Description: putative pentatricopeptide (PPR)
  misc_feature (1)..(639): Homolog of NCBI NO: 15236546 NR Description: putative protein; protein id: At4g31850.1
  misc_feature (1)..(423): Homolog of NCBI NO: 15224671 NR Description: unknown protein; protein id: At2g31400.1
  misc_feature (1)..(639): Homolog of NCBI NO: 37534450 NR Description: unknown protein [Oryza sativa (japonica
MKQKDYQSMLDNSVVAIIISMLGKEGRVSSAANMFNGLQEDGFSLDVYSYTSLISAFANSGRYREAVNVFKKMEEDGCKPTLITYNVILNVFGKMGTPWNKITSLVEKMKSDGIAPDAYTYNTLITCCKRGSLHQEAAQVFEEMKAAGFSYDKVTYNALLDVYGKSHRPKEAMKVLNEMVLNGFSPSIVTYNSLISAYARDGMLDEAMELKNQMAEKGTKPDVFTYTTLLSGFERAGKVESAMSIFEEMRNAGCKPNICTFNAFIKMYGNRGKFTEMMKIFDEINVCGLSPDIVTWNTLLAVFGQNGMDSEVSGVFKEMKRAGFVPERETFNTLISAYSRCGSFEQAMTVYRRMLDAGVTPDLSTYNTVLAALARGGMWEQSEKVLAEMEDGRCKPNELTYCSLLHAYANGKEIGLMHSLAEEVYSGVIEPRAVLLKTLVLVCSKCDLLPEAERAFSELKERGFSPDITTLNSMVSIYGRRQMVAKANGVLDYMKERGFTPSMATYNSLMYMHSRSADFGKSEEILREILAKGIKPDIISYNTVIYAYCRNTRMRDASRIFSEMRNSGIVPDVITYNTFIGSYAADSMFEEAIGVVRYMIKHGCRPNQNTYNSIVDGYCKLNRKDEAKLFVEDLRNLDPHAPKGEDLRLLERIVKKWP

SEQ ID NO: 79680 - protein, 650 aa, Arabidopsis thaliana
  peptide (1)..(650): Ceres Seq. ID no. 12652541
  misc_feature (251)..(285): Pfam Name: PPR repeat Pfam Description: PPR repeat
  misc_feature (1)..(647): Homolog of NCBI NO: 34393454 NR Description: putative pentatricopeptide (PPR)
  misc_feature (1)..(631): Homolog of NCBI NO: 15224262 NR Description: putative salt-inducible protein; protein id: supported by cDNA: gi_15983784 [Arabidopsis thaliana]
  misc_feature (1)..(582): Homolog of NCBI NO: 15221411 NR Description: hypothetical protein; protein id: At1g74850.1
  misc_feature (20)..(626): Homolog of NCBI NO: 34910106 NR Description: B1100D10.28 [Oryza sativa (japonica
  misc_feature (1)..(583): Homolog of NCBI NO: 15231338 NR Description: hypothetical protein; protein id: At3g06920.1 thaliana] >gi|6728999|gb|AAF26996.1|AC016827_7 hypothetical
  misc_feature (9)..(633): Homolog of NCBI NO: 15239874 NR Description: putative protein; protein id: At5g12100.1 thaliana] >gi|9759377|dbj|BAB10028.1| to unknown protein [Arabidopsis thaliana]
  misc_feature (1)..(635): Homolog of NCBI NO: 33146978 NR Description: putative pentatricopeptide (PPR)
  misc_feature (1)..(631): Homolog of NCBI NO: 15236546 NR Description: putative protein; protein id: At4g31850.1
  misc_feature (1)..(415): Homolog of NCBI NO: 15224671 NR Description: unknown protein; protein id: At2g31400.1
  misc_feature (1)..(631): Homolog of NCBI NO: 37534450 NR Description: unknown protein [Oryza sativa (japonica
MLDNSVVAIIISMLGKEGRVSSAANMFNGLQEDGFSLDVYSYTSLISAFANSGRYREAVNVFKKMEEDGCKPTLITYNVILNVFGKMGTPWNKITSLVEKMKSDGIAPDAYTYNTLITCCKRGSLHQEAAQVFEEMKAAGFSYDKVTYNALLDVYGKSHRPKEAMKVLNEMVLNGFSPSIVTYNSLISAYARDGMLDEAMELKNQMAEKGTKPDVFTYTTLLSGFERAGKVESAMSIFEEMRNAGCKPNICTFNAFIKMYGNRGKFTEMMKIFDEINVCGLSPDIVTWNTLLAVFGQNGMDSEVSGVFKEMKRAGFVPERETFNTLISAYSRCGSFEQAMTVYRRMLDAGVTPDLSTYNTVLAALARGGMWEQSEKVLAEMEDGRCKPNELTYCSLLHAYANGKEIGLMHSLAEEVYSGVIEPRAVLLKTLVLVCSKCDLLPEAERAFSELKERGFSPDITTLNSMVSIYGRRQMVAKANGVLDYMKERGFTPSMATYNSLMYMHSRSADFGKSEEILREILAKGIKPDIISYNTVIYAYCRNTRMRDASRIFSEMRNSGIVPDVITYNTFIGSYAADSMFEEAIGVVRYMIKHGCRPNQNTYNSIVDGYCKLNRKDEAKLFVEDLRNLDPHAPKGEDLRLLERIVKKWP

SEQ ID NO: 79681 - DNA, 2344 bp, Arabidopsis thaliana
  misc_feature (1)..(2344): Ceres Seq. ID no. 12652598
  misc_feature: MA Experiment ID: 20000184 Result: Up-regulated in Transcription
  misc_feature: MA Experiment 20000184 PARAMETER Experiment Name: At_Shoots__P Parameter: Age (day) Value: 7
  misc_feature: MA Experiment 20000184 PARAMETER Experiment Name: At_Shoots__P Parameter: Tissue Value: Shoots vs. Whole Plant
  misc_feature: MA Experiment ID: 20000437 Result: Down-regulated in Transcription
  misc_feature: MA Experiment 20000437 PARAMETER Experiment Name: At_Drought_P Parameter: Age (day) Value: 8
  misc_feature: MA Experiment 20000437 PARAMETER Experiment Name: At_Drought_P Parameter: Organism Value: A. thaliana
  misc_feature: MA Experiment 20000437 PARAMETER Experiment Name: At_Drought_P Parameter: Plant Line Value: WS
  misc_feature: MA Experiment 20000437 PARAMETER Experiment Name: At_Drought_P Parameter: Timepoint (hr) Value: 24
  misc_feature: MA Experiment 20000437 PARAMETER Experiment Name: At_Drought_P Parameter: Tissue Value: Whole Plant
  misc_feature: MA Experiment 20000437 PARAMETER Experiment Name: At_Drought_P Parameter: Treatment Value: Drought vs. No Drought
  misc_feature: MA Experiment ID: 20001248 Result: Down-regulated in Transcription
  misc_feature: MA Experiment 20001248 PARAMETER Experiment Name: At_Far-red-induction_P Parameter: Age (day) Value: 7
  misc_feature: MA Experiment 20001248 PARAMETER Experiment Name: At_Far-red-induction_P Parameter: Light Value: Far-red vs. White
  misc_feature: MA Experiment 20001248 PARAMETER Experiment Name: At_Far-red-induction_P Parameter: Organism Value: A. thaliana
  misc_feature: MA Experiment 20001248 PARAMETER Experiment Name: At_Far-red-induction_P Parameter: Plant Line Value: Columbia
  misc_feature: MA Experiment 20001248 PARAMETER Experiment Name: At_Far-red-induction_P Parameter: Timepoint (hr) Value: 4
  misc_feature: MA Experiment 20001248 PARAMETER Experiment Name: At_Far-red-induction_P Parameter: Tissue Value: Whole Plant
aacaacctccaaattcttcctcagatctccaaaggaatccaatgaaaaacttaaactaatgttgaaacttcctccgagattcttctctgtttactcaactctcatccacattcttgcctccttcctctgctcctccgacgtcagaggcgatttcccggcgacgagattcgatctcggaacgttgactctctcaagcctcaaacttctcggcgatgctcatctcaacaacggaactattaagctcactcgtgaactctctgttcccacttccaccgccggaaaagctctttatgggaaaccggtaaaattccggcacccggaaactaaatctccggcgagtttcactacttacttctccttctcggtaacgaatctcaatccttcctcaattggcggtggattagctttcgtaatctcccctgatgaagattacttaggatccaccggtggatttctcggtctaaccgaagaaaccggatccgggtcgggttttgtggcggttgaattcgatacgttaatggatgtgcaattcaaagacgttaacgggaaccacgtgggattggatctaaacgccgtcgtttcagccgcggtagccgatttgggaaacgtcgacatcgatctcaagagcggaaacgccgtgaattcatggatcacttatgacgggtcgggtcgggttttaacagtttacgtctcttactcaaacttgaaacctaaatcgccgattttgtcggttcctctcgatcttgatcgttacgtaagcgattcaatgtttgttggattctctggatcaacacaaggaagcactgagattcacagtgtcgattggtggagctttagttcatctttcgaagaatcatcggaatcaccaccgccgatgcctaattctcctcctccgtcgtcaccgtcttcatcaatcacaccatccctatccaccgtccggagaaaaaccgccgatccatcgtcctcttgccgtaacaaactctgtaaaaaatcaccagccgccgtcgccggagtagtaaccgccggagcatttttcttagcattattcgccggagtgataatctgggtttactctaaaaagatcaaatacactcgaaagtctgaatctttagcatcggaaataatgaaatcgccgagagagttcacttacaaggagctgaaattagccaccgactgtttcagctcatcgagagtcatcggaaacggagcattcggcaccgtctacaaaggaatcttacaagattccggcgaaattatcgcaatcaaaagatgcagccacatttctcaaggaaacacagaattcttatcggaattatctctaatcggaaccctccgtcaccggaatcttctccgtcttcaaggctattgcagagaaaaaggcgaaattctgttaatttatgatctaatgcctaatggatcacttgataaagcactctacgagtctccgactacattaccctggcctcaccggagaaaaatacttcttggagtcgcttctgctttggcttatttgcatcaagagtgcgagaatcagatcattcaccgtgatgttaaaacaagtaacattatgctcgacgcgaattttaatccgaagttaggtgattttggactcgcgaggcaaacggagcacgataaatcgccggacgcaaccgccgccgctggaacaatggggtatttagcgccggagtatttgttaaccggtcgagcgacggagaaaaccgacgtttttagctacggagccgttgttttagaagtatgcactggtagaagacccataacccgacccgaaccggaacccggtttaagacccggtttgaggtcgagtttggtagattgggtttggggtttgtatagagaagggaagttattgaccgccgtggacgagcggttgagtgagtttaacccggaggagatgagtcgggttatgatggtgggccttgcttgttcacaacccgatccggtcaccaggcccactatgagaagtgtggttcagattcttgttggtgaagctgatgtgccggaagttccgattgcgaaaccgtcgtcgtcgatgagttttagtacgtcggagttattgcttacgttacaagacagtgtatcggactgtaatgaagttttggctccgatttcaacgacttcttgttcctcgtcggaacacgacatcttcattgtcggcaaggaccgatcggtttgaaataaattattcaaatgacaattaatataaaatacgaagcacaattttgtacgtaaattgaaaataaacaaaaaccaaaaacatactaattgtaaaaatgttggatttacatgtatattttctgttcgattttaataattcttggttttg

SEQ ID NO: 79682 - protein, 730 aa, Arabidopsis thaliana
  peptide (1)..(730): Ceres Seq. ID no. 12652599
  misc_feature (393)..(591): Pfam Name: Protein kinase domain Pfam Description: Protein kinase domain
  misc_feature (54)..(727): Homolog of NCBI NO: 15231802 NR Description: receptor lectin kinase -like protein; protein id:
  misc_feature (17)..(704): Homolog of NCBI NO: 15241048 NR Description: serine/threonine-specific kinase like protein;
  misc_feature (368)..(720): Homolog of NCBI NO: 33146777 NR Description: putative lectin-like protein kinase [Oryza sativa
  misc_feature (64)..(281): Homolog of NCBI NO: 33146777 NR Description: putative lectin-like protein kinase [Oryza sativa
  misc_feature (368)..(717): Homolog of NCBI NO: 15289871 NR Description: putative receptor protein kinase-like protein
  misc_feature (64)..(288): Homolog of NCBI NO: 15289871 NR Description: putative receptor protein kinase-like protein
  misc_feature (329)..(680): Homolog of NCBI NO: 38112429 NR Description: lectin-like receptor kinase 7;3 [Medicago
  misc_feature (65)..(310): Homolog of NCBI NO: 38112429 NR Description: lectin-like receptor kinase 7;3 [Medicago
  misc_feature (31)..(680): Homolog of NCBI NO: 15238300 NR Description: receptor lectin kinase-like protein; protein id:
  misc_feature (344)..(688): Homolog of NCBI NO: 18411937 NR Description: contains similarity to a protein kinase domain score: 125.64) and legume lectins alpha domain [Arabidopsis
TTSKFFLRSPKESNEKLKLMLKLPPRFFSVYSTLIHILASFLCSSDVRGDFPATRFDLGTLTLSSLKLLGDAHLNNGTIKLTRELSVPTSTAGKALYGKPVKFRHPETKSPASFTTYFSFSVTNLNPSSIGGGLAFVISPDEDYLGSTGGFLGLTEETGSGSGFVAVEFDTLMDVQFKDVNGNHVGLDLNAVVSAAVADLGNVDIDLKSGNAVNSWITYDGSGRVLTVYVSYSNLKPKSPILSVPLDLDRYVSDSMFVGFSGSTQGSTEIHSVDWWSFSSSFEESSESPPPMPNSPPPSSPSSSITPSLSTVRRKTADPSSSCRNKLCKKSPAAVAGVVTAGAFFLALFAGVIIWVYSKKIKYTRKSESLASEIMKSPREFTYKELKLATDCFSSSRVIGNGAFGTVYKGILQDSGEIIAIKRCSHISQGNTEFLSELSLIGTLRHRNLLRLQGYCREKGEILLIYDLMPNGSLDKALYESPTTLPWPHRRKILLGVASALAYLHQECENQIIHRDVKTSNIMLDANFNPKLGDFGLARQTEHDKSPDATAAAGTMGYLAPEYLLTGRATEKTDVFSYGAVVLEVCTGRRPITRPEPEPGLRPGLRSSLVDWVWGLYREGKLLTAVDERLSEFNPEEMSRVMMVGLACSQPDPVTRPTMRSVVQILVGEADVPEVPIAKPSSSMSFSTSELLLTLQDSVSDCNEVLAPISTTSCSSSEHDIFIVGKDRSV

SEQ ID NO: 79683 - protein, 711 aa, Arabidopsis thaliana
  peptide (1)..(711): Ceres Seq. ID no. 12652600
  misc_feature (374)..(572): Pfam Name: Protein kinase domain Pfam Description: Protein kinase domain
  misc_feature (35)..(708): Homolog of NCBI NO: 15231802 NR Description: receptor lectin kinase -like protein; protein id:
  misc_feature (1)..(685): Homolog of NCBI NO: 15241048 NR Description: serine/threonine-specific kinase like protein;
  misc_feature (349)..(701): Homolog of NCBI NO: 33146777 NR Description: putative lectin-like protein kinase [Oryza sativa
  misc_feature (45)..(262): Homolog of NCBI NO: 33146777 NR Description: putative lectin-like protein kinase [Oryza sativa
  misc_feature (349)..(698): Homolog of NCBI NO: 15289871 NR Description: putative receptor protein kinase-like protein
  misc_feature (45)..(269): Homolog of NCBI NO: 15289871 NR Description: putative receptor protein kinase-like protein
  misc_feature (310)..(661): Homolog of NCBI NO: 38112429 NR Description: lectin-like receptor kinase 7;3 [Medicago
  misc_feature (46)..(291): Homolog of NCBI NO: 38112429 NR Description: lectin-like receptor kinase 7;3 [Medicago
  misc_feature (12)..(661): Homolog of NCBI NO: 15238300 NR Description: receptor lectin kinase-like protein; protein id:
  misc_feature (325)..(669): Homolog of NCBI NO: 18411937 NR Description: contains similarity to a protein kinase domain score: 125.64) and legume lectins alpha domain [Arabidopsis
MLKLPPRFFSVYSTLIHILASFLCSSDVRGDFPATRFDLGTLTLSSLKLLGDAHLNNGTIKLTRELSVPTSTAGKALYGKPVKFRHPETKSPASFTTYFSFSVTNLNPSSIGGGLAFVISPDEDYLGSTGGFLGLTEETGSGSGFVAVEFDTLMDVQFKDVNGNHVGLDLNAVVSAAVADLGNVDIDLKSGNAVNSWITYDGSGRVLTVYVSYSNLKPKSPILSVPLDLDRYVSDSMFVGFSGSTQGSTEIHSVDWWSFSSSFEESSESPPPMPNSPPPSSPSSSITPSLSTVRRKTADPSSSCRNKLCKKSPAAVAGVVTAGAFFLALFAGVIIWVYSKKIKYTRKSESLASEIMKSPREFTYKELKLATDCFSSSRVIGNGAFGTVYKGILQDSGEIIAIKRCSHISQGNTEFLSELSLIGTLRHRNLLRLQGYCREKGEILLIYDLMPNGSLDKALYESPTTLPWPHRRKILLGVASALAYLHQECENQIIHRDVKTSNIMLDANFNPKLGDFGLARQTEHDKSPDATAAAGTMGYLAPEYLLTGRATEKTDVFSYGAVVLEVCTGRRPITRPEPEPGLRPGLRSSLVDWVWGLYREGKLLTAVDERLSEFNPEEMSRVMMVGLACSQPDPVTRPTMRSVVQILVGEADVPEVPIAKPSSSMSFSTSELLLTLQDSVSDCNEVLAPISTTSCSSSEHDIFIVGKDRSV

SEQ ID NO: 79684 - protein, 558 aa, Arabidopsis thaliana
  peptide (1)..(558): Ceres Seq. ID no. 12652601
  misc_feature (221)..(419): Pfam Name: Protein kinase domain Pfam Description: Protein kinase domain
  misc_feature (1)..(555): Homolog of NCBI NO: 15231802 NR Description: receptor lectin kinase -like protein; protein id:
  misc_feature (1)..(532): Homolog of NCBI NO: 15241048 NR Description: serine/threonine-specific kinase like protein;
  misc_feature (196)..(548): Homolog of NCBI NO: 33146777 NR Description: putative lectin-like protein kinase [Oryza sativa
  misc_feature (1)..(109): Homolog of NCBI NO: 33146777 NR Description: putative lectin-like protein kinase [Oryza sativa
  misc_feature (196)..(545): Homolog of NCBI NO: 15289871 NR Description: putative receptor protein kinase-like protein
  misc_feature (1)..(116): Homolog of NCBI NO: 15289871 NR Description: putative receptor protein kinase-like protein
  misc_feature (157)..(508): Homolog of NCBI NO: 38112429 NR Description: lectin-like receptor kinase 7;3 [Medicago
  misc_feature (1)..(138): Homolog of NCBI NO: 38112429 NR Description: lectin-like receptor kinase 7;3 [Medicago
  misc_feature (1)..(508): Homolog of NCBI NO: 15238300 NR Description: receptor lectin kinase-like protein; protein id:
  misc_feature (172)..(516): Homolog of NCBI NO: 18411937 NR Description: contains similarity to a protein kinase domain score: 125.64) and legume lectins alpha domain [Arabidopsis
MDVQFKDVNGNHVGLDLNAVVSAAVADLGNVDIDLKSGNAVNSWITYDGSGRVLTVYVSYSNLKPKSPILSVPLDLDRYVSDSMFVGFSGSTQGSTEIHSVDWWSFSSSFEESSESPPPMPNSPPPSSPSSSITPSLSTVRRKTADPSSSCRNKLCKKSPAAVAGVVTAGAFFLALFAGVIIWVYSKKIKYTRKSESLASEIMKSPREFTYKELKLATDCFSSSRVIGNGAFGTVYKGILQDSGEIIAIKRCSHISQGNTEFLSELSLIGTLRHRNLLRLQGYCREKGEILLIYDLMPNGSLDKALYESPTTLPWPHRRKILLGVASALAYLHQECENQIIHRDVKTSNIMLDANFNPKLGDFGLARQTEHDKSPDATAAAGTMGYLAPEYLLTGRATEKTDVFSYGAVVLEVCTGRRPITRPEPEPGLRPGLRSSLVDWVWGLYREGKLLTAVDERLSEFNPEEMSRVMMVGLACSQPDPVTRPTMRSVVQILVGEADVPEVPIAKPSSSMSFSTSELLLTLQDSVSDCNEVLAPISTTSCSSSEHDIFIVGKDRSV

SEQ ID NO: 79685 - DNA, 1856 bp, Arabidopsis thaliana
  misc_feature (1)..(1856): Ceres Seq. ID no. 12652602
  misc_feature: MA Experiment ID: 20000437 Result: Up-regulated in Transcription
  misc_feature: MA Experiment 20000437 PARAMETER Experiment Name: At_Drought_P Parameter: Age (day) Value: 8
  misc_feature: MA Experiment 20000437 PARAMETER Experiment Name: At_Drought_P Parameter: Organism Value: A. thaliana
  misc_feature: MA Experiment 20000437 PARAMETER Experiment Name: At_Drought_P Parameter: Plant Line Value: WS
  misc_feature: MA Experiment 20000437 PARAMETER Experiment Name: At_Drought_P Parameter: Timepoint (hr) Value: 24
  misc_feature: MA Experiment 20000437 PARAMETER Experiment Name: At_Drought_P Parameter: Tissue Value: Whole Plant
  misc_feature: MA Experiment 20000437 PARAMETER Experiment Name: At_Drought_P Parameter: Treatment Value: Drought vs. No Drought
  misc_feature: MA Experiment ID: 20000495 Result: Up-regulated in Transcription
  misc_feature: MA Experiment 20000495 PARAMETER Experiment Name: At_Guard_Cells_P Parameter: Harvest Date Value: 8/2/2002
  misc_feature: MA Experiment 20000495 PARAMETER Experiment Name: At_Guard_Cells_P Parameter: Organism Value: A. thaliana
  misc_feature: MA Experiment 20000495 PARAMETER Experiment Name: At_Guard_Cells_P Parameter: Tissue Value: Guard Cells vs. Leaves
aaaaataaaaaccgccgaatccaatttacttctttagttgagagaaacggggcaggcactgagtaagcacacaaaattgaagcaacctatatgagtgttcttgatcaaaagcttctttctcagattatcatttctcctaaaaattagtccttttaagcaaattaatcccaaagattgatactttgttttcctgagattcttcttttacttcactgtttctgggttttgtaatttgatggtgatggatgataaagataaatatcgcgaagtagtagaacattggtcttgcgaaggtacttctccagctctaatggttggagattctactgagataacagaaatgctatcaccgagccaacatcaacgatggcgaggccttgtgttagatatacaatcgagagaagctcatggcgatttcttgagagcaaatggttccttaattcatagccccgtttccaaaaggttcaagttttctccaatgtccagccctagaactgggagacgtgttggatcaatgagtccttcctcgtcaagaaacagaacgaatcagaagaatttcaaaaacaggaaccacagtgcagatattgaggaaggtgttgtgtcccctttaggagatggtagtgataagtcttatattccaagaacatggtctctcactaatctcttagctcctagaaaatctaagaagacagagtcttttataactcactcaaaccctgagtccatgaacgggaggtatgccgttgaggttgatccggttacatccatgaaaggggagcgtttactgcctattcgtcgtacacgctctgtccccacattcttcaacaaagatggaagtgtaaagccgtcaagtgttttccgcgtgattcctactccgtctcgtggggatgagaagagactagagatgacgcaggcatcgaaattgaatgaaaatgatgatggtggagaagatgttcctgaagaagaagctgtgtgtagaatctgtatggttgaaatggaagaagatgaagaagcttttaagatggaatgtatgtgcaaaggggaactagctcttgcccacaaaacgtgcactatcaaatggtttacaattaaagggaacataacatgtgatgtgtgtaagcaagaggtgagaaatctcccggttacccttctacgtgtgcaggattctcaaaaccgttctagagcagccagggatatcgagatttcacggttcaataatgtatggcaagatattccaattcttgtcattgtaagcatgcttgcatacttctgtttccttgaacagcttctgattatagatatgaaatctagcgccgttgcaatagctttaccgttctcttgcattatcggtcttcttgcatcaatgatatcaacaacaatggtgaagaagaactatgtatggatctacgccaccgttcagttcggttttgtggtccttttcgctcagcttttctacagagttgtaagatttgatgtgaagcagccggtaatgtgcattgtcttagccactatgatcggatttggactcaccatgaccggcacaacagctattaacgagtatttgaaatggaggagaagcaattcccacctgccagaagagccagcaagtactcaggtggtttgacagcagcgtagatcttttgagtgaagctagagtccctaaagggttggatcggttttcaattaaccggtcgggattcggttttcggtttagctttaatcgacttgtctaggttgagatcagatttggttttcaatacttccaagtctttttttttttgccaactaaaatataaggaatgatgataggcacacacatgacacataaaatcataatgaacagtagtatgattagc

SEQ ID NO: 79686 - protein, 462 aa, Arabidopsis thaliana
  peptide (1)..(462): Ceres Seq. ID no. 12652603
  misc_feature (247)..(294): Pfam Name: Zinc finger, C3HC4 type (RING finger) Pfam Description: Zinc finger, C3HC4 type (RING finger)
  misc_feature (1)..(462): Homolog of NCBI NO: 18414148 NR Description: putative protein; protein id: At5g03180.1, by cDNA: gi_15809867 [Arabidopsis thaliana] AT5g03180/F15A17_210 [Arabidopsis thaliana]
  misc_feature (3)..(462): Homolog of NCBI NO: 11290062 NR Description: hypothetical protein F15A17.210 - Arabidopsis >gi|7413595|emb|CAB86085.1| putative protein [Arabidopsis
  misc_feature (3)..(462): Homolog of NCBI NO: 9757769 NR Description: gene_id:MOK16.9~unknown protein [Arabidopsis
  misc_feature (60)..(461): Homolog of NCBI NO: 18398630 NR Description: expressed protein; protein id: At3g09760.1, by cDNA: gi_15809926 [Arabidopsis thaliana] At3g09760/F8A24.19 [Arabidopsis thaliana]
  misc_feature (17)..(447): Homolog of NCBI NO: 18424371 NR Description: putative protein; protein id: At5g60580.1, by cDNA: gi_13605862 [Arabidopsis thaliana] emb|CAB86085.1~gene_id:MUF9.21~similar to unknown protein
  misc_feature (17)..(447): Homolog of NCBI NO: 30697388 NR Description: zinc finger (C3HC4-type RING finger) protein
  misc_feature (60)..(311): Homolog of NCBI NO: 6681342 NR Description: unknown protein, 3' partial [Arabidopsis thaliana]
  misc_feature (60)..(460): Homolog of NCBI NO: 32489688 NR Description: OSJNBb0004G23.1 [Oryza sativa (japonica
  misc_feature (263)..(461): Homolog of NCBI NO: 6682253 NR Description: unknown protein [Arabidopsis thaliana]
  misc_feature (17)..(367): Homolog of NCBI NO: 13605863 NR Description: AT5g60580/muf9_230 [Arabidopsis thaliana]
MVMDDKDKYREVVEHWSCEGTSPALMVGDSTEITEMLSPSQHQRWRGLVLDIQSREAHGDFLRANGSLIHSPVSKRFKFSPMSSPRTGRRVGSMSPSSSRNRTNQKNFKNRNHSADIEEGVVSPLGDGSDKSYIPRTWSLTNLLAPRKSKKTESFITHSNPESMNGRYAVEVDPVTSMKGERLLPIRRTRSVPTFFNKDGSVKPSSVFRVIPTPSRGDEKRLEMTQASKLNENDDGGEDVPEEEAVCRICMVEMEEDEEAFKMECMCKGELALAHKTCTIKWFTIKGNITCDVCKQEVRNLPVTLLRVQDSQNRSRAARDIEISRFNNVWQDIPILVIVSMLAYFCFLEQLLIIDMKSSAVAIALPFSCIIGLLASMISTTMVKKNYVWIYATVQFGFVVLFAQLFYRVVRFDVKQPVMCIVLATMIGFGLTMTGTTAINEYLKWRRSNSHLPEEPASTQVV

SEQ ID NO: 79687 - protein, 460 aa, Arabidopsis thaliana
  peptide (1)..(460): Ceres Seq. ID no. 12652604
  misc_feature (245)..(292): Pfam Name: Zinc finger, C3HC4 type (RING finger) Pfam Description: Zinc finger, C3HC4 type (RING finger)
  misc_feature (1)..(460): Homolog of NCBI NO: 18414148 NR Description: putative protein; protein id: At5g03180.1, by cDNA: gi_15809867 [Arabidopsis thaliana] AT5g03180/F15A17_210 [Arabidopsis thaliana]
  misc_feature (1)..(460): Homolog of NCBI NO: 11290062 NR Description: hypothetical protein F15A17.210 - Arabidopsis >gi|7413595|emb|CAB86085.1| putative protein [Arabidopsis
  misc_feature (1)..(460): Homolog of NCBI NO: 9757769 NR Description: gene_id:MOK16.9~unknown protein [Arabidopsis
  misc_feature (58)..(459): Homolog of NCBI NO: 18398630 NR Description: expressed protein; protein id: At3g09760.1, by cDNA: gi_15809926 [Arabidopsis thaliana] At3g09760/F8A24.19 [Arabidopsis thaliana]
  misc_feature (15)..(445): Homolog of NCBI NO: 18424371 NR Description: putative protein; protein id: At5g60580.1, by cDNA: gi_13605862 [Arabidopsis thaliana] emb|CAB86085.1~gene_id:MUF9.21~similar to unknown protein
  misc_feature (15)..(445): Homolog of NCBI NO: 30697388 NR Description: zinc finger (C3HC4-type RING finger) protein
  misc_feature (58)..(309): Homolog of NCBI NO: 6681342 NR Description: unknown protein, 3' partial [Arabidopsis thaliana]
  misc_feature (58)..(458): Homolog of NCBI NO: 32489688 NR Description: OSJNBb0004G23.1 [Oryza sativa (japonica
  misc_feature (261)..(459): Homolog of NCBI NO: 6682253 NR Description: unknown protein [Arabidopsis thaliana]
  misc_feature (15)..(365): Homolog of NCBI NO: 13605863 NR Description: AT5g60580/muf9_230 [Arabidopsis thaliana]
MDDKDKYREVVEHWSCEGTSPALMVGDSTEITEMLSPSQHQRWRGLVLDIQSREAHGDFLRANGSLIHSPVSKRFKFSPMSSPRTGRRVGSMSPSSSRNRTNQKNFKNRNHSADIEEGVVSPLGDGSDKSYIPRTWSLTNLLAPRKSKKTESFITHSNPESMNGRYAVEVDPVTSMKGERLLPIRRTRSVPTFFNKDGSVKPSSVFRVIPTPSRGDEKRLEMTQASKLNENDDGGEDVPEEEAVCRICMVEMEEDEEAFKMECMCKGELALAHKTCTIKWFTIKGNITCDVCKQEVRNLPVTLLRVQDSQNRSRAARDIEISRFNNVWQDIPILVIVSMLAYFCFLEQLLIIDMKSSAVAIALPFSCIIGLLASMISTTMVKKNYVWIYATVQFGFVVLFAQLFYRVVRFDVKQPVMCIVLATMIGFGLTMTGTTAINEYLKWRRSNSHLPEEPASTQVV

SEQ ID NO: 79688 - protein, 437 aa, Arabidopsis thaliana
  peptide (1)..(437): Ceres Seq. ID no. 12652605
  misc_feature (222)..(269): Pfam Name: Zinc finger, C3HC4 type (RING finger) Pfam Description: Zinc finger, C3HC4 type (RING finger)
  misc_feature (1)..(437): Homolog of NCBI NO: 18414148 NR Description: putative protein; protein id: At5g03180.1, by cDNA: gi_15809867 [Arabidopsis thaliana] AT5g03180/F15A17_210 [Arabidopsis thaliana]
  misc_feature (1)..(437): Homolog of NCBI NO: 11290062 NR Description: hypothetical protein F15A17.210 - Arabidopsis >gi|7413595|emb|CAB86085.1| putative protein [Arabidopsis
  misc_feature (1)..(437): Homolog of NCBI NO: 9757769 NR Description: gene_id:MOK16.9~unknown protein [Arabidopsis
  misc_feature (35)..(436): Homolog of NCBI NO: 18398630 NR Description: expressed protein; protein id: At3g09760.1, by cDNA: gi_15809926 [Arabidopsis thaliana] At3g09760/F8A24.19 [Arabidopsis thaliana]
  misc_feature (1)..(422): Homolog of NCBI NO: 18424371 NR Description: putative protein; protein id: At5g60580.1, by cDNA: gi_13605862 [Arabidopsis thaliana] emb|CAB86085.1~gene_id:MUF9.21~similar to unknown protein
  misc_feature (1)..(422): Homolog of NCBI NO: 30697388 NR Description: zinc finger (C3HC4-type RING finger) protein
  misc_feature (35)..(286): Homolog of NCBI NO: 6681342 NR Description: unknown protein, 3' partial [Arabidopsis thaliana]
  misc_feature (35)..(435): Homolog of NCBI NO: 32489688 NR Description: OSJNBb0004G23.1 [Oryza sativa (japonica
  misc_feature (238)..(436): Homolog of NCBI NO: 6682253 NR Description: unknown protein [Arabidopsis thaliana]
  misc_feature (1)..(342): Homolog of NCBI NO: 13605863 NR Description: AT5g60580/muf9_230 [Arabidopsis thaliana]
MVGDSTEITEMLSPSQHQRWRGLVLDIQSREAHGDFLRANGSLIHSPVSKRFKFSPMSSPRTGRRVGSMSPSSSRNRTNQKNFKNRNHSADIEEGVVSPLGDGSDKSYIPRTWSLTNLLAPRKSKKTESFITHSNPESMNGRYAVEVDPVTSMKGERLLPIRRTRSVPTFFNKDGSVKPSSVFRVIPTPSRGDEKRLEMTQASKLNENDDGGEDVPEEEAVCRICMVEMEEDEEAFKMECMCKGELALAHKTCTIKWFTIKGNITCDVCKQEVRNLPVTLLRVQDSQNRSRAARDIEISRFNNVWQDIPILVIVSMLAYFCFLEQLLIIDMKSSAVAIALPFSCIIGLLASMISTTMVKKNYVWIYATVQFGFVVLFAQLFYRVVRFDVKQPVMCIVLATMIGFGLTMTGTTAINEYLKWRRSNSHLPEEPASTQVV

SEQ ID NO: 79689 - DNA, 1398 bp, Arabidopsis thaliana
  misc_feature (1)..(1398): Ceres Seq. ID no. 12652638
  misc_feature: MA Experiment ID: 20000171 Result: Down-regulated in Transcription
  misc_feature: MA Experiment 20000171 PARAMETER Experiment Name: At_42deg_Heat_P Parameter: Age (day) Value: 14
  misc_feature: MA Experiment 20000171 PARAMETER Experiment Name: At_42deg_Heat_P Parameter: Organism Value: A. thaliana
  misc_feature: MA Experiment 20000171 PARAMETER Experiment Name: At_42deg_Heat_P Parameter: Plant Line Value: WS
  misc_feature: MA Experiment 20000171 PARAMETER Experiment Name: At_42deg_Heat_P Parameter: Temperature (deg C) Value: 42 vs. 22
  misc_feature: MA Experiment 20000171 PARAMETER Experiment Name: At_42deg_Heat_P Parameter: Timepoint (hr) Value: 1
  misc_feature: MA Experiment 20000171 PARAMETER Experiment Name: At_42deg_Heat_P Parameter: Tissue Value: Aerial
  misc_feature: MA Experiment ID: 20000173 Result: Down-regulated in Transcription
  misc_feature: MA Experiment 20000173 PARAMETER Experiment Name: At_42deg_Heat_P Parameter: Age (day) Value: 14
  misc_feature: MA Experiment 20000173 PARAMETER Experiment Name: At_42deg_Heat_P Parameter: Organism Value: A. thaliana
  misc_feature: MA Experiment 20000173 PARAMETER Experiment Name: At_42deg_Heat_P Parameter: Plant Line Value: WS
  misc_feature: MA Experiment 20000173 PARAMETER Experiment Name: At_42deg_Heat_P Parameter: Temperature (deg C) Value: 42 vs. 22
  misc_feature: MA Experiment 20000173 PARAMETER Experiment Name: At_42deg_Heat_P Parameter: Timepoint (hr) Value: 6
  misc_feature: MA Experiment 20000173 PARAMETER Experiment Name: At_42deg_Heat_P Parameter: Tissue Value: Aerial
  misc_feature: MA Experiment ID: 20000182 Result: Up-regulated in Transcription
  misc_feature: MA Experiment 20000182 PARAMETER Experiment Name: At_2mM_SA_P Parameter: Age (day) Value: 14
  misc_feature: MA Experiment 20000182 PARAMETER Experiment Name: At_2mM_SA_P Parameter: Organism Value: A. thaliana
  misc_feature: MA Experiment 20000182 PARAMETER Experiment Name: At_2mM_SA_P Parameter: Plant Line Value: WS
  misc_feature: MA Experiment 20000182 PARAMETER Experiment Name: At_2mM_SA_P Parameter: Timepoint (hr) Value: 6
  misc_feature: MA Experiment 20000182 PARAMETER Experiment Name: At_2mM_SA_P Parameter: Tissue Value: Aerial
  misc_feature: MA Experiment 20000182 PARAMETER Experiment Name: At_2mM_SA_P Parameter: Treatment Value: 2mM SA vs. No Treatment
  misc_feature: MA Experiment ID: 20000234 Result: Down-regulated in Transcription
  misc_feature: MA Experiment 20000234 PARAMETER Experiment Name: At_Siliques_P Parameter: Age (day) Value: 21
  misc_feature: MA Experiment 20000234 PARAMETER Experiment Name: At_Siliques_P Parameter: Organism Value: A. thaliana
  misc_feature: MA Experiment 20000234 PARAMETER Experiment Name: At_Siliques_P Parameter: Plant Line Value: WS
  misc_feature: MA Experiment 20000234 PARAMETER Experiment Name: At_Siliques_P Parameter: Tissue Value: Less Than 5mm Siliques vs. Whole Plant
  misc_feature: MA Experiment ID: 20000235 Result: Down-regulated in Transcription
  misc_feature: MA Experiment 20000235 PARAMETER Experiment Name: At_Siliques_P Parameter: Age (day) Value: 21
  misc_feature: MA Experiment 20000235 PARAMETER Experiment Name: At_Siliques_P Parameter: Organism Value: A. thaliana
  misc_feature: MA Experiment 20000235 PARAMETER Experiment Name: At_Siliques_P Parameter: Plant Line Value: WS
  misc_feature: MA Experiment 20000235 PARAMETER Experiment Name: At_Siliques_P Parameter: Tissue Value: 5-10mm Siliques vs. Whole Plant
  misc_feature: MA Experiment ID: 20000265 Result: Down-regulated in Transcription
  misc_feature: MA Experiment 20000265 PARAMETER Experiment Name: At_Open_Flower_P Parameter: Age (day) Value: 21
  misc_feature: MA Experiment 20000265 PARAMETER Experiment Name: At_Open_Flower_P Parameter: Plant Line Value: WS
  misc_feature: MA Experiment 20000265 PARAMETER Experiment Name: At_Open_Flower_P Parameter: Tissue Value: Closed Flower vs. Whole Plant
  misc_feature: MA Experiment ID: 20000286 Result: Down-regulated in Transcription
  misc_feature: MA Experiment 20000286 PARAMETER Experiment Name: At_Open_Flower_P Parameter: Age (day) Value: 21
  misc_feature: MA Experiment 20000286 PARAMETER Experiment Name: At_Open_Flower_P Parameter: Plant Line Value: WS
  misc_feature: MA Experiment 20000286 PARAMETER Experiment Name: At_Open_Flower_P Parameter: Tissue Value: Half Open vs. Whole Plant
  misc_feature: MA Experiment ID: 20001247 Result: Up-regulated in Transcription
  misc_feature: MA Experiment 20001247 PARAMETER Experiment Name: At_Far-red-induction_P Parameter: Age (day) Value: 7
  misc_feature: MA Experiment 20001247 PARAMETER Experiment Name: At_Far-red-induction_P Parameter: Light Value: Far-red vs. White
  misc_feature: MA Experiment 20001247 PARAMETER Experiment Name: At_Far-red-induction_P Parameter: Organism Value: A. thaliana
  misc_feature: MA Experiment 20001247 PARAMETER Experiment Name: At_Far-red-induction_P Parameter: Plant Line Value: Columbia
  misc_feature: MA Experiment 20001247 PARAMETER Experiment Name: At_Far-red-induction_P Parameter: Timepoint (hr) Value: 1
  misc_feature: MA Experiment 20001247 PARAMETER Experiment Name: At_Far-red-induction_P Parameter: Tissue Value: Whole Plant
  misc_feature: MA Experiment ID: 20001451 Result: Up-regulated in Transcription
  misc_feature: MA Experiment 20001451 PARAMETER Experiment Name: At_Far-red-induction_P Parameter: Age (day) Value: 7
  misc_feature: MA Experiment 20001451 PARAMETER Experiment Name: At_Far-red-induction_P Parameter: Light Value: Far-red vs. White
  misc_feature: MA Experiment 20001451 PARAMETER Experiment Name: At_Far-red-induction_P Parameter: Organism Value: A. thaliana
  misc_feature: MA Experiment 20001451 PARAMETER Experiment Name: At_Far-red-induction_P Parameter: Plant Line Value: Columbia
  misc_feature: MA Experiment 20001451 PARAMETER Experiment Name: At_Far-red-induction_P Parameter: Timepoint (hr) Value: 24
  misc_feature: MA Experiment 20001451 PARAMETER Experiment Name: At_Far-red-induction_P Parameter: Tissue Value: Whole Plant
  misc_feature: MA Experiment ID: 20001458 Result: Down-regulated in Transcription
  misc_feature: MA Experiment 20001458 PARAMETER Experiment Name: At_50mM_NH4NO3_L-to-H_P Parameter: Age (day) Value: Undefined
  misc_feature: MA Experiment 20001458 PARAMETER Experiment Name: At_50mM_NH4NO3_L-to-H_P Parameter: Organism Value: Undefined
  misc_feature: MA Experiment 20001458 PARAMETER Experiment Name: At_50mM_NH4NO3_L-to-H_P Parameter: Plant Line Value: Undefined
  misc_feature: MA Experiment 20001458 PARAMETER Experiment Name: At_50mM_NH4NO3_L-to-H_P Parameter: Timepoint (hr) Value: 2
  misc_feature: MA Experiment 20001458 PARAMETER Experiment Name: At_50mM_NH4NO3_L-to-H_P Parameter: Tissue Value: Siliques
  misc_feature: MA Experiment 20001458 PARAMETER Experiment Name: At_50mM_NH4NO3_L-to-H_P Parameter: Treatment Value: 50mM NH4NO3 vs. 100mM Manitol
  misc_feature: MA Experiment ID: 20001757 Result: Down-regulated in Transcription
  misc_feature: MA Experiment 20001757 PARAMETER Experiment Name: At_50mM_NH4NO3_L-to-H_P Parameter: Timepoint (hr) Value: 6
  misc_feature: MA Experiment 20001757 PARAMETER Experiment Name: At_50mM_NH4NO3_L-to-H_P Parameter: Tissue Value: Leaf
  misc_feature: MA Experiment 20001757 PARAMETER Experiment Name: At_50mM_NH4NO3_L-to-H_P Parameter: Treatment Value: 50mM NH4NO3 vs 100mM Mannitol
atgacggaagtgttattgttgccgggaactaaatcggagaattcaaaaccaccgcacatagtggtgtttccattcccagcacaaggccacttacttcctctacttgacttaactcaccaactctgcctccgtggattcaacgtctccgtcatcgttactcccggtaaccttacttacctctctcctcttctctccgctcatccctcctccgtcacctccgtcgttttccctttccctcctcatccttcactctctcccggcgtcgaaaacgttaaagacgtcggaaattcaggaaatctcccgatcatggcttctcttcgtcagctacgagaaccaatcatcaactggttccaatctcatccgaatccgcctatcgctctcatctccgatttcttcctcggatggactcacgatctctgcaatcaaatcggtatccccagattcgctttcttctccatcagcttcttcttagtttccgttcttcaattttgcttcgagaacatcgatctaatcaaatcaacggatccgattcatctccttgatcttcctcgcgctccgattttcaaagaagagcatcttccgtctatagtccgacgaagtctccaaactccgtcaccggatctcgaatcaatcaaagatttctccatgaatttgttgagctacggatctgttttcaattcttctgagattctggaagatgattatcttcagtacgtgaaacagaggatgggtcatgatcgggtttatgttattggcccgctttgttcaatcgggtcgggtcttaaatcgaattcgggttctgtagacccgagtttgctgagttggttagacggatccccaaacgggtcagttctatacgtttgtttcggaagtcaaaaggcgttgactaaagaccagtgtgatgctttggctctaggcttagagaaaagcatgacccggtttgtttgggtggttaagaaagatccgatacccgacgggtttgaggatcgggtttccggaaggggattggtggtaagaggatgggtctcccagctggcggtgttgcgacacgtggcggttggtggatttttgagccattgtggatggaactcagtgcttgaagggataacgagtggggctgtgatcttgggctggcccatggaggcggaccagtttgtgaacgcgaggttgcttgtggagcatttgggtgttgcggttagggtttgcgaaggtggtgaaactgtgcctgactcggatgagttgggtcgggtcatagcggaaacgatgggtgagggaggacgcgaggtggctgctcgggctgaggagatacggcggaagaccgaggctgccgtgacggaggcaaatggaagctccgttgaaaatgtacaaagacttgtcaaagaatttgaaaaagtctaa

SEQ ID NO: 79690 - protein, 465 aa, Arabidopsis thaliana
  peptide (1)..(465): Ceres Seq. ID no. 12652639
  misc_feature (1)..(465): Homolog of NCBI NO: 15242769 NR Description: putative protein; protein id: At5g03490.1
  misc_feature (15)..(436): Homolog of NCBI NO: 15223779 NR Description: putative glucosyl transferase; protein id: [Arabidopsis thaliana] >gi|25286807|pir||H96549 hypothetical
  misc_feature (32)..(460): Homolog of NCBI NO: 19911191 NR Description: glucosyltransferase like protein [Vigna angularis]
  misc_feature (10)..(461): Homolog of NCBI NO: 2232354 NR Description: UDPG glucosyltransferase [Solanum berthaultii]
  misc_feature (13)..(463): Homolog of NCBI NO: 25406301 NR Description: protein glucosyltransferase F2P9.25 [imported] - thaliana >gi|12325153|gb|AAG52529.1|AC016662_23 putative
  misc_feature (13)..(460): Homolog of NCBI NO: 22330612 NR Description: putative glucosyltransferase; protein id:
  misc_feature (31)..(460): Homolog of NCBI NO: 20260128 NR Description: putative glucosyltransferase [Arabidopsis
  misc_feature (18)..(465): Homolog of NCBI NO: 32488920 NR Description: OSJNBb0059K02.11 [Oryza sativa (japonica
  misc_feature (41)..(465): Homolog of NCBI NO: 10241430 NR Description: putative glucosyltransferase [Oryza sativa
  misc_feature (262)..(461): Homolog of NCBI NO: 18390599 NR Description: expressed protein; protein id: At1g06000.1, by cDNA: 1040., supported by cDNA: gi_20260467 [Arabidopsis
MTEVLLLPGTKSENSKPPHIVVFPFPAQGHLLPLLDLTHQLCLRGFNVSVIVTPGNLTYLSPLLSAHPSSVTSVVFPFPPHPSLSPGVENVKDVGNSGNLPIMASLRQLREPIINWFQSHPNPPIALISDFFLGWTHDLCNQIGIPRFAFFSISFFLVSVLQFCFENIDLIKSTDPIHLLDLPRAPIFKEEHLPSIVRRSLQTPSPDLESIKDFSMNLLSYGSVFNSSEILEDDYLQYVKQRMGHDRVYVIGPLCSIGSGLKSNSGSVDPSLLSWLDGSPNGSVLYVCFGSQKALTKDQCDALALGLEKSMTRFVWVVKKDPIPDGFEDRVSGRGLVVRGWVSQLAVLRHVAVGGFLSHCGWNSVLEGITSGAVILGWPMEADQFVNARLLVEHLGVAVRVCEGGETVPDSDELGRVIAETMGEGGREVAARAEEIRRKTEAAVTEANGSSVENVQRLVKEFEKV

SEQ ID NO: 79691 - protein, 363 aa, Arabidopsis thaliana
  peptide (1)..(363): Ceres Seq. ID no. 12652640
  misc_feature (1)..(363): Homolog of NCBI NO: 15242769 NR Description: putative protein; protein id: At5g03490.1
  misc_feature (1)..(334): Homolog of NCBI NO: 15223779 NR Description: putative glucosyl transferase; protein id: [Arabidopsis thaliana] >gi|25286807|pir||H96549 hypothetical
  misc_feature (1)..(358): Homolog of NCBI NO: 19911191 NR Description: glucosyltransferase like protein [Vigna angularis]
  misc_feature (1)..(359): Homolog of NCBI NO: 2232354 NR Description: UDPG glucosyltransferase [Solanum berthaultii]
  misc_feature (1)..(361): Homolog of NCBI NO: 25406301 NR Description: protein glucosyltransferase F2P9.25 [imported] - thaliana >gi|12325153|gb|AAG52529.1|AC016662_23 putative
  misc_feature (1)..(358): Homolog of NCBI NO: 22330612 NR Description: putative glucosyltransferase; protein id:
  misc_feature (1)..(358): Homolog of NCBI NO: 20260128 NR Description: putative glucosyltransferase [Arabidopsis
  misc_feature (1)..(363): Homolog of NCBI NO: 32488920 NR Description: OSJNBb0059K02.11 [Oryza sativa (japonica
  misc_feature (1)..(363): Homolog of NCBI NO: 10241430 NR Description: putative glucosyltransferase [Oryza sativa
  misc_feature (160)..(359): Homolog of NCBI NO: 18390599 NR Description: expressed protein; protein id: At1g06000.1, by cDNA: 1040., supported by cDNA: gi_20260467 [Arabidopsis
MASLRQLREPIINWFQSHPNPPIALISDFFLGWTHDLCNQIGIPRFAFFSISFFLVSVLQFCFENIDLIKSTDPIHLLDLPRAPIFKEEHLPSIVRRSLQTPSPDLESIKDFSMNLLSYGSVFNSSEILEDDYLQYVKQRMGHDRVYVIGPLCSIGSGLKSNSGSVDPSLLSWLDGSPNGSVLYVCFGSQKALTKDQCDALALGLEKSMTRFVWVVKKDPIPDGFEDRVSGRGLVVRGWVSQLAVLRHVAVGGFLSHCGWNSVLEGITSGAVILGWPMEADQFVNARLLVEHLGVAVRVCEGGETVPDSDELGRVIAETMGEGGREVAARAEEIRRKTEAAVTEANGSSVENVQRLVKEFEKV

SEQ ID NO: 79692 - protein, 250 aa, Arabidopsis thaliana
  peptide (1)..(250): Ceres Seq. ID no. 12652641
  misc_feature (1)..(250): Homolog of NCBI NO: 15242769 NR Description: putative protein; protein id: At5g03490.1
  misc_feature (1)..(221): Homolog of NCBI NO: 15223779 NR Description: putative glucosyl transferase; protein id: [Arabidopsis thaliana] >gi|25286807|pir||H96549 hypothetical
  misc_feature (1)..(245): Homolog of NCBI NO: 19911191 NR Description: glucosyltransferase like protein [Vigna angularis]
  misc_feature (1)..(246): Homolog of NCBI NO: 2232354 NR Description: UDPG glucosyltransferase [Solanum berthaultii]
  misc_feature (1)..(248): Homolog of NCBI NO: 25406301 NR Description: protein glucosyltransferase F2P9.25 [imported] - thaliana >gi|12325153|gb|AAG52529.1|AC016662_23 putative
  misc_feature (1)..(245): Homolog of NCBI NO: 22330612 NR Description: putative glucosyltransferase; protein id:
  misc_feature (1)..(245): Homolog of NCBI NO: 20260128 NR Description: putative glucosyltransferase [Arabidopsis
  misc_feature (1)..(250): Homolog of NCBI NO: 32488920 NR Description: OSJNBb0059K02.11 [Oryza sativa (japonica
  misc_feature (1)..(250): Homolog of NCBI NO: 10241430 NR Description: putative glucosyltransferase [Oryza sativa
  misc_feature (47)..(246): Homolog of NCBI NO: 18390599 NR Description: expressed protein; protein id: At1g06000.1, by cDNA: 1040., supported by cDNA: gi_20260467 [Arabidopsis
MNLLSYGSVFNSSEILEDDYLQYVKQRMGHDRVYVIGPLCSIGSGLKSNSGSVDPSLLSWLDGSPNGSVLYVCFGSQKALTKDQCDALALGLEKSMTRFVWVVKKDPIPDGFEDRVSGRGLVVRGWVSQLAVLRHVAVGGFLSHCGWNSVLEGITSGAVILGWPMEADQFVNARLLVEHLGVAVRVCEGGETVPDSDELGRVIAETMGEGGREVAARAEEIRRKTEAAVTEANGSSVENVQRLVKEFEKV

SEQ ID NO: 79693 - DNA, 891 bp, Arabidopsis thaliana
  misc_feature (1)..(891): Ceres Seq. ID no. 12652672
  misc_feature: MA Experiment ID: 20000171 Result: Up-regulated in Transcription
  misc_feature: MA Experiment 20000171 PARAMETER Experiment Name: At_42deg_Heat_P Parameter: Age (day) Value: 14
  misc_feature: MA Experiment 20000171 PARAMETER Experiment Name: At_42deg_Heat_P Parameter: Organism Value: A. thaliana
  misc_feature: MA Experiment 20000171 PARAMETER Experiment Name: At_42deg_Heat_P Parameter: Plant Line Value: WS
  misc_feature: MA Experiment 20000171 PARAMETER Experiment Name: At_42deg_Heat_P Parameter: Temperature (deg C) Value: 42 vs. 22
  misc_feature: MA Experiment 20000171 PARAMETER Experiment Name: At_42deg_Heat_P Parameter: Timepoint (hr) Value: 1
  misc_feature: MA Experiment 20000171 PARAMETER Experiment Name: At_42deg_Heat_P Parameter: Tissue Value: Aerial
  misc_feature: MA Experiment ID: 20000173 Result: Up-regulated in Transcription
  misc_feature: MA Experiment 20000173 PARAMETER Experiment Name: At_42deg_Heat_P Parameter: Age (day) Value: 14
  misc_feature: MA Experiment 20000173 PARAMETER Experiment Name: At_42deg_Heat_P Parameter: Organism Value: A. thaliana
  misc_feature: MA Experiment 20000173 PARAMETER Experiment Name: At_42deg_Heat_P Parameter: Plant Line Value: WS
  misc_feature: MA Experiment 20000173 PARAMETER Experiment Name: At_42deg_Heat_P Parameter: Temperature (deg C) Value: 42 vs. 22
  misc_feature: MA Experiment 20000173 PARAMETER Experiment Name: At_42deg_Heat_P Parameter: Timepoint (hr) Value: 6
  misc_feature: MA Experiment 20000173 PARAMETER Experiment Name: At_42deg_Heat_P Parameter: Tissue Value: Aerial
  misc_feature: MA Experiment ID: 20000180 Result: Down-regulated in Transcription
  misc_feature: MA Experiment 20000180 PARAMETER Experiment Name: At_Germinating_Seeds_P Parameter: Age (hr) Value: 24 vs. 0
  misc_feature: MA Experiment 20000180 PARAMETER Experiment Name: At_Germinating_Seeds_P Parameter: Tissue Value: Germinating Seeds
  misc_feature: MA Experiment ID: 20000265 Result: Up-regulated in Transcription
  misc_feature: MA Experiment 20000265 PARAMETER Experiment Name: At_Open_Flower_P Parameter: Age (day) Value: 21
  misc_feature: MA Experiment 20000265 PARAMETER Experiment Name: At_Open_Flower_P Parameter: Plant Line Value: WS
  misc_feature: MA Experiment 20000265 PARAMETER Experiment Name: At_Open_Flower_P Parameter: Tissue Value: Closed Flower vs. Whole Plant
  misc_feature: MA Experiment ID: 20000286 Result: Up-regulated in Transcription
  misc_feature: MA Experiment 20000286 PARAMETER Experiment Name: At_Open_Flower_P Parameter: Age (day) Value: 21
  misc_feature: MA Experiment 20000286 PARAMETER Experiment Name: At_Open_Flower_P Parameter: Plant Line Value: WS
  misc_feature: MA Experiment 20000286 PARAMETER Experiment Name: At_Open_Flower_P Parameter: Tissue Value: Half Open vs. Whole Plant
  misc_feature: MA Experiment ID: 20001451 Result: Down-regulated in Transcription
  misc_feature: MA Experiment 20001451 PARAMETER Experiment Name: At_Far-red-induction_P Parameter: Age (day) Value: 7
  misc_feature: MA Experiment 20001451 PARAMETER Experiment Name: At_Far-red-induction_P Parameter: Light Value: Far-red vs. White
  misc_feature: MA Experiment 20001451 PARAMETER Experiment Name: At_Far-red-induction_P Parameter: Organism Value: A. thaliana
  misc_feature: MA Experiment 20001451 PARAMETER Experiment Name: At_Far-red-induction_P Parameter: Plant Line Value: Columbia
  misc_feature: MA Experiment 20001451 PARAMETER Experiment Name: At_Far-red-induction_P Parameter: Timepoint (hr) Value: 24
  misc_feature: MA Experiment 20001451 PARAMETER Experiment Name: At_Far-red-induction_P Parameter: Tissue Value: Whole Plant
  misc_feature: MA Experiment ID: 20001757 Result: Up-regulated in Transcription
  misc_feature: MA Experiment 20001757 PARAMETER Experiment Name: At_50mM_NH4NO3_L-to-H_P Parameter: Timepoint (hr) Value: 6
  misc_feature: MA Experiment 20001757 PARAMETER Experiment Name: At_50mM_NH4NO3_L-to-H_P Parameter: Tissue Value: Leaf
  misc_feature: MA Experiment 20001757 PARAMETER Experiment Name: At_50mM_NH4NO3_L-to-H_P Parameter: Treatment Value: 50mM NH4NO3 vs 100mM Mannitol
atggagttctggggtgttgaagttaagaatggcaaaccacttcacctagatcctgggctagacaggctcgtgcacatctctcaggttgctttgggagagagtaagaacaatgtaaccgaaccaatccagctttacgtgactgttggatcggataagcttctcattggaacgctatctcatgagaagtttcctcagctgtctacggagattgtcttggaaaggaactttgcgctgtctcatacttggaagaatgggagcgttttcttctctggttacaaacctgaggatttgattgatgatcaacttgaggctgctggtttcaaaggtaaatggggacttttatatccaccagctgctccgaaatctgctgcgaaacaggtgaactttcagttgccaaatgaagatgtcaaagccaagcaagatgatgacgctgacggtagtgaagaagattcttcagatgatgatgatagtgaaaactctggagacgaggaggaagagaaggttactgctgaatctgacagtgaggaagatgactcatcagacgacgaagaagatgactcctcagaagaggaaaccccaaagaagcctgaagaacccaagaagaggtctgcagaacccaactcctccaagaaccctgcgtccaacaagaaggctaagtttgtaactcctcagaaaacagattcgaagaaaccgcatgtccatgttgcaactcctcatccctcaaaacaggcgggtaagaattctggtggaggcagcactggagagacatcgaagcagcagcagacaccgaagtctgcaggagcgtttgggtgcaagtcgtgcaccagaacctttacttcggaaatgggattgcagtctcacacaaaggccaaacacagtgcagctgcttga

SEQ ID NO: 79694 - protein, 296 aa, Arabidopsis thaliana
  peptide (1)..(296): Ceres Seq. ID no. 12652673
  misc_feature (130)..(216): Pfam Name: Prothymosin/parathymosin family Pfam Description: Prothymosin/parathymosin family
  misc_feature (1)..(296): Homolog of NCBI NO: 11282318 NR Description: histone deacetylase-like protein - Arabidopsis
  misc_feature (1)..(296): Homolog of NCBI NO: 30680179 NR Description: histone deacetylase -related protein [Arabidopsis
  misc_feature (1)..(296): Homolog of NCBI NO: 7804963 NR Description: putative histone deacetylase HD2c [Arabidopsis >gi|9758002|dbj|BAB08599.1| histone deacetylase HD2c [Arabidopsis >gi|13926268|gb|AAK49605.1|AF372889_1 AT5g03740/F17C15_160
  misc_feature (1)..(294): Homolog of NCBI NO: 7804960 NR Description: putative histone deacetylase HD2 [Oryza sativa]
  misc_feature (1)..(294): Homolog of NCBI NO: 7716948 NR Description: histone deacetylase 2 isoform b [Zea mays]
MEFWGVEVKNGKPLHLDPGLDRLVHISQVALGESKNNVTEPIQLYVTVGSDKLLIGTLSHEKFPQLSTEIVLERNFALSHTWKNGSVFFSGYKPEDLIDDQLEAAGFKGKWGLLYPPAAPKSAAKQVNFQLPNEDVKAKQDDDADGSEEDSSDDDDSENSGDEEEEKVTAESDSEEDDSSDDEEDDSSEEETPKKPEEPKKRSAEPNSSKNPASNKKAKFVTPQKTDSKKPHVHVATPHPSKQAGKNSGGGSTGETSKQQQTPKSAGAFGCKSCTRTFTSEMGLQSHTKAKHSAAA

SEQ ID NO: 79695 - DNA, 2271 bp, Arabidopsis thaliana
  misc_feature (1)..(2271): Ceres Seq. ID no. 12652678
  misc_feature: MA Experiment ID: 20000179 Result: Up-regulated in Transcription
  misc_feature: MA Experiment 20000179 PARAMETER Experiment Name: At_Germinating_Seeds_P Parameter: Age (hr) Value: 6 vs. 0
  misc_feature: MA Experiment 20000179 PARAMETER Experiment Name: At_Germinating_Seeds_P Parameter: Tissue Value: Germinating Seeds
  misc_feature: MA Experiment ID: 20000180 Result: Up-regulated in Transcription
  misc_feature: MA Experiment 20000180 PARAMETER Experiment Name: At_Germinating_Seeds_P Parameter: Age (hr) Value: 24 vs. 0
  misc_feature: MA Experiment 20000180 PARAMETER Experiment Name: At_Germinating_Seeds_P Parameter: Tissue Value: Germinating Seeds
  misc_feature: MA Experiment ID: 20000184 Result: Up-regulated in Transcription
  misc_feature: MA Experiment 20000184 PARAMETER Experiment Name: At_Shoots__P Parameter: Age (day) Value: 7
  misc_feature: MA Experiment 20000184 PARAMETER Experiment Name: At_Shoots__P Parameter: Tissue Value: Shoots vs. Whole Plant
  misc_feature: MA Experiment ID: 20000227 Result: Up-regulated in Transcription
  misc_feature: MA Experiment 20000227 PARAMETER Experiment Name: At_Root-Tips-vs-Tops_P Parameter: Tissue Value: Root Tips vs. Root Tops
  misc_feature: MA Experiment ID: 20000438 Result: Up-regulated in Transcription
  misc_feature: MA Experiment 20000438 PARAMETER Experiment Name: At_Shoots__P Parameter: Age (day) Value: 14
  misc_feature: MA Experiment 20000438 PARAMETER Experiment Name: At_Shoots__P Parameter: Tissue Value: Shoots vs. Whole Plant
  misc_feature: MA Experiment ID: 20000574 Result: Down-regulated in Transcription
  misc_feature: MA Experiment 20000574 PARAMETER Experiment Name: At_100uM_ABA_Mutants__P Parameter: Organism Value: A. thaliana
  misc_feature: MA Experiment 20000574 PARAMETER Experiment Name: At_100uM_ABA_Mutants__P Parameter: Plant Line Value: CS23 vs. Ler wt
  misc_feature: MA Experiment 20000574 PARAMETER Experiment Name: At_100uM_ABA_Mutants__P Parameter: Timepoint (hr) Value: N/A
  misc_feature: MA Experiment 20000574 PARAMETER Experiment Name: At_100uM_ABA_Mutants__P Parameter: Tissue Value: Whole Plant
  misc_feature: MA Experiment 20000574 PARAMETER Experiment Name: At_100uM_ABA_Mutants__P Parameter: Treatment Value: None
  misc_feature: MA Experiment ID: 20001248 Result: Down-regulated in Transcription
  misc_feature: MA Experiment 20001248 PARAMETER Experiment Name: At_Far-red-induction_P Parameter: Age (day) Value: 7
  misc_feature: MA Experiment 20001248 PARAMETER Experiment Name: At_Far-red-induction_P Parameter: Light Value: Far-red vs. White
  misc_feature: MA Experiment 20001248 PARAMETER Experiment Name: At_Far-red-induction_P Parameter: Organism Value: A. thaliana
  misc_feature: MA Experiment 20001248 PARAMETER Experiment Name: At_Far-red-induction_P Parameter: Plant Line Value: Columbia
  misc_feature: MA Experiment 20001248 PARAMETER Experiment Name: At_Far-red-induction_P Parameter: Timepoint (hr) Value: 4
  misc_feature: MA Experiment 20001248 PARAMETER Experiment Name: At_Far-red-induction_P Parameter: Tissue Value: Whole Plant
  misc_feature: MA Experiment ID: 20001451 Result: Down-regulated in Transcription
  misc_feature: MA Experiment 20001451 PARAMETER Experiment Name: At_Far-red-induction_P Parameter: Age (day) Value: 7
  misc_feature: MA Experiment 20001451 PARAMETER Experiment Name: At_Far-red-induction_P Parameter: Light Value: Far-red vs. White
  misc_feature: MA Experiment 20001451 PARAMETER Experiment Name: At_Far-red-induction_P Parameter: Organism Value: A. thaliana
  misc_feature: MA Experiment 20001451 PARAMETER Experiment Name: At_Far-red-induction_P Parameter: Plant Line Value: Columbia
  misc_feature: MA Experiment 20001451 PARAMETER Experiment Name: At_Far-red-induction_P Parameter: Timepoint (hr) Value: 24
  misc_feature: MA Experiment 20001451 PARAMETER Experiment Name: At_Far-red-induction_P Parameter: Tissue Value: Whole Plant
  misc_feature: MA Experiment ID: 20001906 Result: Down-regulated in Transcription
  misc_feature: MA Experiment 20001906 PARAMETER Experiment Name: At_Drought_Reproduction_P Parameter: Age (day) Value: 35
  misc_feature: MA Experiment 20001906 PARAMETER Experiment Name: At_Drought_Reproduction_P Parameter: Organism Value: A. thaliana
  misc_feature: MA Experiment 20001906 PARAMETER Experiment Name: At_Drought_Reproduction_P Parameter: Plant Line Value: WS
  misc_feature: MA Experiment 20001906 PARAMETER Experiment Name: At_Drought_Reproduction_P Parameter: Timepoint (day) Value: 5
  misc_feature: MA Experiment 20001906 PARAMETER Experiment Name: At_Drought_Reproduction_P Parameter: Tissue Value: Siliques
  misc_feature: MA Experiment 20001906 PARAMETER Experiment Name: At_Drought_Reproduction_P Parameter: Treatment Value: Drought vs. No Drought
  misc_feature: MA Experiment ID: 20001908 Result: Down-regulated in Transcription
  misc_feature: MA Experiment 20001908 PARAMETER Experiment Name: At_Drought_Reproduction_P Parameter: Age (day) Value: 40
  misc_feature: MA Experiment 20001908 PARAMETER Experiment Name: At_Drought_Reproduction_P Parameter: Organism Value: A. thaliana
  misc_feature: MA Experiment 20001908 PARAMETER Experiment Name: At_Drought_Reproduction_P Parameter: Plant Line Value: WS
  misc_feature: MA Experiment 20001908 PARAMETER Experiment Name: At_Drought_Reproduction_P Parameter: Timepoint (day) Value: 10
  misc_feature: MA Experiment 20001908 PARAMETER Experiment Name: At_Drought_Reproduction_P Parameter: Tissue Value: Siliques
  misc_feature: MA Experiment 20001908 PARAMETER Experiment Name: At_Drought_Reproduction_P Parameter: Treatment Value: Drought vs. No Drought
cacacacacacacacacacaacactgtgtcttctctccctctgtttctgtttttagatctctcttctctcttctttctttccaaaaatcatcttctccttctccacctttcattatctttcttctcttaccaaaaccctttaaatacaaaaaaaaactaaaacacataaaaaaaatattgaattctcctttttcccgacaatctgagtttctcaggcagagaagacagagattttcaccgtaagggcaaaaaacgaaaaactctgtctctctgtttctgtttcgtccttccttggctttgatttcttacaccaaaagagacatctttaaagaatctcacattgttccctattgcttgtctcacaagagaatccttgatctagggttcttgcttccctcccctgtttttttctttaaattcctcctctgttttctttttgttctcgtcggagtaagaagagatggagctaggagatacgacgtcggtgattccagactcgttcatgggatacagagacgacataacaatgcaaatgtcaatggttttggatcagatacgagctccattgattgttccagcccttaggctcggtgtttacatctgtttgacaatgtcggtgatgctctttgttgaaagggtttacatgggaattgttatctctcttgtgaagctgtttggtcgaaaaccagataaacgtttcaaatatgaaccaatcaaagatgacatcgagcttggaaactctgcttacccgatggttcttattcaaatcccaatgttcaacgaacgagaggtttatcaactatctattggagctgcttgtggactctcatggccttctgatcgaatcgttattcaagttcttgatgattccactgatccaacgatcaaagatctagtggagatggagtgtagcaggtgggcgagtaaaggagtaaacatcaagtatgagatcagagacaacagaaatggatacaaagcaggagctttgaaagaaggaatgaagaagagttatgtcaaaagctgcgattacgttgcaatcttcgacgctgattttcaacctgaagcggattttctatggagaaccgtaccgtatctactccataaccctaagcttgctcttgttcaagctcgctggaaattcgtaaattcggatgaatgtttgatgacaaggatgcaagaaatgtctttggattatcattttacggtggaacaagaagttggttcttctacttacgctttcttcggattcaatggaactgcgggaatatggagaatatcggcattaaacgaagctggtggttggaaagatagaacgaccgtggaagatatggatttggccgtgagagctagtctcaagggttggaaattcttgtacctcggttctttgaaggttaaaaacgagttgccaagtacattcaaggcttataggtatcaacagcacaggtggtcatgtggtccagctaatcttttcaggaaaatggcattcgaaatcatgactaataagaacgtgactttgtggaagaaagttcatgtgatatatagcttcttcgtggttagaaagctagtggcacacattgttaccttcatcttctactgtgtgatcttacccgctacagttcttgtaccggaagttactgttccgaaatggggagcggtttacattccttcagtcattactctcctcaacgccgttgggacaccaaggtcattgcatcttatggtcttttggattctgttcgagaatgtgatgtctcttcacagaacaaaagctacctttatcggtttactcgaaggaggaagagttaatgagtggattgttacagagaagctgggagatgttaaggctaaatcagccaccaagacttcaaagaaggttattcgttttagatttggagatagaattcatgtgttggaactcggtgtaggaatgtatctgttatttgtgggatgttatgacgcgttttttgggaagaatcattattatctataccttttcgcacaagcaatcgcgttcttcattgcgggattcgggcaaattgggacaattgtgcctaaccattgaagggaaaaaggagttttcgagcgacgaattgctcgaggataagaagatgatttgttttctttctttttggattcgctagctatttaaattcttgttggtgtgaatagagagaattgatgataccattgttacagaaatggtgtgtgtagtgtggaagataaaggatacttatagtaaagaagaaatatactttgaaggtttttttcaga

SEQ ID NO: 79696 - protein, 533 aa, Arabidopsis thaliana
  peptide (1)..(533): Ceres Seq. ID no. 12652679
  misc_feature (100)..(278): Pfam Name: Glycosyl transferase Pfam Description: Glycosyl transferase
  misc_feature (1)..(533): Homolog of NCBI NO: 15237519 NR Description: putative protein; protein id: At5g03760.1, by cDNA: gi_16974551 [Arabidopsis thaliana]
  misc_feature (9)..(532): Homolog of NCBI NO: 15242959 NR Description: glucosyltransferase-like protein; protein id: supported by cDNA: gi_16648763, supported by cDNA: gi_16648964, by cDNA: gi_20259889 [Arabidopsis thaliana]
  misc_feature (24)..(532): Homolog of NCBI NO: 16519223 NR Description: cellulose synthase-like protein OsCslA9 [Oryza
  misc_feature (1)..(531): Homolog of NCBI NO: 30688411 NR Description: glycosyltransferase family 2 [Arabidopsis >gi|8778578|gb|AAF79586.1|AC007945_6 F28C11.11 [Arabidopsis >gi|20466606|gb|AAM20620.1| unknown protein [Arabidopsis
  misc_feature (19)..(531): Homolog of NCBI NO: 18403914 NR Description: putative glucosyltransferase; protein id: supported by cDNA: 113140., supported by cDNA: gi_16604558 thaliana] >gi|16604559|gb|AAL24081.1| putative
  misc_feature (19)..(531): Homolog of NCBI NO: 21536839 NR Description: putative glucosyltransferase [Arabidopsis
  misc_feature (51)..(531): Homolog of NCBI NO: 30688416 NR Description: glycosyltransferase family 2 [Arabidopsis
  misc_feature (31)..(528): Homolog of NCBI NO: 15221657 NR Description: glucosyltransferase, putative; protein id:
  misc_feature (23)..(528): Homolog of NCBI NO: 28393622 NR Description: putative cellulose synthase [Arabidopsis thaliana]
  misc_feature (98)..(531): Homolog of NCBI NO: 25518505 NR Description: hypothetical protein F5O8.4 [imported] - thaliana >gi|4056432|gb|AAC98005.1| Similar to gi|2245014 homolog from Arabidopsis thaliana chromosome 4 contig gb|Z97341.
MELGDTTSVIPDSFMGYRDDITMQMSMVLDQIRAPLIVPALRLGVYICLTMSVMLFVERVYMGIVISLVKLFGRKPDKRFKYEPIKDDIELGNSAYPMVLIQIPMFNEREVYQLSIGAACGLSWPSDRIVIQVLDDSTDPTIKDLVEMECSRWASKGVNIKYEIRDNRNGYKAGALKEGMKKSYVKSCDYVAIFDADFQPEADFLWRTVPYLLHNPKLALVQARWKFVNSDECLMTRMQEMSLDYHFTVEQEVGSSTYAFFGFNGTAGIWRISALNEAGGWKDRTTVEDMDLAVRASLKGWKFLYLGSLKVKNELPSTFKAYRYQQHRWSCGPANLFRKMAFEIMTNKNVTLWKKVHVIYSFFVVRKLVAHIVTFIFYCVILPATVLVPEVTVPKWGAVYIPSVITLLNAVGTPRSLHLMVFWILFENVMSLHRTKATFIGLLEGGRVNEWIVTEKLGDVKAKSATKTSKKVIRFRFGDRIHVLELGVGMYLLFVGCYDAFFGKNHYYLYLFAQAIAFFIAGFGQIGTIVPNH

SEQ ID NO: 79697 - protein, 519 aa, Arabidopsis thaliana
  peptide (1)..(519): Ceres Seq. ID no. 12652680
  misc_feature (86)..(264): Pfam Name: Glycosyl transferase Pfam Description: Glycosyl transferase
  misc_feature (1)..(519): Homolog of NCBI NO: 15237519 NR Description: putative protein; protein id: At5g03760.1, by cDNA: gi_16974551 [Arabidopsis thaliana]
  misc_feature (1)..(518): Homolog of NCBI NO: 15242959 NR Description: glucosyltransferase-like protein; protein id: supported by cDNA: gi_16648763, supported by cDNA: gi_16648964, by cDNA: gi_20259889 [Arabidopsis thaliana]
  misc_feature (10)..(518): Homolog of NCBI NO: 16519223 NR Description: cellulose synthase-like protein OsCslA9 [Oryza
  misc_feature (1)..(517): Homolog of NCBI NO: 30688411 NR Description: glycosyltransferase family 2 [Arabidopsis >gi|8778578|gb|AAF79586.1|AC007945_6 F28C11.11 [Arabidopsis >gi|20466606|gb|AAM20620.1| unknown protein [Arabidopsis
  misc_feature (5)..(517): Homolog of NCBI NO: 18403914 NR Description: putative glucosyltransferase; protein id: supported by cDNA: 113140., supported by cDNA: gi_16604558 thaliana] >gi|16604559|gb|AAL24081.1| putative
  misc_feature (5)..(517): Homolog of NCBI NO: 21536839 NR Description: putative glucosyltransferase [Arabidopsis
  misc_feature (37)..(517): Homolog of NCBI NO: 30688416 NR Description: glycosyltransferase family 2 [Arabidopsis
  misc_feature (17)..(514): Homolog of NCBI NO: 15221657 NR Description: glucosyltransferase, putative; protein id:
  misc_feature (9)..(514): Homolog of NCBI NO: 28393622 NR Description: putative cellulose synthase [Arabidopsis thaliana]
  misc_feature (84)..(517): Homolog of NCBI NO: 25518505 NR Description: hypothetical protein F5O8.4 [imported] - thaliana >gi|4056432|gb|AAC98005.1| Similar to gi|2245014 homolog from Arabidopsis thaliana chromosome 4 contig gb|Z97341.
MGYRDDITMQMSMVLDQIRAPLIVPALRLGVYICLTMSVMLFVERVYMGIVISLVKLFGRKPDKRFKYEPIKDDIELGNSAYPMVLIQIPMFNEREVYQLSIGAACGLSWPSDRIVIQVLDDSTDPTIKDLVEMECSRWASKGVNIKYEIRDNRNGYKAGALKEGMKKSYVKSCDYVAIFDADFQPEADFLWRTVPYLLHNPKLALVQARWKFVNSDECLMTRMQEMSLDYHFTVEQEVGSSTYAFFGFNGTAGIWRISALNEAGGWKDRTTVEDMDLAVRASLKGWKFLYLGSLKVKNELPSTFKAYRYQQHRWSCGPANLFRKMAFEIMTNKNVTLWKKVHVIYSFFVVRKLVAHIVTFIFYCVILPATVLVPEVTVPKWGAVYIPSVITLLNAVGTPRSLHLMVFWILFENVMSLHRTKATFIGLLEGGRVNEWIVTEKLGDVKAKSATKTSKKVIRFRFGDRIHVLELGVGMYLLFVGCYDAFFGKNHYYLYLFAQAIAFFIAGFGQIGTIVPNH

SEQ ID NO: 79698 - protein, 511 aa, Arabidopsis thaliana
  peptide (1)..(511): Ceres Seq. ID no. 12652681
  misc_feature (78)..(256): Pfam Name: Glycosyl transferase Pfam Description: Glycosyl transferase
  misc_feature (1)..(511): Homolog of NCBI NO: 15237519 NR Description: putative protein; protein id: At5g03760.1, by cDNA: gi_16974551 [Arabidopsis thaliana]
  misc_feature (1)..(510): Homolog of NCBI NO: 15242959 NR Description: glucosyltransferase-like protein; protein id: supported by cDNA: gi_16648763, supported by cDNA: gi_16648964, by cDNA: gi_20259889 [Arabidopsis thaliana]
  misc_feature (2)..(510): Homolog of NCBI NO: 16519223 NR Description: cellulose synthase-like protein OsCslA9 [Oryza
  misc_feature (1)..(509): Homolog of NCBI NO: 30688411 NR Description: glycosyltransferase family 2 [Arabidopsis >gi|8778578|gb|AAF79586.1|AC007945_6 F28C11.11 [Arabidopsis >gi|20466606|gb|AAM20620.1| unknown protein [Arabidopsis
  misc_feature (1)..(509): Homolog of NCBI NO: 18403914 NR Description: putative glucosyltransferase; protein id: supported by cDNA: 113140., supported by cDNA: gi_16604558 thaliana] >gi|16604559|gb|AAL24081.1| putative
  misc_feature (1)..(509): Homolog of NCBI NO: 21536839 NR Description: putative glucosyltransferase [Arabidopsis
  misc_feature (29)..(509): Homolog of NCBI NO: 30688416 NR Description: glycosyltransferase family 2 [Arabidopsis
  misc_feature (9)..(506): Homolog of NCBI NO: 15221657 NR Description: glucosyltransferase, putative; protein id:
  misc_feature (1)..(506): Homolog of NCBI NO: 28393622 NR Description: putative cellulose synthase [Arabidopsis thaliana]
  misc_feature (76)..(509): Homolog of NCBI NO: 25518505 NR Description: hypothetical protein F5O8.4 [imported] - thaliana >gi|4056432|gb|AAC98005.1| Similar to gi|2245014 homolog from Arabidopsis thaliana chromosome 4 contig gb|Z97341.
MQMSMVLDQIRAPLIVPALRLGVYICLTMSVMLFVERVYMGIVISLVKLFGRKPDKRFKYEPIKDDIELGNSAYPMVLIQIPMFNEREVYQLSIGAACGLSWPSDRIVIQVLDDSTDPTIKDLVEMECSRWASKGVNIKYEIRDNRNGYKAGALKEGMKKSYVKSCDYVAIFDADFQPEADFLWRTVPYLLHNPKLALVQARWKFVNSDECLMTRMQEMSLDYHFTVEQEVGSSTYAFFGFNGTAGIWRISALNEAGGWKDRTTVEDMDLAVRASLKGWKFLYLGSLKVKNELPSTFKAYRYQQHRWSCGPANLFRKMAFEIMTNKNVTLWKKVHVIYSFFVVRKLVAHIVTFIFYCVILPATVLVPEVTVPKWGAVYIPSVITLLNAVGTPRSLHLMVFWILFENVMSLHRTKATFIGLLEGGRVNEWIVTEKLGDVKAKSATKTSKKVIRFRFGDRIHVLELGVGMYLLFVGCYDAFFGKNHYYLYLFAQAIAFFIAGFGQIGTIVPNH

SEQ ID NO: 79699 - DNA, 1155 bp, Arabidopsis thaliana
  misc_feature (1)..(1155): Ceres Seq. ID no. 12652690
  misc_feature: MA Experiment ID: 20000179 Result: Up-regulated in Transcription
  misc_feature: MA Experiment 20000179 PARAMETER Experiment Name: At_Germinating_Seeds_P Parameter: Age (hr) Value: 6 vs. 0
  misc_feature: MA Experiment 20000179 PARAMETER Experiment Name: At_Germinating_Seeds_P Parameter: Tissue Value: Germinating Seeds
  misc_feature: MA Experiment ID: 20000180 Result: Up-regulated in Transcription
  misc_feature: MA Experiment 20000180 PARAMETER Experiment Name: At_Germinating_Seeds_P Parameter: Age (hr) Value: 24 vs. 0
  misc_feature: MA Experiment 20000180 PARAMETER Experiment Name: At_Germinating_Seeds_P Parameter: Tissue Value: Germinating Seeds
  misc_feature: MA Experiment ID: 20000184 Result: Up-regulated in Transcription
  misc_feature: MA Experiment 20000184 PARAMETER Experiment Name: At_Shoots__P Parameter: Age (day) Value: 7
  misc_feature: MA Experiment 20000184 PARAMETER Experiment Name: At_Shoots__P Parameter: Tissue Value: Shoots vs. Whole Plant
  misc_feature: MA Experiment ID: 20000495 Result: Up-regulated in Transcription
  misc_feature: MA Experiment 20000495 PARAMETER Experiment Name: At_Guard_Cells_P Parameter: Harvest Date Value: 8/2/2002
  misc_feature: MA Experiment 20000495 PARAMETER Experiment Name: At_Guard_Cells_P Parameter: Organism Value: A. thaliana
  misc_feature: MA Experiment 20000495 PARAMETER Experiment Name: At_Guard_Cells_P Parameter: Tissue Value: Guard Cells vs. Leaves
atgggttgtgtttcttcgaaactaggcaagaagaaactcataagagagattagagtcaacaatggcggcgatcacattgtctctcttacttcaactacttatggtcatctcgatctcgatgaacgagcagagacctctcctaagtcactggaagttactaaaggcgaagtctttgaatctgaaatcataccgagaagatctattaagagagatgatccggagattatcaatacttgggagcttatggaagatcttgaagattcaatgcacgtttctaatccacagaagattagtcccaaatctcgtggtattttcggtaaatcatggaagactccggtgaaatcggttgttgaatctccgaagagaggaagtagtaagagatttggagggaaagagaataattcgagaggtgtgagtccgaatcagattctgaagccgaagaacattcttgaaacaccgaagagaggtgtaatgcgtttgagttttcctcttaaatctgaagaatcttcggtgacggttacgcagaggaggaagagttatagtccaatgtttgatccagatcttgtggcttcttacgaaagagagttgtctcaagagaaagaacagatcaagatggtgatttctccggtggtgcacgagagcagaaaaacagagaaaacagagagaattcttgagaagttcccagagaaatgtccaccgggaggagagcactctgtggtgatctacataacaactcttagagggatacggaagacgtttgaggattgtaatgtggtaagatcgatattagattcacacgaagttcgattctcagagcgagatgtgtcgatgcactcggtttttaaggaagagatcaggggcattatgggaacgaaacatgtgaagatacctgcggtattcgttaaagggaggatggtaggaagtgttgaggaagtgatgaggttagaagaggagggcaaattgggaatattacttgaaggtattccggcggcgaggcttggaggcagttgctgccgtggatgtggaggaatgagatttatgatgtgtgttgtttgcaacggaagctgcaaggttagggaggaagagaagaagagtatggttaagtgtttgaagtgtaatgagaatggtttggttctatgtccaatttgttcttaa

SEQ ID NO: 79700 - protein, 384 aa, Arabidopsis thaliana
  peptide (1)..(384): Ceres Seq. ID no. 12652691
  misc_feature (238)..(325): Pfam Name: Glutaredoxin Pfam Description: Glutaredoxin
  misc_feature (1)..(384): Homolog of NCBI NO: 15237554 NR Description: putative protein; protein id: At5g03870.1
  misc_feature (88)..(384): Homolog of NCBI NO: 38346321 NR Description: OJ000126_13.3 [Oryza sativa (japonica
  misc_feature (224)..(384): Homolog of NCBI NO: 15240974 NR Description: putative protein; protein id: At5g01420.1
  misc_feature (224)..(384): Homolog of NCBI NO: 26451045 NR Description: unknown protein [Arabidopsis thaliana]
  misc_feature (225)..(384): Homolog of NCBI NO: 15235179 NR Description: putative protein; protein id: At4g10630.1
  misc_feature (222)..(384): Homolog of NCBI NO: 15223291 NR Description: unknown protein; protein id: At1g32760.1 thaliana] >gi|6714276|gb|AAF25972.1|AC017118_9 F6N18.14
  misc_feature (218)..(383): Homolog of NCBI NO: 34899868 NR Description: OJ1714_H10.16 [Oryza sativa (japonica
  misc_feature (195)..(384): Homolog of NCBI NO: 15240060 NR Description: putative protein; protein id: At5g06470.1 thaliana] >gi|9758427|dbj|BAB08969.1|
  misc_feature (208)..(383): Homolog of NCBI NO: 15451042 NR Description: putative protein [Arabidopsis thaliana]
  misc_feature (208)..(383): Homolog of NCBI NO: 30694571 NR Description: expressed protein [Arabidopsis thaliana]
MGCVSSKLGKKKLIREIRVNNGGDHIVSLTSTTYGHLDLDERAETSPKSLEVTKGEVFESEIIPRRSIKRDDPEIINTWELMEDLEDSMHVSNPQKISPKSRGIFGKSWKTPVKSVVESPKRGSSKRFGGKENNSRGVSPNQILKPKNILETPKRGVMRLSFPLKSEESSVTVTQRRKSYSPMFDPDLVASYERELSQEKEQIKMVISPVVHESRKTEKTERILEKFPEKCPPGGEHSVVIYITTLRGIRKTFEDCNVVRSILDSHEVRFSERDVSMHSVFKEEIRGIMGTKHVKIPAVFVKGRMVGSVEEVMRLEEEGKLGILLEGIPAARLGGSCCRGCGGMRFMMCVVCNGSCKVREEEKKSMVKCLKCNENGLVLCPICS

SEQ ID NO: 79701 - protein, 303 aa, Arabidopsis thaliana
  peptide (1)..(303): Ceres Seq. ID no. 12652692
  misc_feature (157)..(244): Pfam Name: Glutaredoxin Pfam Description: Glutaredoxin
  misc_feature (1)..(303): Homolog of NCBI NO: 15237554 NR Description: putative protein; protein id: At5g03870.1
  misc_feature (7)..(303): Homolog of NCBI NO: 38346321 NR Description: OJ000126_13.3 [Oryza sativa (japonica
  misc_feature (143)..(303): Homolog of NCBI NO: 15240974 NR Description: putative protein; protein id: At5g01420.1
  misc_feature (143)..(303): Homolog of NCBI NO: 26451045 NR Description: unknown protein [Arabidopsis thaliana]
  misc_feature (144)..(303): Homolog of NCBI NO: 15235179 NR Description: putative protein; protein id: At4g10630.1
  misc_feature (141)..(303): Homolog of NCBI NO: 15223291 NR Description: unknown protein; protein id: At1g32760.1 thaliana] >gi|6714276|gb|AAF25972.1|AC017118_9 F6N18.14
  misc_feature (137)..(302): Homolog of NCBI NO: 34899868 NR Description: OJ1714_H10.16 [Oryza sativa (japonica
  misc_feature (114)..(303): Homolog of NCBI NO: 15240060 NR Description: putative protein; protein id: At5g06470.1 thaliana] >gi|9758427|dbj|BAB08969.1|
  misc_feature (127)..(302): Homolog of NCBI NO: 15451042 NR Description: putative protein [Arabidopsis thaliana]
  misc_feature (127)..(302): Homolog of NCBI NO: 30694571 NR Description: expressed protein [Arabidopsis thaliana]
MEDLEDSMHVSNPQKISPKSRGIFGKSWKTPVKSVVESPKRGSSKRFGGKENNSRGVSPNQILKPKNILETPKRGVMRLSFPLKSEESSVTVTQRRKSYSPMFDPDLVASYERELSQEKEQIKMVISPVVHESRKTEKTERILEKFPEKCPPGGEHSVVIYITTLRGIRKTFEDCNVVRSILDSHEVRFSERDVSMHSVFKEEIRGIMGTKHVKIPAVFVKGRMVGSVEEVMRLEEEGKLGILLEGIPAARLGGSCCRGCGGMRFMMCVVCNGSCKVREEEKKSMVKCLKCNENGLVLCPICS

SEQ ID NO: 79702 - protein, 296 aa, Arabidopsis thaliana
  peptide (1)..(296): Ceres Seq. ID no. 12652693
  misc_feature (150)..(237): Pfam Name: Glutaredoxin Pfam Description: Glutaredoxin
  misc_feature (1)..(296): Homolog of NCBI NO: 15237554 NR Description: putative protein; protein id: At5g03870.1
  misc_feature (1)..(296): Homolog of NCBI NO: 38346321 NR Description: OJ000126_13.3 [Oryza sativa (japonica
  misc_feature (136)..(296): Homolog of NCBI NO: 15240974 NR Description: putative protein; protein id: At5g01420.1
  misc_feature (136)..(296): Homolog of NCBI NO: 26451045 NR Description: unknown protein [Arabidopsis thaliana]
  misc_feature (137)..(296): Homolog of NCBI NO: 15235179 NR Description: putative protein; protein id: At4g10630.1
  misc_feature (134)..(296): Homolog of NCBI NO: 15223291 NR Description: unknown protein; protein id: At1g32760.1 thaliana] >gi|6714276|gb|AAF25972.1|AC017118_9 F6N18.14
  misc_feature (130)..(295): Homolog of NCBI NO: 34899868 NR Description: OJ1714_H10.16 [Oryza sativa (japonica
  misc_feature (107)..(296): Homolog of NCBI NO: 15240060 NR Description: putative protein; protein id: At5g06470.1 thaliana] >gi|9758427|dbj|BAB08969.1|
  misc_feature (120)..(295): Homolog of NCBI NO: 15451042 NR Description: putative protein [Arabidopsis thaliana]
  misc_feature (120)..(295): Homolog of NCBI NO: 30694571 NR Description: expressed protein [Arabidopsis thaliana]
MHVSNPQKISPKSRGIFGKSWKTPVKSVVESPKRGSSKRFGGKENNSRGVSPNQILKPKNILETPKRGVMRLSFPLKSEESSVTVTQRRKSYSPMFDPDLVASYERELSQEKEQIKMVISPVVHESRKTEKTERILEKFPEKCPPGGEHSVVIYITTLRGIRKTFEDCNVVRSILDSHEVRFSERDVSMHSVFKEEIRGIMGTKHVKIPAVFVKGRMVGSVEEVMRLEEEGKLGILLEGIPAARLGGSCCRGCGGMRFMMCVVCNGSCKVREEEKKSMVKCLKCNENGLVLCPICS

SEQ ID NO: 79703 - DNA, 1865 bp, Arabidopsis thaliana
  misc_feature (1)..(1865): Ceres Seq. ID no. 12652702
  misc_feature: MA Experiment ID: 20000185 Result: Down-regulated in Transcription
  misc_feature: MA Experiment 20000185 PARAMETER Experiment Name: At_Roots__P Parameter: Age (day) Value: 7 vs. 21
  misc_feature: MA Experiment 20000185 PARAMETER Experiment Name: At_Roots__P Parameter: Organism Value: A. thaliana
  misc_feature: MA Experiment 20000185 PARAMETER Experiment Name: At_Roots__P Parameter: Tissue Value: Roots vs. Whole Plant
  misc_feature: MA Experiment ID: 20000439 Result: Down-regulated in Transcription
  misc_feature: MA Experiment 20000439 PARAMETER Experiment Name: At_Roots__P Parameter: Age (day) Value: 14 vs. 21
  misc_feature: MA Experiment 20000439 PARAMETER Experiment Name: At_Roots__P Parameter: Organism Value: A. thaliana
  misc_feature: MA Experiment 20000439 PARAMETER Experiment Name: At_Roots__P Parameter: Tissue Value: Roots vs. Whole Plant
gtaccaagaagattgcggagagtcgtgaaaagttttgagctttgatcactcactcactagtaatggaggctcttcaattttccagcgtgaatagagttccttgtactctgagctgtaccggaaataggagaattaaggctgccttcagctctgcgttcaccggtggcaccatcaattcagcttctctgtcctcctctaggaatctctccacgcgagagatatggagttgggtgaaatcgaagactgttgttggccatggaagatacagaagaagccaagtgagagccgagatgtttggtcagttgactggtggcctcgaggctgcttggagcaaactcaaaggcgaagaggtcttgactaaggacaatattgctgagccaatgcgggatatcagaagagctctcctggaagcagatgtgagtctcccagttgttagaaggtttgttcagtctgttagtgaccaagccgttggaatgggtgtcattcgtggagtcaaaccagatcagcaattggtcaagattgtacatgatgagctagtgaaattgatgggtggagaagtatctgagttacagtttgctaaatcaggtcctacagtaatattgttggctgggctccaaggagttggaaagacaacggtttgtgctaaactagcttgttacctaaagaagcagggaaaatcttgcatgcttattgctggagatgtataccgacctgctgctatcgatcaacttgtcattttaggtgaacaggttggtgtgccggtttatacagcagggactgatgtaaaacctgcagatatagctaagcaaggtctaaaagaagctaaaaagaacaatgttgatgtagttattatggatactgcagggaggcttcagatagataaaggcatgatggacgaattaaaagacgtgaagaaatttctgaatccaacagaagtgttactagttgttgatgccatgactggacaagaagctgcagcactggtgacgacattcaatgtagagataggaattacaggagccattttgacaaagctagatggtgattcaagaggtggtgctgctttgagtgtcaaggaggtatcaggaaaaccgattaaactggtaggacgtggagagcgaatggaggatcttgaacccttttatccagatcgaatggctggacgaattctaggaatgggagatgtgctttcatttgtagagaaggcaacagaagttatgcgtcaagaagatgcagaagatctgcagaagaagataatgagtgcaaagttcgacttcaacgattttctaaagcagactcgtgctgtagcgaaaatgggttcgatgacacgagttcttggaatgattcccggaatggggaaagtgagtccagcacaaatccgagaagcggaaaagaatcttttagtcatggaagcaatgattgaagtgatgacacccgaggaaagagagagaccagagttactagcagaatctccagagagaagaaaaagaatcgctaaagattcaggaaagacagaacaacaggtgagcgcacttgtagcacaaatcttccaaatgagagtgaaaatgaagaacttgatgggagtgatggaaggaggatcaattccagcattaagcggtctcgaggacgcattgaaagcagaacaaaaggctccacctggaactgcaaggaggaagagaaaggcagactcaaggaagaaatttgtagagtcagcatcaagcaagcctggtcctcgtggcttcggctctggtaactaaaactatttcagcccaatttggttaatttctaaacggattatttttttgtataagttaatgaatgagacagaaaccttacaagttaattaccaatttgttgacaaaact

SEQ ID NO: 79704 - protein, 564 aa, Arabidopsis thaliana
  peptide (1)..(564): Ceres Seq. ID no. 12652703
  misc_feature (402)..(502): Pfam Name: Signal peptide binding domain Pfam Description: Signal peptide binding domain
  misc_feature (1)..(564): Homolog of NCBI NO: 15237580 NR Description: signal recognition particle 54CP protein protein id: At5g03940.1, supported by cDNA: gi_15293130 thaliana] >gi|586038|sp|P37107|SR5C_ARATH Signal recognition
  misc_feature (1)..(564): Homolog of NCBI NO: 3746964 NR Description: signal recognition particle 54 kDa subunit
  misc_feature (45)..(564): Homolog of NCBI NO: 3746903 NR Description: signal recognition particle 54 kDa subunit
  misc_feature (77)..(547): Homolog of NCBI NO: 22299516 NR Description: signal recognition particle protein
  misc_feature (74)..(546): Homolog of NCBI NO: 2126515 NR Description: probable RNA binding protein ffh - Synechococcus
  misc_feature (77)..(546): Homolog of NCBI NO: 2500884 NR Description: SIGNAL SEQUENCE BINDING PROTEIN
  misc_feature (77)..(520): Homolog of NCBI NO: 17229444 NR Description: signal recognition particle protein [Nostoc sp.
  misc_feature (77)..(520): Homolog of NCBI NO: 23129088 NR Description: hypothetical protein [Nostoc punctiforme]
  misc_feature (77)..(546): Homolog of NCBI NO: 16330898 NR Description: signal recognition particle protein sp. PCC 6803] >gi|2500885|sp|P74214|SR54_SYNY3 Signal recognition
  misc_feature (77)..(561): Homolog of NCBI NO: 33866152 NR Description: signal recognition particle protein (SRP54) sp. WH 8102] >gi|33639127|emb|CAE08133.1| signal recognition
MEALQFSSVNRVPCTLSCTGNRRIKAAFSSAFTGGTINSASLSSSRNLSTREIWSWVKSKTVVGHGRYRRSQVRAEMFGQLTGGLEAAWSKLKGEEVLTKDNIAEPMRDIRRALLEADVSLPVVRRFVQSVSDQAVGMGVIRGVKPDQQLVKIVHDELVKLMGGEVSELQFAKSGPTVILLAGLQGVGKTTVCAKLACYLKKQGKSCMLIAGDVYRPAAIDQLVILGEQVGVPVYTAGTDVKPADIAKQGLKEAKKNNVDVVIMDTAGRLQIDKGMMDELKDVKKFLNPTEVLLVVDAMTGQEAAALVTTFNVEIGITGAILTKLDGDSRGGAALSVKEVSGKPIKLVGRGERMEDLEPFYPDRMAGRILGMGDVLSFVEKATEVMRQEDAEDLQKKIMSAKFDFNDFLKQTRAVAKMGSMTRVLGMIPGMGKVSPAQIREAEKNLLVMEAMIEVMTPEERERPELLAESPERRKRIAKDSGKTEQQVSALVAQIFQMRVKMKNLMGVMEGGSIPALSGLEDALKAEQKAPPGTARRKRKADSRKKFVESASSKPGPRGFGSGN

SEQ ID NO: 79705 - protein, 488 aa, Arabidopsis thaliana
  peptide (1)..(488): Ceres Seq. ID no. 12652704
  misc_feature (326)..(426): Pfam Name: Signal peptide binding domain Pfam Description: Signal peptide binding domain
  misc_feature (1)..(488): Homolog of NCBI NO: 15237580 NR Description: signal recognition particle 54CP protein protein id: At5g03940.1, supported by cDNA: gi_15293130 thaliana] >gi|586038|sp|P37107|SR5C_ARATH Signal recognition
  misc_feature (1)..(488): Homolog of NCBI NO: 3746964 NR Description: signal recognition particle 54 kDa subunit
  misc_feature (1)..(488): Homolog of NCBI NO: 3746903 NR Description: signal recognition particle 54 kDa subunit
  misc_feature (1)..(471): Homolog of NCBI NO: 22299516 NR Description: signal recognition particle protein
  misc_feature (1)..(470): Homolog of NCBI NO: 2126515 NR Description: probable RNA binding protein ffh - Synechococcus
  misc_feature (1)..(470): Homolog of NCBI NO: 2500884 NR Description: SIGNAL SEQUENCE BINDING PROTEIN
  misc_feature (1)..(444): Homolog of NCBI NO: 17229444 NR Description: signal recognition particle protein [Nostoc sp.
  misc_feature (1)..(444): Homolog of NCBI NO: 23129088 NR Description: hypothetical protein [Nostoc punctiforme]
  misc_feature (1)..(470): Homolog of NCBI NO: 16330898 NR Description: signal recognition particle protein sp. PCC 6803] >gi|2500885|sp|P74214|SR54_SYNY3 Signal recognition
  misc_feature (1)..(485): Homolog of NCBI NO: 33866152 NR Description: signal recognition particle protein (SRP54) sp. WH 8102] >gi|33639127|emb|CAE08133.1| signal recognition
MFGQLTGGLEAAWSKLKGEEVLTKDNIAEPMRDIRRALLEADVSLPVVRRFVQSVSDQAVGMGVIRGVKPDQQLVKIVHDELVKLMGGEVSELQFAKSGPTVILLAGLQGVGKTTVCAKLACYLKKQGKSCMLIAGDVYRPAAIDQLVILGEQVGVPVYTAGTDVKPADIAKQGLKEAKKNNVDVVIMDTAGRLQIDKGMMDELKDVKKFLNPTEVLLVVDAMTGQEAAALVTTFNVEIGITGAILTKLDGDSRGGAALSVKEVSGKPIKLVGRGERMEDLEPFYPDRMAGRILGMGDVLSFVEKATEVMRQEDAEDLQKKIMSAKFDFNDFLKQTRAVAKMGSMTRVLGMIPGMGKVSPAQIREAEKNLLVMEAMIEVMTPEERERPELLAESPERRKRIAKDSGKTEQQVSALVAQIFQMRVKMKNLMGVMEGGSIPALSGLEDALKAEQKAPPGTARRKRKADSRKKFVESASSKPGPRGFGSGN

SEQ ID NO: 79706 - protein, 458 aa, Arabidopsis thaliana
  peptide (1)..(458): Ceres Seq. ID no. 12652705
  misc_feature (296)..(396): Pfam Name: Signal peptide binding domain Pfam Description: Signal peptide binding domain
  misc_feature (1)..(458): Homolog of NCBI NO: 15237580 NR Description: signal recognition particle 54CP protein protein id: At5g03940.1, supported by cDNA: gi_15293130 thaliana] >gi|586038|sp|P37107|SR5C_ARATH Signal recognition
  misc_feature (1)..(458): Homolog of NCBI NO: 3746964 NR Description: signal recognition particle 54 kDa subunit
  misc_feature (1)..(458): Homolog of NCBI NO: 3746903 NR Description: signal recognition particle 54 kDa subunit
  misc_feature (1)..(441): Homolog of NCBI NO: 22299516 NR Description: signal recognition particle protein
  misc_feature (1)..(440): Homolog of NCBI NO: 2126515 NR Description: probable RNA binding protein ffh - Synechococcus
  misc_feature (1)..(440): Homolog of NCBI NO: 2500884 NR Description: SIGNAL SEQUENCE BINDING PROTEIN
  misc_feature (1)..(414): Homolog of NCBI NO: 17229444 NR Description: signal recognition particle protein [Nostoc sp.
  misc_feature (1)..(414): Homolog of NCBI NO: 23129088 NR Description: hypothetical protein [Nostoc punctiforme]
  misc_feature (1)..(440): Homolog of NCBI NO: 16330898 NR Description: signal recognition particle protein sp. PCC 6803] >gi|2500885|sp|P74214|SR54_SYNY3 Signal recognition
  misc_feature (1)..(455): Homolog of NCBI NO: 33866152 NR Description: signal recognition particle protein (SRP54) sp. WH 8102] >gi|33639127|emb|CAE08133.1| signal recognition
MRDIRRALLEADVSLPVVRRFVQSVSDQAVGMGVIRGVKPDQQLVKIVHDELVKLMGGEVSELQFAKSGPTVILLAGLQGVGKTTVCAKLACYLKKQGKSCMLIAGDVYRPAAIDQLVILGEQVGVPVYTAGTDVKPADIAKQGLKEAKKNNVDVVIMDTAGRLQIDKGMMDELKDVKKFLNPTEVLLVVDAMTGQEAAALVTTFNVEIGITGAILTKLDGDSRGGAALSVKEVSGKPIKLVGRGERMEDLEPFYPDRMAGRILGMGDVLSFVEKATEVMRQEDAEDLQKKIMSAKFDFNDFLKQTRAVAKMGSMTRVLGMIPGMGKVSPAQIREAEKNLLVMEAMIEVMTPEERERPELLAESPERRKRIAKDSGKTEQQVSALVAQIFQMRVKMKNLMGVMEGGSIPALSGLEDALKAEQKAPPGTARRKRKADSRKKFVESASSKPGPRGFGSGN

SEQ ID NO: 79707 - DNA, 1461 bp, Arabidopsis thaliana
  misc_feature (1)..(1461): Ceres Seq. ID no. 12652736
atgcttctgaaaccctaccctcctggccccaaaggcttacccgtcattggaaatattctcatgatgaaccagtttaaccaccggggtctggccaagctcagccgtatatacggtgggttgctccatctccgcctcggattttcccacattttcgtcgtttcttctccggacattgcgcgtcaagtcctccaagtccaagaccacgttttctcaaaccgtcccaccacaatcgcaatccgatacttgacctacggaggatccgatcttgcattctgcaattacggcccgttttggcgtcggatgagaaaactctacgtcatgatgctctttagccgtaaacgggccgagtcgtgggtctctgttgatgaagaggtccacaaatcggtccgtttagtggcttccaacgtcggaaaaccactaaacatatgtaaactagcattttccctatcaagagacataacgttccgagcagctttcggttcctcctcatccacatctgatgaaagccgtttggacgagttccttgagatcattcaagagttctctaagctctttggtgagtttaacgtagcggattatgtcccgtcgtggctcagttggattgacccgcaagggataaacgggcgagttgagaaagcccgaaaatctctagacggtttcattgagtccgtcatcgatgatcacttgcacaagaagaagagagaacatgataacgttgacgaagagactgatatggtagatcaattacttgcgttctacgaagaagaagtcaaagtcaacaactcagtcaccaaaattaatctcgataacataaaaggcatcatcatggatgtgatgttcggaggaacggagacggtggcattagcaatcgaatgggtgctaaccgagatactccggagccccgagaacatgaaacgggtccaggacgagctaacgagtgtggtcgggcttgacagatggcgcgtggaggacacgcacctcgagaagctcactttcctcaagtgtatcctcaaggagaccctccggctccacccgcctttccctctcctcctccacgagacggtgaaggacactgagatttccggttacttcatccccaagggttcgcgtgtgatggtcaatacctacgctctagggcgtgacccgaattcttggtccgacccggaaagttttaacccgggtaggtttttaaacccgattgctccggatctgaaggggaataatttcgaatttgttccattcgggtcgggtcggagatcgtgcccgggtatgcaactcgggttgtacgcatttgagcttgcggtggctcatcttctacactgcttcacgtggagtttaccggacggtatgaatcccggtgacgtcgacaccgttgaaggaccgggtctcaccgttcctaaggcaattcctttggtggcggtgccgaccacgcgcctcctctgccccatcgtcgtctcgtga

SEQ ID NO: 79708 - protein, 486 aa, Arabidopsis thaliana
  peptide (1)..(486): Ceres Seq. ID no. 12652737
  misc_feature (7)..(474): Pfam Name: Cytochrome P450 Pfam Description: Cytochrome P450
  misc_feature (1)..(486): Homolog of NCBI NO: 15237691 NR Description: cytochrome p450 family; protein id: At5g04330.1
  misc_feature (5)..(483): Homolog of NCBI NO: 12578893 NR Description: ferulate-5-hydroxylase [Arabidopsis thaliana]
  misc_feature (5)..(483): Homolog of NCBI NO: 15234332 NR Description: ferulate-5-hydroxylase (FAH1); protein id:
  misc_feature (5)..(483): Homolog of NCBI NO: 10197650 NR Description: cytochrome p450-dependent monooxygenase [Brassica
  misc_feature (5)..(483): Homolog of NCBI NO: 10197652 NR Description: cytochrome p450-dependent monooxygenase [Brassica
  misc_feature (5)..(483): Homolog of NCBI NO: 12578901 NR Description: ferulate-5-hydroxylase [Arabidopsis thaliana]
  misc_feature (99)..(421): Homolog of NCBI NO: 8745511 NR Description: ferulate-5-hydroxylase; coniferyl
  misc_feature (4)..(483): Homolog of NCBI NO: 10197654 NR Description: cytochrome p450-dependent monooxygenase [Brassica
  misc_feature (5)..(483): Homolog of NCBI NO: 5731998 NR Description: aldehyde 5-hydroxylase [Liquidambar styraciflua]
  misc_feature (5)..(483): Homolog of NCBI NO: 6688937 NR Description: ferulate-5-hydroxylase [Populus balsamifera
MLLKPYPPGPKGLPVIGNILMMNQFNHRGLAKLSRIYGGLLHLRLGFSHIFVVSSPDIARQVLQVQDHVFSNRPTTIAIRYLTYGGSDLAFCNYGPFWRRMRKLYVMMLFSRKRAESWVSVDEEVHKSVRLVASNVGKPLNICKLAFSLSRDITFRAAFGSSSSTSDESRLDEFLEIIQEFSKLFGEFNVADYVPSWLSWIDPQGINGRVEKARKSLDGFIESVIDDHLHKKKREHDNVDEETDMVDQLLAFYEEEVKVNNSVTKINLDNIKGIIMDVMFGGTETVALAIEWVLTEILRSPENMKRVQDELTSVVGLDRWRVEDTHLEKLTFLKCILKETLRLHPPFPLLLHETVKDTEISGYFIPKGSRVMVNTYALGRDPNSWSDPESFNPGRFLNPIAPDLKGNNFEFVPFGSGRRSCPGMQLGLYAFELAVAHLLHCFTWSLPDGMNPGDVDTVEGPGLTVPKAIPLVAVPTTRLLCPIVVS

SEQ ID NO: 79709 - protein, 466 aa, Arabidopsis thaliana
  peptide (1)..(466): Ceres Seq. ID no. 12652738
  misc_feature (1)..(454): Pfam Name: Cytochrome P450 Pfam Description: Cytochrome P450
  misc_feature (1)..(466): Homolog of NCBI NO: 15237691 NR Description: cytochrome p450 family; protein id: At5g04330.1
  misc_feature (1)..(463): Homolog of NCBI NO: 12578893 NR Description: ferulate-5-hydroxylase [Arabidopsis thaliana]
  misc_feature (1)..(463): Homolog of NCBI NO: 15234332 NR Description: ferulate-5-hydroxylase (FAH1); protein id:
  misc_feature (1)..(463): Homolog of NCBI NO: 10197650 NR Description: cytochrome p450-dependent monooxygenase [Brassica
  misc_feature (1)..(463): Homolog of NCBI NO: 10197652 NR Description: cytochrome p450-dependent monooxygenase [Brassica
  misc_feature (1)..(463): Homolog of NCBI NO: 12578901 NR Description: ferulate-5-hydroxylase [Arabidopsis thaliana]
  misc_feature (79)..(401): Homolog of NCBI NO: 8745511 NR Description: ferulate-5-hydroxylase; coniferyl
  misc_feature (1)..(463): Homolog of NCBI NO: 10197654 NR Description: cytochrome p450-dependent monooxygenase [Brassica
  misc_feature (1)..(463): Homolog of NCBI NO: 5731998 NR Description: aldehyde 5-hydroxylase [Liquidambar styraciflua]
  misc_feature (1)..(463): Homolog of NCBI NO: 6688937 NR Description: ferulate-5-hydroxylase [Populus balsamifera
MMNQFNHRGLAKLSRIYGGLLHLRLGFSHIFVVSSPDIARQVLQVQDHVFSNRPTTIAIRYLTYGGSDLAFCNYGPFWRRMRKLYVMMLFSRKRAESWVSVDEEVHKSVRLVASNVGKPLNICKLAFSLSRDITFRAAFGSSSSTSDESRLDEFLEIIQEFSKLFGEFNVADYVPSWLSWIDPQGINGRVEKARKSLDGFIESVIDDHLHKKKREHDNVDEETDMVDQLLAFYEEEVKVNNSVTKINLDNIKGIIMDVMFGGTETVALAIEWVLTEILRSPENMKRVQDELTSVVGLDRWRVEDTHLEKLTFLKCILKETLRLHPPFPLLLHETVKDTEISGYFIPKGSRVMVNTYALGRDPNSWSDPESFNPGRFLNPIAPDLKGNNFEFVPFGSGRRSCPGMQLGLYAFELAVAHLLHCFTWSLPDGMNPGDVDTVEGPGLTVPKAIPLVAVPTTRLLCPIVVS

SEQ ID NO: 79710 - protein, 465 aa, Arabidopsis thaliana
  peptide (1)..(465): Ceres Seq. ID no. 12652739
  misc_feature (1)..(453): Pfam Name: Cytochrome P450 Pfam Description: Cytochrome P450
  misc_feature (1)..(465): Homolog of NCBI NO: 15237691 NR Description: cytochrome p450 family; protein id: At5g04330.1
  misc_feature (1)..(462): Homolog of NCBI NO: 12578893 NR Description: ferulate-5-hydroxylase [Arabidopsis thaliana]
  misc_feature (1)..(462): Homolog of NCBI NO: 15234332 NR Description: ferulate-5-hydroxylase (FAH1); protein id:
  misc_feature (1)..(462): Homolog of NCBI NO: 10197650 NR Description: cytochrome p450-dependent monooxygenase [Brassica
  misc_feature (1)..(462): Homolog of NCBI NO: 10197652 NR Description: cytochrome p450-dependent monooxygenase [Brassica
  misc_feature (1)..(462): Homolog of NCBI NO: 12578901 NR Description: ferulate-5-hydroxylase [Arabidopsis thaliana]
  misc_feature (78)..(400): Homolog of NCBI NO: 8745511 NR Description: ferulate-5-hydroxylase; coniferyl
  misc_feature (1)..(462): Homolog of NCBI NO: 10197654 NR Description: cytochrome p450-dependent monooxygenase [Brassica
  misc_feature (1)..(462): Homolog of NCBI NO: 5731998 NR Description: aldehyde 5-hydroxylase [Liquidambar styraciflua]
  misc_feature (1)..(462): Homolog of NCBI NO: 6688937 NR Description: ferulate-5-hydroxylase [Populus balsamifera
MNQFNHRGLAKLSRIYGGLLHLRLGFSHIFVVSSPDIARQVLQVQDHVFSNRPTTIAIRYLTYGGSDLAFCNYGPFWRRMRKLYVMMLFSRKRAESWVSVDEEVHKSVRLVASNVGKPLNICKLAFSLSRDITFRAAFGSSSSTSDESRLDEFLEIIQEFSKLFGEFNVADYVPSWLSWIDPQGINGRVEKARKSLDGFIESVIDDHLHKKKREHDNVDEETDMVDQLLAFYEEEVKVNNSVTKINLDNIKGIIMDVMFGGTETVALAIEWVLTEILRSPENMKRVQDELTSVVGLDRWRVEDTHLEKLTFLKCILKETLRLHPPFPLLLHETVKDTEISGYFIPKGSRVMVNTYALGRDPNSWSDPESFNPGRFLNPIAPDLKGNNFEFVPFGSGRRSCPGMQLGLYAFELAVAHLLHCFTWSLPDGMNPGDVDTVEGPGLTVPKAIPLVAVPTTRLLCPIVVS

SEQ ID NO: 79711 - DNA, 1191 bp, Arabidopsis thaliana
  misc_feature (1)..(1191): Ceres Seq. ID no. 12652746
  misc_feature: MA Experiment ID: 20000306 Result: Down-regulated in Transcription
  misc_feature: MA Experiment 20000306 PARAMETER Experiment Name: At_Germinating_Seeds_Sub_P Parameter: Age (hr) Value: 6 vs. 0
  misc_feature: MA Experiment 20000306 PARAMETER Experiment Name: At_Germinating_Seeds_Sub_P Parameter: Organism Value: A. thaliana
  misc_feature: MA Experiment 20000306 PARAMETER Experiment Name: At_Germinating_Seeds_Sub_P Parameter: Plant Line Value: WS
  misc_feature: MA Experiment 20000306 PARAMETER Experiment Name: At_Germinating_Seeds_Sub_P Parameter: Tissue Value: Germinating Seeds
  misc_feature: MA Experiment ID: 20000314 Result: Up-regulated in Transcription
  misc_feature: MA Experiment 20000314 PARAMETER Experiment Name: At_14day_Shoots-Roots_Sub_P Parameter: Age (day) Value: 14
  misc_feature: MA Experiment 20000314 PARAMETER Experiment Name: At_14day_Shoots-Roots_Sub_P Parameter: Organism Value: A. thaliana
  misc_feature: MA Experiment 20000314 PARAMETER Experiment Name: At_14day_Shoots-Roots_Sub_P Parameter: Plant Line Value: WS
  misc_feature: MA Experiment 20000314 PARAMETER Experiment Name: At_14day_Shoots-Roots_Sub_P Parameter: Tissue Value: Roots vs. Whole Plant
  misc_feature: MA Experiment ID: 20000352 Result: Up-regulated in Transcription
  misc_feature: MA Experiment 20000352 PARAMETER Experiment Name: At_Drought_Sub_P Parameter: Age (day) Value: 7
  misc_feature: MA Experiment 20000352 PARAMETER Experiment Name: At_Drought_Sub_P Parameter: Organism Value: A. thaliana
  misc_feature: MA Experiment 20000352 PARAMETER Experiment Name: At_Drought_Sub_P Parameter: Plant Line Value: WS
  misc_feature: MA Experiment 20000352 PARAMETER Experiment Name: At_Drought_Sub_P Parameter: Timepoint (hr) Value: 6
  misc_feature: MA Experiment 20000352 PARAMETER Experiment Name: At_Drought_Sub_P Parameter: Tissue Value: Whole Plant
  misc_feature: MA Experiment 20000352 PARAMETER Experiment Name: At_Drought_Sub_P Parameter: Treatment Value: Drought vs. No Drought
atggattcaagattcaccgattccacaactaccttaagatgtaatggtaagagtgaaaatgagaggaaaaacggcgatgaagaaagaattagtaaatactcctttgtgagtccactgtgtatgcgtggaggagatggatacaatagttactccagcaattctcttcttcagagaagagtgttatcaaaggctaaaccggtattggttaagaacacaaaggacctgatgataaacttaaactttcctacatacattaaagtagctgatttgggctgttcatcaggacagaatacgttcttggcaatgtctgaaattatcaatacaatcaatgtgttttgtcaacagaggaaccaaaacccaccagaaatagattgttgtctaaatgatctccctagtaacgattttaacacaacgttcaaattcatacaattcttcaatgggatgaacatcacgagcaaagaatcatactttgtctatggagtccccggttctttctactcgaggctcttccctcggaggagtcttcatttcgtacattcctcttatggtctccattggctctctaaggttcctgaagggcttgagaagaataagatgagtgtgtacatcacaaattcaagtcctctaagcacatacaaggcttacttaaatcaattccaaagagattttgcgacattccttaaactgcgttctgaagagatggtttctaatggacgcatggttctcactttcattggtcgaaacactattgataatccattgcatagagattgttgtcacttttggacattattatccaaatctcttcgtgacctagtcgccgagggccttgtgagtgcatcaaaggtagattcattctacttaccgttttatgaccccaacgaaaaagaaataaaggagatggtacagaaagaaggttcctttgaaatcagagacttggagacacatggatatgatcttggccattgtaaccaagacgagtcaaagagaagtaaatcagggcaaaatgaagctaattacatcagagcggtgagtgaaccactgcttgcggctcactttggagatgccattatcaacatattgtttaacaagtttgcatgtcatgtgtctcaacatgttagttgcaggaacaaaacgaccgtcagcatagtcgtttcactgactaagaaaaaaactttcctcatgtcctaa

SEQ ID NO: 79712 - protein, 396 aa, Arabidopsis thaliana
  peptide (1)..(396): Ceres Seq. ID no. 12652747
  misc_feature (68)..(390): Pfam Name: SAM dependent carboxyl methyltransferase Pfam Description: SAM dependent carboxyl methyltransferase
  misc_feature (1)..(396): Homolog of NCBI NO: 15237695 NR Description: S-adenosyl-L-methionine:carboxyl
  misc_feature (1)..(390): Homolog of NCBI NO: 37904506 NR Description: methyl transferase [Arabidopsis lyrata subsp.
  misc_feature (1)..(390): Homolog of NCBI NO: 22330992 NR Description: S-adenosyl-L-methionine:carboxyl
  misc_feature (13)..(390): Homolog of NCBI NO: 15237696 NR Description: S-adenosyl-L-methionine:carboxyl
  misc_feature (41)..(390): Homolog of NCBI NO: 15239970 NR Description: S-adenosyl-L-methionine:carboxyl
  misc_feature (64)..(390): Homolog of NCBI NO: 12322908 NR Description: hypothetical protein; 58431-59672 [Arabidopsis
  misc_feature (39)..(390): Homolog of NCBI NO: 15240823 NR Description: S-adenosyl-L-methionine:carboxyl
  misc_feature (41)..(390): Homolog of NCBI NO: 8885604 NR Description: S-adenosyl-L-methionine:salicylic acid carboxyl
  misc_feature (41)..(390): Homolog of NCBI NO: 9279749 NR Description: S-adenosyl-L-methionine:salicylic acid carboxyl
  misc_feature (41)..(390): Homolog of NCBI NO: 15225569 NR Description: S-adenosyl-L-methionine:carboxyl family; protein id: At2g14060.1 [Arabidopsis thaliana]
MDSRFTDSTTTLRCNGKSENERKNGDEERISKYSFVSPLCMRGGDGYNSYSSNSLLQRRVLSKAKPVLVKNTKDLMINLNFPTYIKVADLGCSSGQNTFLAMSEIINTINVFCQQRNQNPPEIDCCLNDLPSNDFNTTFKFIQFFNGMNITSKESYFVYGVPGSFYSRLFPRRSLHFVHSSYGLHWLSKVPEGLEKNKMSVYITNSSPLSTYKAYLNQFQRDFATFLKLRSEEMVSNGRMVLTFIGRNTIDNPLHRDCCHFWTLLSKSLRDLVAEGLVSASKVDSFYLPFYDPNEKEIKEMVQKEGSFEIRDLETHGYDLGHCNQDESKRSKSGQNEANYIRAVSEPLLAAHFGDAIINILFNKFACHVSQHVSCRNKTTVSIVVSLTKKKTFLMS

SEQ ID NO: 79713 - protein, 356 aa, Arabidopsis thaliana
  peptide (1)..(356): Ceres Seq. ID no. 12652748
  misc_feature (28)..(350): Pfam Name: SAM dependent carboxyl methyltransferase Pfam Description: SAM dependent carboxyl methyltransferase
  misc_feature (1)..(356): Homolog of NCBI NO: 15237695 NR Description: S-adenosyl-L-methionine:carboxyl
  misc_feature (1)..(350): Homolog of NCBI NO: 37904506 NR Description: methyl transferase [Arabidopsis lyrata subsp.
  misc_feature (1)..(350): Homolog of NCBI NO: 22330992 NR Description: S-adenosyl-L-methionine:carboxyl
  misc_feature (1)..(350): Homolog of NCBI NO: 15237696 NR Description: S-adenosyl-L-methionine:carboxyl
  misc_feature (1)..(350): Homolog of NCBI NO: 15239970 NR Description: S-adenosyl-L-methionine:carboxyl
  misc_feature (24)..(350): Homolog of NCBI NO: 12322908 NR Description: hypothetical protein; 58431-59672 [Arabidopsis
  misc_feature (1)..(350): Homolog of NCBI NO: 15240823 NR Description: S-adenosyl-L-methionine:carboxyl
  misc_feature (1)..(350): Homolog of NCBI NO: 8885604 NR Description: S-adenosyl-L-methionine:salicylic acid carboxyl
  misc_feature (1)..(350): Homolog of NCBI NO: 9279749 NR Description: S-adenosyl-L-methionine:salicylic acid carboxyl
  misc_feature (1)..(350): Homolog of NCBI NO: 15225569 NR Description: S-adenosyl-L-methionine:carboxyl family; protein id: At2g14060.1 [Arabidopsis thaliana]
MRGGDGYNSYSSNSLLQRRVLSKAKPVLVKNTKDLMINLNFPTYIKVADLGCSSGQNTFLAMSEIINTINVFCQQRNQNPPEIDCCLNDLPSNDFNTTFKFIQFFNGMNITSKESYFVYGVPGSFYSRLFPRRSLHFVHSSYGLHWLSKVPEGLEKNKMSVYITNSSPLSTYKAYLNQFQRDFATFLKLRSEEMVSNGRMVLTFIGRNTIDNPLHRDCCHFWTLLSKSLRDLVAEGLVSASKVDSFYLPFYDPNEKEIKEMVQKEGSFEIRDLETHGYDLGHCNQDESKRSKSGQNEANYIRAVSEPLLAAHFGDAIINILFNKFACHVSQHVSCRNKTTVSIVVSLTKKKTFLMS

SEQ ID NO: 79714 - protein, 321 aa, Arabidopsis thaliana
  peptide (1)..(321): Ceres Seq. ID no. 12652749
  misc_feature (1)..(315): Pfam Name: SAM dependent carboxyl methyltransferase Pfam Description: SAM dependent carboxyl methyltransferase
  misc_feature (1)..(321): Homolog of NCBI NO: 15237695 NR Description: S-adenosyl-L-methionine:carboxyl
  misc_feature (1)..(315): Homolog of NCBI NO: 37904506 NR Description: methyl transferase [Arabidopsis lyrata subsp.
  misc_feature (1)..(315): Homolog of NCBI NO: 22330992 NR Description: S-adenosyl-L-methionine:carboxyl
  misc_feature (1)..(315): Homolog of NCBI NO: 15237696 NR Description: S-adenosyl-L-methionine:carboxyl
  misc_feature (1)..(315): Homolog of NCBI NO: 15239970 NR Description: S-adenosyl-L-methionine:carboxyl
  misc_feature (1)..(315): Homolog of NCBI NO: 12322908 NR Description: hypothetical protein; 58431-59672 [Arabidopsis
  misc_feature (1)..(315): Homolog of NCBI NO: 15240823 NR Description: S-adenosyl-L-methionine:carboxyl
  misc_feature (1)..(315): Homolog of NCBI NO: 8885604 NR Description: S-adenosyl-L-methionine:salicylic acid carboxyl
  misc_feature (1)..(315): Homolog of NCBI NO: 9279749 NR Description: S-adenosyl-L-methionine:salicylic acid carboxyl
  misc_feature (1)..(315): Homolog of NCBI NO: 15225569 NR Description: S-adenosyl-L-methionine:carboxyl family; protein id: At2g14060.1 [Arabidopsis thaliana]
MINLNFPTYIKVADLGCSSGQNTFLAMSEIINTINVFCQQRNQNPPEIDCCLNDLPSNDFNTTFKFIQFFNGMNITSKESYFVYGVPGSFYSRLFPRRSLHFVHSSYGLHWLSKVPEGLEKNKMSVYITNSSPLSTYKAYLNQFQRDFATFLKLRSEEMVSNGRMVLTFIGRNTIDNPLHRDCCHFWTLLSKSLRDLVAEGLVSASKVDSFYLPFYDPNEKEIKEMVQKEGSFEIRDLETHGYDLGHCNQDESKRSKSGQNEANYIRAVSEPLLAAHFGDAIINILFNKFACHVSQHVSCRNKTTVSIVVSLTKKKTFLMS

SEQ ID NO: 79715 - DNA, 1158 bp, Arabidopsis thaliana
  misc_feature (1)..(1158): Ceres Seq. ID no. 12652750
  misc_feature: MA Experiment ID: 20000352 Result: Up-regulated in Transcription
  misc_feature: MA Experiment 20000352 PARAMETER Experiment Name: At_Drought_Sub_P Parameter: Age (day) Value: 7
  misc_feature: MA Experiment 20000352 PARAMETER Experiment Name: At_Drought_Sub_P Parameter: Organism Value: A. thaliana
  misc_feature: MA Experiment 20000352 PARAMETER Experiment Name: At_Drought_Sub_P Parameter: Plant Line Value: WS
  misc_feature: MA Experiment 20000352 PARAMETER Experiment Name: At_Drought_Sub_P Parameter: Timepoint (hr) Value: 6
  misc_feature: MA Experiment 20000352 PARAMETER Experiment Name: At_Drought_Sub_P Parameter: Tissue Value: Whole Plant
  misc_feature: MA Experiment 20000352 PARAMETER Experiment Name: At_Drought_Sub_P Parameter: Treatment Value: Drought vs. No Drought
atgtctctgtgtttaatattatgcaggtgtgattgtaaaagtgagtataaagtggatgaagagagaagtagtaaatatccttttgtgggtgctctatgtatgaatggtggagatgtagacaacagttacaccaccaagtctcttcttcagaaaagagttttatcaataaccaatccgatcttagttaaaaacacagaggaaatgttgacaaacttggactttcctaaatgcattaaggtagccgatttaggttgttcttcaggacaaaacacgtttttggccatgtctgagatcgtcaacacaatcaatgtattgtgtcaaaaatggaaccaaagccggccggagatagattgttgtttgaatgatctccctactaacgatttcaacacaacgttcaagttcataactttcttcaacaagaaactcacaagcaacggatcgtgcttcgtctctggagtccctggttccttttactcgaggctcttccctcgcaagagtctccatttcatatattcaatttacagtattcatttcctctctaaggttcccgatggattggagaagaacaagatgagtgtgtacataacaagttcaagtcctctaagtgaatacaaggcttacttgaatcaattcaaaagagattttacaacatttctaagaatgcgttctgaagagatggtacataatggacgtatggttctcacactaatcggcagaaacactctagataatccattgtatagggattgttgtcattgttggacattgttatccaattctctccgtgacttagtcttcgagggtcttttgagtgcgtcaaaggtatattcgttcaaaatgccattttatgatccgaatgaggaagaagtgaaggagattataagaaatgagggatccttccaaataaatgacttggagatgcatgaatttgatctcggccatagtaaggagaaatgtagcttacaatcacacaaagctaaagcagggcaaaaagaagctagttgtatacgagcggtgactgaaacaatgctcgtagctcactttggagatgacattatcgatgcattgtttcacaagtatgcacatcatgtgtctcagcatgctagctgcagggtaaaaacgagtgtaactctaatagtttcactggttcggaaataa

SEQ ID NO: 79716 - protein, 385 aa, Arabidopsis thaliana
  peptide (1)..(385): Ceres Seq. ID no. 12652751
  misc_feature (61)..(385): Pfam Name: SAM dependent carboxyl methyltransferase Pfam Description: SAM dependent carboxyl methyltransferase
  misc_feature (1)..(385): Homolog of NCBI NO: 15237696 NR Description: S-adenosyl-L-methionine:carboxyl
  misc_feature (9)..(385): Homolog of NCBI NO: 15237695 NR Description: S-adenosyl-L-methionine:carboxyl
  misc_feature (34)..(385): Homolog of NCBI NO: 15239970 NR Description: S-adenosyl-L-methionine:carboxyl
  misc_feature (19)..(385): Homolog of NCBI NO: 37904506 NR Description: methyl transferase [Arabidopsis lyrata subsp.
  misc_feature (19)..(385): Homolog of NCBI NO: 22330992 NR Description: S-adenosyl-L-methionine:carboxyl
  misc_feature (56)..(385): Homolog of NCBI NO: 12322908 NR Description: hypothetical protein; 58431-59672 [Arabidopsis
  misc_feature (29)..(385): Homolog of NCBI NO: 9279749 NR Description: S-adenosyl-L-methionine:salicylic acid carboxyl
  misc_feature (29)..(385): Homolog of NCBI NO: 15240823 NR Description: S-adenosyl-L-methionine:carboxyl
  misc_feature (34)..(385): Homolog of NCBI NO: 8885604 NR Description: S-adenosyl-L-methionine:salicylic acid carboxyl
  misc_feature (34)..(385): Homolog of NCBI NO: 15225569 NR Description: S-adenosyl-L-methionine:carboxyl family; protein id: At2g14060.1 [Arabidopsis thaliana]
MSLCLILCRCDCKSEYKVDEERSSKYPFVGALCMNGGDVDNSYTTKSLLQKRVLSITNPILVKNTEEMLTNLDFPKCIKVADLGCSSGQNTFLAMSEIVNTINVLCQKWNQSRPEIDCCLNDLPTNDFNTTFKFITFFNKKLTSNGSCFVSGVPGSFYSRLFPRKSLHFIYSIYSIHFLSKVPDGLEKNKMSVYITSSSPLSEYKAYLNQFKRDFTTFLRMRSEEMVHNGRMVLTLIGRNTLDNPLYRDCCHCWTLLSNSLRDLVFEGLLSASKVYSFKMPFYDPNEEEVKEIIRNEGSFQINDLEMHEFDLGHSKEKCSLQSHKAKAGQKEASCIRAVTETMLVAHFGDDIIDALFHKYAHHVSQHASCRVKTSVTLIVSLVRK

SEQ ID NO: 79717 - protein, 352 aa, Arabidopsis thaliana
  peptide (1)..(352): Ceres Seq. ID no. 12652752
  misc_feature (28)..(352): Pfam Name: SAM dependent carboxyl methyltransferase Pfam Description: SAM dependent carboxyl methyltransferase
  misc_feature (1)..(352): Homolog of NCBI NO: 15237696 NR Description: S-adenosyl-L-methionine:carboxyl
  misc_feature (1)..(352): Homolog of NCBI NO: 15237695 NR Description: S-adenosyl-L-methionine:carboxyl
  misc_feature (1)..(352): Homolog of NCBI NO: 15239970 NR Description: S-adenosyl-L-methionine:carboxyl
  misc_feature (1)..(352): Homolog of NCBI NO: 37904506 NR Description: methyl transferase [Arabidopsis lyrata subsp.
  misc_feature (1)..(352): Homolog of NCBI NO: 22330992 NR Description: S-adenosyl-L-methionine:carboxyl
  misc_feature (23)..(352): Homolog of NCBI NO: 12322908 NR Description: hypothetical protein; 58431-59672 [Arabidopsis
  misc_feature (1)..(352): Homolog of NCBI NO: 9279749 NR Description: S-adenosyl-L-methionine:salicylic acid carboxyl
  misc_feature (1)..(352): Homolog of NCBI NO: 15240823 NR Description: S-adenosyl-L-methionine:carboxyl
  misc_feature (1)..(352): Homolog of NCBI NO: 8885604 NR Description: S-adenosyl-L-methionine:salicylic acid carboxyl
  misc_feature (1)..(352): Homolog of NCBI NO: 15225569 NR Description: S-adenosyl-L-methionine:carboxyl family; protein id: At2g14060.1 [Arabidopsis thaliana]
MNGGDVDNSYTTKSLLQKRVLSITNPILVKNTEEMLTNLDFPKCIKVADLGCSSGQNTFLAMSEIVNTINVLCQKWNQSRPEIDCCLNDLPTNDFNTTFKFITFFNKKLTSNGSCFVSGVPGSFYSRLFPRKSLHFIYSIYSIHFLSKVPDGLEKNKMSVYITSSSPLSEYKAYLNQFKRDFTTFLRMRSEEMVHNGRMVLTLIGRNTLDNPLYRDCCHCWTLLSNSLRDLVFEGLLSASKVYSFKMPFYDPNEEEVKEIIRNEGSFQINDLEMHEFDLGHSKEKCSLQSHKAKAGQKEASCIRAVTETMLVAHFGDDIIDALFHKYAHHVSQHASCRVKTSVTLIVSLVRK

SEQ ID NO: 79718 - protein, 318 aa, Arabidopsis thaliana
  peptide (1)..(318): Ceres Seq. ID no. 12652753
  misc_feature (1)..(318): Pfam Name: SAM dependent carboxyl methyltransferase Pfam Description: SAM dependent carboxyl methyltransferase
  misc_feature (1)..(318): Homolog of NCBI NO: 15237696 NR Description: S-adenosyl-L-methionine:carboxyl
  misc_feature (1)..(318): Homolog of NCBI NO: 15237695 NR Description: S-adenosyl-L-methionine:carboxyl
  misc_feature (1)..(318): Homolog of NCBI NO: 15239970 NR Description: S-adenosyl-L-methionine:carboxyl
  misc_feature (1)..(318): Homolog of NCBI NO: 37904506 NR Description: methyl transferase [Arabidopsis lyrata subsp.
  misc_feature (1)..(318): Homolog of NCBI NO: 22330992 NR Description: S-adenosyl-L-methionine:carboxyl
  misc_feature (1)..(318): Homolog of NCBI NO: 12322908 NR Description: hypothetical protein; 58431-59672 [Arabidopsis
  misc_feature (1)..(318): Homolog of NCBI NO: 9279749 NR Description: S-adenosyl-L-methionine:salicylic acid carboxyl
  misc_feature (1)..(318): Homolog of NCBI NO: 15240823 NR Description: S-adenosyl-L-methionine:carboxyl
  misc_feature (1)..(318): Homolog of NCBI NO: 8885604 NR Description: S-adenosyl-L-methionine:salicylic acid carboxyl
  misc_feature (1)..(318): Homolog of NCBI NO: 15225569 NR Description: S-adenosyl-L-methionine:carboxyl family; protein id: At2g14060.1 [Arabidopsis thaliana]
MLTNLDFPKCIKVADLGCSSGQNTFLAMSEIVNTINVLCQKWNQSRPEIDCCLNDLPTNDFNTTFKFITFFNKKLTSNGSCFVSGVPGSFYSRLFPRKSLHFIYSIYSIHFLSKVPDGLEKNKMSVYITSSSPLSEYKAYLNQFKRDFTTFLRMRSEEMVHNGRMVLTLIGRNTLDNPLYRDCCHCWTLLSNSLRDLVFEGLLSASKVYSFKMPFYDPNEEEVKEIIRNEGSFQINDLEMHEFDLGHSKEKCSLQSHKAKAGQKEASCIRAVTETMLVAHFGDDIIDALFHKYAHHVSQHASCRVKTSVTLIVSLVRK

SEQ ID NO: 79719 - DNA, 915 bp, Arabidopsis thaliana
  misc_feature (1)..(915): Ceres Seq. ID no. 12652776
  misc_feature: MA Experiment ID: 20000269 Result: Down-regulated in Transcription
  misc_feature: MA Experiment 20000269 PARAMETER Experiment Name: At_1mM_KNO3_L-vs-H_Roots_P Parameter: Age (day) Value: 7,10,12
  misc_feature: MA Experiment 20000269 PARAMETER Experiment Name: At_1mM_KNO3_L-vs-H_Roots_P Parameter: Organism Value: A. thaliana
  misc_feature: MA Experiment 20000269 PARAMETER Experiment Name: At_1mM_KNO3_L-vs-H_Roots_P Parameter: Plant Line Value: WS
  misc_feature: MA Experiment 20000269 PARAMETER Experiment Name: At_1mM_KNO3_L-vs-H_Roots_P Parameter: Timepoint (day) Value: 7,10,12
  misc_feature: MA Experiment 20000269 PARAMETER Experiment Name: At_1mM_KNO3_L-vs-H_Roots_P Parameter: Tissue Value: Roots
  misc_feature: MA Experiment 20000269 PARAMETER Experiment Name: At_1mM_KNO3_L-vs-H_Roots_P Parameter: Treatment Value: 1mM KNO3 vs. 50mM KNO3
atgaactcaatagtgggagaggtccaagaagctcaatacatttttccacactctttcacgaccaacaatgatccctcttatgatgatttgatcgaaatgaaaccaccaaagatccttgagacaacttacatatcaccttcttctcatcttcctccaaattcaaagccccatcatattcaccgtcattcttcctcaagaattctctctttcgaagattatggttcaaatgatatggaacacgagtactctcccacctacctaaactcaatctttagcccaaaattagaggctcaagtgcaaccacaccagaagagtgatgagtttaatcgaaaagggaccaagagggctcaaccgttttcaagaaaccaatccaatgctcaggatcacataatagccgaaagaaaacgtagagagaagcttactcaaagattcgtagctctttccgctctagttcctggccttaaaaagatggacaaggcttctgtgttgggagatgcattaaagcatataaagtatctccaagaaagagtgggagagttggaggaacagaagaaagaaagaagattggaatcaatggttcttgtgaagaagtctaagctgatcttggacgataataatcaatcattctcttcttcttgtgaagatggcttctcggacttggatcttcccgagatcgaggtaagattctcggatgaagatgttctaatcaagatcctttgcgagaagcaaaagggtcatcttgccaagattatggccgagattgagaaacttcatatcttgataactaattcaagtgtattgaattttggaccaactcttgatatcaccattatagctaagaaggagagtgatttcgacatgacactcatggatgttgtaaagagcttaaggtctgctttgtcgaatttcatatga

SEQ ID NO: 79720 - protein, 304 aa, Arabidopsis thaliana
  peptide (1)..(304): Ceres Seq. ID no. 12652777
  misc_feature (125)..(174): Pfam Name: Helix-loop-helix DNA-binding domain Pfam Description: Helix-loop-helix DNA-binding domain
  misc_feature (1)..(304): Homolog of NCBI NO: 20127022 NR Description: putative bHLH transcription factor [Arabidopsis
  misc_feature (1)..(304): Homolog of NCBI NO: 30691602 NR Description: bHLH protein family [Arabidopsis thaliana]
  misc_feature (1)..(296): Homolog of NCBI NO: 7487499 NR Description: hypothetical protein T28I19.130 - Arabidopsis >gi|4490730|emb|CAB38933.1| putative protein [Arabidopsis >gi|7270768|emb|CAB80450.1| putative protein [Arabidopsis
  misc_feature (1)..(301): Homolog of NCBI NO: 30681807 NR Description: bHLH protein family [Arabidopsis thaliana]
  misc_feature (1)..(280): Homolog of NCBI NO: 25412135 NR Description: probable bHLH transcription factor [imported] - thaliana >gi|3738089|gb|AAC63586.1| putative bHLH transcription [Arabidopsis thaliana] >gi|20197757|gb|AAM15234.1| putative bHLH
MNSIVGEVQEAQYIFPHSFTTNNDPSYDDLIEMKPPKILETTYISPSSHLPPNSKPHHIHRHSSSRILSFEDYGSNDMEHEYSPTYLNSIFSPKLEAQVQPHQKSDEFNRKGTKRAQPFSRNQSNAQDHIIAERKRREKLTQRFVALSALVPGLKKMDKASVLGDALKHIKYLQERVGELEEQKKERRLESMVLVKKSKLILDDNNQSFSSSCEDGFSDLDLPEIEVRFSDEDVLIKILCEKQKGHLAKIMAEIEKLHILITNSSVLNFGPTLDITIIAKKESDFDMTLMDVVKSLRSALSNFI

SEQ ID NO: 79721 - protein, 272 aa, Arabidopsis thaliana
  peptide (1)..(272): Ceres Seq. ID no. 12652778
  misc_feature (93)..(142): Pfam Name: Helix-loop-helix DNA-binding domain Pfam Description: Helix-loop-helix DNA-binding domain
  misc_feature (1)..(272): Homolog of NCBI NO: 20127022 NR Description: putative bHLH transcription factor [Arabidopsis
  misc_feature (1)..(272): Homolog of NCBI NO: 30691602 NR Description: bHLH protein family [Arabidopsis thaliana]
  misc_feature (1)..(264): Homolog of NCBI NO: 7487499 NR Description: hypothetical protein T28I19.130 - Arabidopsis >gi|4490730|emb|CAB38933.1| putative protein [Arabidopsis >gi|7270768|emb|CAB80450.1| putative protein [Arabidopsis
  misc_feature (1)..(269): Homolog of NCBI NO: 30681807 NR Description: bHLH protein family [Arabidopsis thaliana]
  misc_feature (1)..(248): Homolog of NCBI NO: 25412135 NR Description: probable bHLH transcription factor [imported] - thaliana >gi|3738089|gb|AAC63586.1| putative bHLH transcription [Arabidopsis thaliana] >gi|20197757|gb|AAM15234.1| putative bHLH
MKPPKILETTYISPSSHLPPNSKPHHIHRHSSSRILSFEDYGSNDMEHEYSPTYLNSIFSPKLEAQVQPHQKSDEFNRKGTKRAQPFSRNQSNAQDHIIAERKRREKLTQRFVALSALVPGLKKMDKASVLGDALKHIKYLQERVGELEEQKKERRLESMVLVKKSKLILDDNNQSFSSSCEDGFSDLDLPEIEVRFSDEDVLIKILCEKQKGHLAKIMAEIEKLHILITNSSVLNFGPTLDITIIAKKESDFDMTLMDVVKSLRSALSNFI

SEQ ID NO: 79722 - protein, 227 aa, Arabidopsis thaliana
  peptide (1)..(227): Ceres Seq. ID no. 12652779
  misc_feature (48)..(97): Pfam Name: Helix-loop-helix DNA-binding domain Pfam Description: Helix-loop-helix DNA-binding domain
  misc_feature (1)..(227): Homolog of NCBI NO: 20127022 NR Description: putative bHLH transcription factor [Arabidopsis
  misc_feature (1)..(227): Homolog of NCBI NO: 30691602 NR Description: bHLH protein family [Arabidopsis thaliana]
  misc_feature (1)..(219): Homolog of NCBI NO: 7487499 NR Description: hypothetical protein T28I19.130 - Arabidopsis >gi|4490730|emb|CAB38933.1| putative protein [Arabidopsis >gi|7270768|emb|CAB80450.1| putative protein [Arabidopsis
  misc_feature (1)..(224): Homolog of NCBI NO: 30681807 NR Description: bHLH protein family [Arabidopsis thaliana]
  misc_feature (1)..(203): Homolog of NCBI NO: 25412135 NR Description: probable bHLH transcription factor [imported] - thaliana >gi|3738089|gb|AAC63586.1| putative bHLH transcription [Arabidopsis thaliana] >gi|20197757|gb|AAM15234.1| putative bHLH
MEHEYSPTYLNSIFSPKLEAQVQPHQKSDEFNRKGTKRAQPFSRNQSNAQDHIIAERKRREKLTQRFVALSALVPGLKKMDKASVLGDALKHIKYLQERVGELEEQKKERRLESMVLVKKSKLILDDNNQSFSSSCEDGFSDLDLPEIEVRFSDEDVLIKILCEKQKGHLAKIMAEIEKLHILITNSSVLNFGPTLDITIIAKKESDFDMTLMDVVKSLRSALSNFI

SEQ ID NO: 79723 - DNA, 1461 bp, Arabidopsis thaliana
  misc_feature (1)..(1461): Ceres Seq. ID no. 12652838
  misc_feature: MA Experiment ID: 20001451 Result: Up-regulated in Transcription
  misc_feature: MA Experiment 20001451 PARAMETER Experiment Name: At_Far-red-induction_P Parameter: Age (day) Value: 7
  misc_feature: MA Experiment 20001451 PARAMETER Experiment Name: At_Far-red-induction_P Parameter: Light Value: Far-red vs. White
  misc_feature: MA Experiment 20001451 PARAMETER Experiment Name: At_Far-red-induction_P Parameter: Organism Value: A. thaliana
  misc_feature: MA Experiment 20001451 PARAMETER Experiment Name: At_Far-red-induction_P Parameter: Plant Line Value: Columbia
  misc_feature: MA Experiment 20001451 PARAMETER Experiment Name: At_Far-red-induction_P Parameter: Timepoint (hr) Value: 24
  misc_feature: MA Experiment 20001451 PARAMETER Experiment Name: At_Far-red-induction_P Parameter: Tissue Value: Whole Plant
atgcaggtgggagaggagatggcgtcactcacaaaaatagcttgcccgattgtgatgacatcactcctcatattctcaagatcaataatctcaatgtggttcttgagtcatctcggaaaagtcgaactcgctggtggtgcactcgctatgggctttggaaacatcactggagtctccgtacttaaaggcctttccgttggtatggacccaatctgtggccaagccttcggagccaaacgttggaccgtacttagccacacgtttcagaaaatgttctgtctcttaattgtcgtctctgttccaatcgccgttacgtggctcaacatcgaacccattttcctacggttgggtcaggacccagatattaccaaggtagccaaaacctatatgctcttcttcgtccctgagctcttggctcaggccatgctccatccgcttcgaacgttccttagaacgcaaggcttaacatcaccgctcacgatatctgccattgtatccattcttcttcatcctctcttcaactacgtctttgtcgtgcgtatgcgtttaggcgttaagggtgtggccatcgcaatggctttcaacactatgaatatcgacgtgggactgctcgtttatacgtgcttctcggattctctaatcaaaccgtgggaagggctcgctttgcggtcacttttccgcggctggtggccgctgctttctctagccgcaccaagcgctatctcggtgtgtttggagtattggtggtatgagatcatgctttttctttgtgggcttcttgggaaccctaaagcaagcgtggccgccatgggaatattgattcagaccaccgggatactatacgtagtcccgtttgctattagcagcgccattgcaacccgtgtaggtcacgctcttggaggcggccaaccaacacgggcacaatgtacgaccgtgattggcttgatactcgcggtagcgtacggtttagcagctgctgtttttgtgaccgcgcttaggtcggtttggggaaagatgttcacggacgaaccggagattctcgggcttatttcggctgcgcttccgatcttggggctttgcgagattggaaactcgccacagacggctgcttgcggagtcttgactgggacggctaggcctaaagatggagcacgcgttaacctatgcgcattctacattgtgggcttgcctgtggcagttacgaccacgtttgggtttaaggttgggtttcgtgggctatggtttggactgttatctgcgcagatgacgtgtttggtaatgatgctttatacgttaatccgtacggactggtctcatcaagtgaagcgggcagaggaacttacctccgctgcagccgacaaaagccattcggaagacgaaaccgtccatgctgaagtacaagacgatgatgatgtgagtagcaatgatctggagattggtttactacaaaatacgaattga

SEQ ID NO: 79724 - protein, 486 aa, Arabidopsis thaliana
  peptide (1)..(486): Ceres Seq. ID no. 12652839
  misc_feature (1)..(486): Homolog of NCBI NO: 15224891 NR Description: hypothetical protein; protein id: At2g38510.1
  misc_feature (5)..(455): Homolog of NCBI NO: 18406257 NR Description: expressed protein; protein id: At1g58340.1, by cDNA: gi_6520160 [Arabidopsis thaliana]
  misc_feature (6)..(476): Homolog of NCBI NO: 38567909 NR Description: OSJNBa0088I22.5 [Oryza sativa (japonica
  misc_feature (5)..(475): Homolog of NCBI NO: 15235905 NR Description: putative protein; protein id: At4g23030.1
  misc_feature (6)..(478): Homolog of NCBI NO: 15233459 NR Description: putative protein; protein id: At4g29140.1
  misc_feature (2)..(455): Homolog of NCBI NO: 20532318 NR Description: Putative membrane protein [Oryza sativa (japonica group)] >gi|27356666|gb|AAO06955.1| Putative membrane protein
  misc_feature (4)..(460): Homolog of NCBI NO: 37536202 NR Description: putative membrane protein [Oryza sativa (japonica group)] >gi|27311284|gb|AAO00710.1| putative membrane protein
  misc_feature (2)..(448): Homolog of NCBI NO: 15241158 NR Description: putative protein; protein id: At5g19700.1
  misc_feature (6)..(460): Homolog of NCBI NO: 15242265 NR Description: integral membrane protein-like; protein id:
  misc_feature (6)..(460): Homolog of NCBI NO: 39104576 NR Description: putative integral membrane protein [Arabidopsis
MQVGEEMASLTKIACPIVMTSLLIFSRSIISMWFLSHLGKVELAGGALAMGFGNITGVSVLKGLSVGMDPICGQAFGAKRWTVLSHTFQKMFCLLIVVSVPIAVTWLNIEPIFLRLGQDPDITKVAKTYMLFFVPELLAQAMLHPLRTFLRTQGLTSPLTISAIVSILLHPLFNYVFVVRMRLGVKGVAIAMAFNTMNIDVGLLVYTCFSDSLIKPWEGLALRSLFRGWWPLLSLAAPSAISVCLEYWWYEIMLFLCGLLGNPKASVAAMGILIQTTGILYVVPFAISSAIATRVGHALGGGQPTRAQCTTVIGLILAVAYGLAAAVFVTALRSVWGKMFTDEPEILGLISAALPILGLCEIGNSPQTAACGVLTGTARPKDGARVNLCAFYIVGLPVAVTTTFGFKVGFRGLWFGLLSAQMTCLVMMLYTLIRTDWSHQVKRAEELTSAAADKSHSEDETVHAEVQDDDDVSSNDLEIGLLQNTN

SEQ ID NO: 79725 - protein, 480 aa, Arabidopsis thaliana
  peptide (1)..(480): Ceres Seq. ID no. 12652840
  misc_feature (1)..(480): Homolog of NCBI NO: 15224891 NR Description: hypothetical protein; protein id: At2g38510.1
  misc_feature (1)..(449): Homolog of NCBI NO: 18406257 NR Description: expressed protein; protein id: At1g58340.1, by cDNA: gi_6520160 [Arabidopsis thaliana]
  misc_feature (1)..(470): Homolog of NCBI NO: 38567909 NR Description: OSJNBa0088I22.5 [Oryza sativa (japonica
  misc_feature (1)..(469): Homolog of NCBI NO: 15235905 NR Description: putative protein; protein id: At4g23030.1
  misc_feature (1)..(472): Homolog of NCBI NO: 15233459 NR Description: putative protein; protein id: At4g29140.1
  misc_feature (1)..(449): Homolog of NCBI NO: 20532318 NR Description: Putative membrane protein [Oryza sativa (japonica group)] >gi|27356666|gb|AAO06955.1| Putative membrane protein
  misc_feature (1)..(454): Homolog of NCBI NO: 37536202 NR Description: putative membrane protein [Oryza sativa (japonica group)] >gi|27311284|gb|AAO00710.1| putative membrane protein
  misc_feature (1)..(442): Homolog of NCBI NO: 15241158 NR Description: putative protein; protein id: At5g19700.1
  misc_feature (1)..(454): Homolog of NCBI NO: 15242265 NR Description: integral membrane protein-like; protein id:
  misc_feature (1)..(454): Homolog of NCBI NO: 39104576 NR Description: putative integral membrane protein [Arabidopsis
MASLTKIACPIVMTSLLIFSRSIISMWFLSHLGKVELAGGALAMGFGNITGVSVLKGLSVGMDPICGQAFGAKRWTVLSHTFQKMFCLLIVVSVPIAVTWLNIEPIFLRLGQDPDITKVAKTYMLFFVPELLAQAMLHPLRTFLRTQGLTSPLTISAIVSILLHPLFNYVFVVRMRLGVKGVAIAMAFNTMNIDVGLLVYTCFSDSLIKPWEGLALRSLFRGWWPLLSLAAPSAISVCLEYWWYEIMLFLCGLLGNPKASVAAMGILIQTTGILYVVPFAISSAIATRVGHALGGGQPTRAQCTTVIGLILAVAYGLAAAVFVTALRSVWGKMFTDEPEILGLISAALPILGLCEIGNSPQTAACGVLTGTARPKDGARVNLCAFYIVGLPVAVTTTFGFKVGFRGLWFGLLSAQMTCLVMMLYTLIRTDWSHQVKRAEELTSAAADKSHSEDETVHAEVQDDDDVSSNDLEIGLLQNTN

SEQ ID NO: 79726 - protein, 468 aa, Arabidopsis thaliana
  peptide (1)..(468): Ceres Seq. ID no. 12652841
  misc_feature (1)..(468): Homolog of NCBI NO: 15224891 NR Description: hypothetical protein; protein id: At2g38510.1
  misc_feature (1)..(437): Homolog of NCBI NO: 18406257 NR Description: expressed protein; protein id: At1g58340.1, by cDNA: gi_6520160 [Arabidopsis thaliana]
  misc_feature (1)..(458): Homolog of NCBI NO: 38567909 NR Description: OSJNBa0088I22.5 [Oryza sativa (japonica
  misc_feature (1)..(457): Homolog of NCBI NO: 15235905 NR Description: putative protein; protein id: At4g23030.1
  misc_feature (1)..(460): Homolog of NCBI NO: 15233459 NR Description: putative protein; protein id: At4g29140.1
  misc_feature (1)..(437): Homolog of NCBI NO: 20532318 NR Description: Putative membrane protein [Oryza sativa (japonica group)] >gi|27356666|gb|AAO06955.1| Putative membrane protein
  misc_feature (1)..(442): Homolog of NCBI NO: 37536202 NR Description: putative membrane protein [Oryza sativa (japonica group)] >gi|27311284|gb|AAO00710.1| putative membrane protein
  misc_feature (1)..(430): Homolog of NCBI NO: 15241158 NR Description: putative protein; protein id: At5g19700.1
  misc_feature (1)..(442): Homolog of NCBI NO: 15242265 NR Description: integral membrane protein-like; protein id:
  misc_feature (1)..(442): Homolog of NCBI NO: 39104576 NR Description: putative integral membrane protein [Arabidopsis
MTSLLIFSRSIISMWFLSHLGKVELAGGALAMGFGNITGVSVLKGLSVGMDPICGQAFGAKRWTVLSHTFQKMFCLLIVVSVPIAVTWLNIEPIFLRLGQDPDITKVAKTYMLFFVPELLAQAMLHPLRTFLRTQGLTSPLTISAIVSILLHPLFNYVFVVRMRLGVKGVAIAMAFNTMNIDVGLLVYTCFSDSLIKPWEGLALRSLFRGWWPLLSLAAPSAISVCLEYWWYEIMLFLCGLLGNPKASVAAMGILIQTTGILYVVPFAISSAIATRVGHALGGGQPTRAQCTTVIGLILAVAYGLAAAVFVTALRSVWGKMFTDEPEILGLISAALPILGLCEIGNSPQTAACGVLTGTARPKDGARVNLCAFYIVGLPVAVTTTFGFKVGFRGLWFGLLSAQMTCLVMMLYTLIRTDWSHQVKRAEELTSAAADKSHSEDETVHAEVQDDDDVSSNDLEIGLLQNTN

SEQ ID NO: 79727 - DNA, 756 bp, Arabidopsis thaliana
  misc_feature (1)..(756): Ceres Seq. ID no. 12652856
  misc_feature: MA Experiment ID: 20000184 Result: Down-regulated in Transcription
  misc_feature: MA Experiment 20000184 PARAMETER Experiment Name: At_Shoots__P Parameter: Age (day) Value: 7
  misc_feature: MA Experiment 20000184 PARAMETER Experiment Name: At_Shoots__P Parameter: Tissue Value: Shoots vs. Whole Plant
  misc_feature: MA Experiment ID: 20000264 Result: Down-regulated in Transcription
  misc_feature: MA Experiment 20000264 PARAMETER Experiment Name: At_Open_Flower_P Parameter: Age (day) Value: 21
  misc_feature: MA Experiment 20000264 PARAMETER Experiment Name: At_Open_Flower_P Parameter: Plant Line Value: WS
  misc_feature: MA Experiment 20000264 PARAMETER Experiment Name: At_Open_Flower_P Parameter: Tissue Value: Open Flower vs. Whole Plant
  misc_feature: MA Experiment ID: 20000269 Result: Up-regulated in Transcription
  misc_feature: MA Experiment 20000269 PARAMETER Experiment Name: At_1mM_KNO3_L-vs-H_Roots_P Parameter: Age (day) Value: 7,10,12
  misc_feature: MA Experiment 20000269 PARAMETER Experiment Name: At_1mM_KNO3_L-vs-H_Roots_P Parameter: Organism Value: A. thaliana
  misc_feature: MA Experiment 20000269 PARAMETER Experiment Name: At_1mM_KNO3_L-vs-H_Roots_P Parameter: Plant Line Value: WS
  misc_feature: MA Experiment 20000269 PARAMETER Experiment Name: At_1mM_KNO3_L-vs-H_Roots_P Parameter: Timepoint (day) Value: 7,10,12
  misc_feature: MA Experiment 20000269 PARAMETER Experiment Name: At_1mM_KNO3_L-vs-H_Roots_P Parameter: Tissue Value: Roots
  misc_feature: MA Experiment 20000269 PARAMETER Experiment Name: At_1mM_KNO3_L-vs-H_Roots_P Parameter: Treatment Value: 1mM KNO3 vs. 50mM KNO3
  misc_feature: MA Experiment ID: 20000286 Result: Down-regulated in Transcription
  misc_feature: MA Experiment 20000286 PARAMETER Experiment Name: At_Open_Flower_P Parameter: Age (day) Value: 21
  misc_feature: MA Experiment 20000286 PARAMETER Experiment Name: At_Open_Flower_P Parameter: Plant Line Value: WS
  misc_feature: MA Experiment 20000286 PARAMETER Experiment Name: At_Open_Flower_P Parameter: Tissue Value: Half Open vs. Whole Plant
  misc_feature: MA Experiment ID: 20000437 Result: Up-regulated in Transcription
  misc_feature: MA Experiment 20000437 PARAMETER Experiment Name: At_Drought_P Parameter: Age (day) Value: 8
  misc_feature: MA Experiment 20000437 PARAMETER Experiment Name: At_Drought_P Parameter: Organism Value: A. thaliana
  misc_feature: MA Experiment 20000437 PARAMETER Experiment Name: At_Drought_P Parameter: Plant Line Value: WS
  misc_feature: MA Experiment 20000437 PARAMETER Experiment Name: At_Drought_P Parameter: Timepoint (hr) Value: 24
  misc_feature: MA Experiment 20000437 PARAMETER Experiment Name: At_Drought_P Parameter: Tissue Value: Whole Plant
  misc_feature: MA Experiment 20000437 PARAMETER Experiment Name: At_Drought_P Parameter: Treatment Value: Drought vs. No Drought
  misc_feature: MA Experiment ID: 20000794 Result: Down-regulated in Transcription
  misc_feature: MA Experiment 20000794 PARAMETER Experiment Name: At_Petals_P Parameter: Age (day) Value: 23-25 days
  misc_feature: MA Experiment 20000794 PARAMETER Experiment Name: At_Petals_P Parameter: Plant Line Value: WS
  misc_feature: MA Experiment 20000794 PARAMETER Experiment Name: At_Petals_P Parameter: Tissue Value: Petals vs. Whole plant
atggaaaagtgtagtagagagacgttgcttttcatttttataacaatatcatcagtggcaaccagtacaagtacatggatgccgatggatggaaattatggtgctagctattgcttaagctggagactagcagtagagaccaacaatgtacgtgcgtggcgcattgttcctctgcagtgtctgcgttacgttgaggtatatatgcttgctggtcagtatgacagagacgtccagttgactgtggaccaaatcaaagtttatctcaatgagattatccttcctggtgatggcatggacgcatggatcttggatgttgatgatacttgcttctcaaacgtcttttactatcggcttaagagatatggatgtgacccttatgatccaactggatttagaacatgggcgatgaaaggagagtctccagcaatacaacctgttcttgaattgttctataaactgatagaaacaggcttcaaagttttcctagtaaccggaagagacgaagagacccttcgccaggcaacactagagaatttgcataaccaaggattcactggttatgaaaggctgattatgaggacagcggataacaaaagacaaagcgcaacaacatacaaaacaagaatcagaaaggagatgatggaagaaggttacaggatatggggaaatgtaggcgaccaatggagtgacttacaaggagaatattcaggggatcgtaccttcaagattcctaatcctatgtacttcgttccctaa

SEQ ID NO: 79728 - protein, 251 aa, Arabidopsis thaliana
  peptide (1)..(251): Ceres Seq. ID no. 12652857
  misc_feature (22)..(251): Pfam Name: HAD superfamily, subfamily IIIB (Acid phosphatase) Pfam Description: HAD superfamily, subfamily IIIB (Acid
  misc_feature (1)..(251): Homolog of NCBI NO: 15224907 NR Description: putative acid phosphatase; protein id: [Arabidopsis thaliana] >gi|25288972|pir||A84807 probable acid
  misc_feature (39)..(250): Homolog of NCBI NO: 16506634 NR Description: putative defense associated acid phosphatase
MEKCSRETLLFIFITISSVATSTSTWMPMDGNYGASYCLSWRLAVETNNVRAWRIVPLQCLRYVEVYMLAGQYDRDVQLTVDQIKVYLNEIILPGDGMDAWILDVDDTCFSNVFYYRLKRYGCDPYDPTGFRTWAMKGESPAIQPVLELFYKLIETGFKVFLVTGRDEETLRQATLENLHNQGFTGYERLIMRTADNKRQSATTYKTRIRKEMMEEGYRIWGNVGDQWSDLQGEYSGDRTFKIPNPMYFVP

SEQ ID NO: 79729 - protein, 225 aa, Arabidopsis thaliana
  peptide (1)..(225): Ceres Seq. ID no. 12652858
  misc_feature (1)..(225): Pfam Name: HAD superfamily, subfamily IIIB (Acid phosphatase) Pfam Description: HAD superfamily, subfamily IIIB (Acid
  misc_feature (1)..(225): Homolog of NCBI NO: 15224907 NR Description: putative acid phosphatase; protein id: [Arabidopsis thaliana] >gi|25288972|pir||A84807 probable acid
  misc_feature (13)..(224): Homolog of NCBI NO: 16506634 NR Description: putative defense associated acid phosphatase
MPMDGNYGASYCLSWRLAVETNNVRAWRIVPLQCLRYVEVYMLAGQYDRDVQLTVDQIKVYLNEIILPGDGMDAWILDVDDTCFSNVFYYRLKRYGCDPYDPTGFRTWAMKGESPAIQPVLELFYKLIETGFKVFLVTGRDEETLRQATLENLHNQGFTGYERLIMRTADNKRQSATTYKTRIRKEMMEEGYRIWGNVGDQWSDLQGEYSGDRTFKIPNPMYFVP

SEQ ID NO: 79730 - protein, 223 aa, Arabidopsis thaliana
  peptide (1)..(223): Ceres Seq. ID no. 12652859
  misc_feature (1)..(223): Pfam Name: HAD superfamily, subfamily IIIB (Acid phosphatase) Pfam Description: HAD superfamily, subfamily IIIB (Acid
  misc_feature (1)..(223): Homolog of NCBI NO: 15224907 NR Description: putative acid phosphatase; protein id: [Arabidopsis thaliana] >gi|25288972|pir||A84807 probable acid
  misc_feature (11)..(222): Homolog of NCBI NO: 16506634 NR Description: putative defense associated acid phosphatase
MDGNYGASYCLSWRLAVETNNVRAWRIVPLQCLRYVEVYMLAGQYDRDVQLTVDQIKVYLNEIILPGDGMDAWILDVDDTCFSNVFYYRLKRYGCDPYDPTGFRTWAMKGESPAIQPVLELFYKLIETGFKVFLVTGRDEETLRQATLENLHNQGFTGYERLIMRTADNKRQSATTYKTRIRKEMMEEGYRIWGNVGDQWSDLQGEYSGDRTFKIPNPMYFVP

SEQ ID NO: 79731 - DNA, 591 bp, Arabidopsis thaliana
  misc_feature (1)..(591): Ceres Seq. ID no. 12652860
  misc_feature: MA Experiment ID: 20000179 Result: Down-regulated in Transcription
  misc_feature: MA Experiment 20000179 PARAMETER Experiment Name: At_Germinating_Seeds_P Parameter: Age (hr) Value: 6 vs. 0
  misc_feature: MA Experiment 20000179 PARAMETER Experiment Name: At_Germinating_Seeds_P Parameter: Tissue Value: Germinating Seeds
  misc_feature: MA Experiment ID: 20000182 Result: Up-regulated in Transcription
  misc_feature: MA Experiment 20000182 PARAMETER Experiment Name: At_2mM_SA_P Parameter: Age (day) Value: 14
  misc_feature: MA Experiment 20000182 PARAMETER Experiment Name: At_2mM_SA_P Parameter: Organism Value: A. thaliana
  misc_feature: MA Experiment 20000182 PARAMETER Experiment Name: At_2mM_SA_P Parameter: Plant Line Value: WS
  misc_feature: MA Experiment 20000182 PARAMETER Experiment Name: At_2mM_SA_P Parameter: Timepoint (hr) Value: 6
  misc_feature: MA Experiment 20000182 PARAMETER Experiment Name: At_2mM_SA_P Parameter: Tissue Value: Aerial
  misc_feature: MA Experiment 20000182 PARAMETER Experiment Name: At_2mM_SA_P Parameter: Treatment Value: 2mM SA vs. No Treatment
  misc_feature: MA Experiment ID: 20000184 Result: Down-regulated in Transcription
  misc_feature: MA Experiment 20000184 PARAMETER Experiment Name: At_Shoots__P Parameter: Age (day) Value: 7
  misc_feature: MA Experiment 20000184 PARAMETER Experiment Name: At_Shoots__P Parameter: Tissue Value: Shoots vs. Whole Plant
  misc_feature: MA Experiment ID: 20000185 Result: Up-regulated in Transcription
  misc_feature: MA Experiment 20000185 PARAMETER Experiment Name: At_Roots__P Parameter: Age (day) Value: 7 vs. 21
  misc_feature: MA Experiment 20000185 PARAMETER Experiment Name: At_Roots__P Parameter: Organism Value: A. thaliana
  misc_feature: MA Experiment 20000185 PARAMETER Experiment Name: At_Roots__P Parameter: Tissue Value: Roots vs. Whole Plant
  misc_feature: MA Experiment ID: 20000213 Result: Up-regulated in Transcription
  misc_feature: MA Experiment 20000213 PARAMETER Experiment Name: At_4deg_Cold_P Parameter: Timepoint (hr) Value: 2
  misc_feature: MA Experiment ID: 20000265 Result: Down-regulated in Transcription
  misc_feature: MA Experiment 20000265 PARAMETER Experiment Name: At_Open_Flower_P Parameter: Age (day) Value: 21
  misc_feature: MA Experiment 20000265 PARAMETER Experiment Name: At_Open_Flower_P Parameter: Plant Line Value: WS
  misc_feature: MA Experiment 20000265 PARAMETER Experiment Name: At_Open_Flower_P Parameter: Tissue Value: Closed Flower vs. Whole Plant
  misc_feature: MA Experiment ID: 20000439 Result: Up-regulated in Transcription
  misc_feature: MA Experiment 20000439 PARAMETER Experiment Name: At_Roots__P Parameter: Age (day) Value: 14 vs. 21
  misc_feature: MA Experiment 20000439 PARAMETER Experiment Name: At_Roots__P Parameter: Organism Value: A. thaliana
  misc_feature: MA Experiment 20000439 PARAMETER Experiment Name: At_Roots__P Parameter: Tissue Value: Roots vs. Whole Plant
  misc_feature: MA Experiment ID: 20000496 Result: Down-regulated in Transcription
  misc_feature: MA Experiment 20000496 PARAMETER Experiment Name: At_Guard_Cells_P Parameter: Harvest Date Value: 7/19/2002
  misc_feature: MA Experiment 20000496 PARAMETER Experiment Name: At_Guard_Cells_P Parameter: Organism Value: Canola
  misc_feature: MA Experiment 20000496 PARAMETER Experiment Name: At_Guard_Cells_P Parameter: Tissue Value: Guard Cells vs. Leaves
  misc_feature: MA Experiment ID: 20001248 Result: Down-regulated in Transcription
  misc_feature: MA Experiment 20001248 PARAMETER Experiment Name: At_Far-red-induction_P Parameter: Age (day) Value: 7
  misc_feature: MA Experiment 20001248 PARAMETER Experiment Name: At_Far-red-induction_P Parameter: Light Value: Far-red vs. White
  misc_feature: MA Experiment 20001248 PARAMETER Experiment Name: At_Far-red-induction_P Parameter: Organism Value: A. thaliana
  misc_feature: MA Experiment 20001248 PARAMETER Experiment Name: At_Far-red-induction_P Parameter: Plant Line Value: Columbia
  misc_feature: MA Experiment 20001248 PARAMETER Experiment Name: At_Far-red-induction_P Parameter: Timepoint (hr) Value: 4
  misc_feature: MA Experiment 20001248 PARAMETER Experiment Name: At_Far-red-induction_P Parameter: Tissue Value: Whole Plant
  misc_feature: MA Experiment ID: 20001451 Result: Up-regulated in Transcription
  misc_feature: MA Experiment 20001451 PARAMETER Experiment Name: At_Far-red-induction_P Parameter: Age (day) Value: 7
  misc_feature: MA Experiment 20001451 PARAMETER Experiment Name: At_Far-red-induction_P Parameter: Light Value: Far-red vs. White
  misc_feature: MA Experiment 20001451 PARAMETER Experiment Name: At_Far-red-induction_P Parameter: Organism Value: A. thaliana
  misc_feature: MA Experiment 20001451 PARAMETER Experiment Name: At_Far-red-induction_P Parameter: Plant Line Value: Columbia
  misc_feature: MA Experiment 20001451 PARAMETER Experiment Name: At_Far-red-induction_P Parameter: Timepoint (hr) Value: 24
  misc_feature: MA Experiment 20001451 PARAMETER Experiment Name: At_Far-red-induction_P Parameter: Tissue Value: Whole Plant
  misc_feature: MA Experiment ID: 20001556 Result: Down-regulated in Transcription
  misc_feature: MA Experiment 20001556 PARAMETER Experiment Name: At_Drought_Soil_Dry_P Parameter: Age (day) Value: 26
  misc_feature: MA Experiment 20001556 PARAMETER Experiment Name: At_Drought_Soil_Dry_P Parameter: Organism Value: A. thaliana
  misc_feature: MA Experiment 20001556 PARAMETER Experiment Name: At_Drought_Soil_Dry_P Parameter: Plant Line Value: WS
  misc_feature: MA Experiment 20001556 PARAMETER Experiment Name: At_Drought_Soil_Dry_P Parameter: Post Timepoint (hr) Value: None
  misc_feature: MA Experiment 20001556 PARAMETER Experiment Name: At_Drought_Soil_Dry_P Parameter: Post-Treatment Value: None
  misc_feature: MA Experiment 20001556 PARAMETER Experiment Name: At_Drought_Soil_Dry_P Parameter: Timepoint (day) Value: 12
  misc_feature: MA Experiment 20001556 PARAMETER Experiment Name: At_Drought_Soil_Dry_P Parameter: Treatment Value: Drought vs. No Drought
atgacaaaagttcacccaaaattcccaagcacatgcgaagagagcttgtgtgatagcaaagcagcagttgttttaacggtgtggaagaagtcccttctcttcaactgcgacggattcacggtttacaacgccaatggagagcttgtctttagagttgacaactacatgaattgtcctagagacaacatcgtccttatggatgcttccggctttcccctcctctccattcgccgcaagaagttgagtcttggagattgctggatggtatacgatggagaaacagagagagatccaatattcacggcgagaaagaacgttagcataatatctaaccggaaaagcttggcgtgggttagcgcaaagaagacggtgttgtacgagatagaaggatcttacggtcaaagaagctgcaaaatattggatgagaggaggaacaagaagaaaacggcggagatcaagaggaaagaaacggtgatcggaggagttgcctttggcaaagatgtctataagcttatcgttgaatcggagatggaacctcgtgtggccatggcacttaccatcatcctcgaccaaatgtttcgatcttcttga

SEQ ID NO: 79732 - protein, 196 aa, Arabidopsis thaliana
  peptide (1)..(196): Ceres Seq. ID no. 12652861
  misc_feature (10)..(188): Pfam Name: Protein of unknown function (DUF567) Pfam Description: Protein of unknown function (DUF567)
  misc_feature (1)..(196): Homolog of NCBI NO: 15224921 NR Description: unknown protein; protein id: At2g38640.1
  misc_feature (77)..(193): Homolog of NCBI NO: 27542767 NR Description: hypothetical protein-like protein [Sorghum
  misc_feature (24)..(93): Homolog of NCBI NO: 27542767 NR Description: hypothetical protein-like protein [Sorghum
  misc_feature (1)..(193): Homolog of NCBI NO: 27542765 NR Description: hypothetical protein-like protein [Sorghum
  misc_feature (24)..(193): Homolog of NCBI NO: 27542769 NR Description: hypothetical protein-like protein [Sorghum
  misc_feature (10)..(193): Homolog of NCBI NO: 15238123 NR Description: putative protein; protein id: At5g41590.1 thaliana] >gi|10178013|dbj|BAB11465.1|
  misc_feature (1)..(193): Homolog of NCBI NO: 34909256 NR Description: B1148D12.16 [Oryza sativa (japonica
  misc_feature (25)..(193): Homolog of NCBI NO: 15220064 NR Description: hypothetical protein; protein id: At1g80120.1
  misc_feature (25)..(192): Homolog of NCBI NO: 18400907 NR Description: expressed protein; protein id: At3g15810.1, by cDNA: 2528., supported by cDNA: gi_17380787, supported by gi_20259608 [Arabidopsis thaliana] >gi|11994353|dbj|BAB02312.1|
  misc_feature (25)..(192): Homolog of NCBI NO: 21554362 NR Description: unknown [Arabidopsis thaliana]
MTKVHPKFPSTCEESLCDSKAAVVLTVWKKSLLFNCDGFTVYNANGELVFRVDNYMNCPRDNIVLMDASGFPLLSIRRKKLSLGDCWMVYDGETERDPIFTARKNVSIISNRKSLAWVSAKKTVLYEIEGSYGQRSCKILDERRNKKKTAEIKRKETVIGGVAFGKDVYKLIVESEMEPRVAMALTIILDQMFRSS

SEQ ID NO: 79733 - protein, 141 aa, Arabidopsis thaliana
  peptide (1)..(141): Ceres Seq. ID no. 12652862
  misc_feature (1)..(133): Pfam Name: Protein of unknown function (DUF567) Pfam Description: Protein of unknown function (DUF567)
  misc_feature (1)..(141): Homolog of NCBI NO: 15224921 NR Description: unknown protein; protein id: At2g38640.1
  misc_feature (22)..(138): Homolog of NCBI NO: 27542767 NR Description: hypothetical protein-like protein [Sorghum
  misc_feature (1)..(38): Homolog of NCBI NO: 27542767 NR Description: hypothetical protein-like protein [Sorghum
  misc_feature (1)..(138): Homolog of NCBI NO: 27542765 NR Description: hypothetical protein-like protein [Sorghum
  misc_feature (1)..(138): Homolog of NCBI NO: 27542769 NR Description: hypothetical protein-like protein [Sorghum
  misc_feature (1)..(138): Homolog of NCBI NO: 15238123 NR Description: putative protein; protein id: At5g41590.1 thaliana] >gi|10178013|dbj|BAB11465.1|
  misc_feature (1)..(138): Homolog of NCBI NO: 34909256 NR Description: B1148D12.16 [Oryza sativa (japonica
  misc_feature (1)..(138): Homolog of NCBI NO: 15220064 NR Description: hypothetical protein; protein id: At1g80120.1
  misc_feature (1)..(137): Homolog of NCBI NO: 18400907 NR Description: expressed protein; protein id: At3g15810.1, by cDNA: 2528., supported by cDNA: gi_17380787, supported by gi_20259608 [Arabidopsis thaliana] >gi|11994353|dbj|BAB02312.1|
  misc_feature (1)..(137): Homolog of NCBI NO: 21554362 NR Description: unknown [Arabidopsis thaliana]
MNCPRDNIVLMDASGFPLLSIRRKKLSLGDCWMVYDGETERDPIFTARKNVSIISNRKSLAWVSAKKTVLYEIEGSYGQRSCKILDERRNKKKTAEIKRKETVIGGVAFGKDVYKLIVESEMEPRVAMALTIILDQMFRSS

SEQ ID NO: 79734 - protein, 131 aa, Arabidopsis thaliana
  peptide (1)..(131): Ceres Seq. ID no. 12652863
  misc_feature (1)..(123): Pfam Name: Protein of unknown function (DUF567) Pfam Description: Protein of unknown function (DUF567)
  misc_feature (1)..(131): Homolog of NCBI NO: 15224921 NR Description: unknown protein; protein id: At2g38640.1
  misc_feature (12)..(128): Homolog of NCBI NO: 27542767 NR Description: hypothetical protein-like protein [Sorghum
  misc_feature (1)..(28): Homolog of NCBI NO: 27542767 NR Description: hypothetical protein-like protein [Sorghum
  misc_feature (1)..(128): Homolog of NCBI NO: 27542765 NR Description: hypothetical protein-like protein [Sorghum
  misc_feature (1)..(128): Homolog of NCBI NO: 27542769 NR Description: hypothetical protein-like protein [Sorghum
  misc_feature (1)..(128): Homolog of NCBI NO: 15238123 NR Description: putative protein; protein id: At5g41590.1 thaliana] >gi|10178013|dbj|BAB11465.1|
  misc_feature (1)..(128): Homolog of NCBI NO: 34909256 NR Description: B1148D12.16 [Oryza sativa (japonica
  misc_feature (1)..(128): Homolog of NCBI NO: 15220064 NR Description: hypothetical protein; protein id: At1g80120.1
  misc_feature (1)..(127): Homolog of NCBI NO: 18400907 NR Description: expressed protein; protein id: At3g15810.1, by cDNA: 2528., supported by cDNA: gi_17380787, supported by gi_20259608 [Arabidopsis thaliana] >gi|11994353|dbj|BAB02312.1|
  misc_feature (1)..(127): Homolog of NCBI NO: 21554362 NR Description: unknown [Arabidopsis thaliana]
MDASGFPLLSIRRKKLSLGDCWMVYDGETERDPIFTARKNVSIISNRKSLAWVSAKKTVLYEIEGSYGQRSCKILDERRNKKKTAEIKRKETVIGGVAFGKDVYKLIVESEMEPRVAMALTIILDQMFRSS

SEQ ID NO: 79735 - DNA, 2105 bp, Arabidopsis thaliana
  misc_feature (1)..(2105): Ceres Seq. ID no. 12652864
  misc_feature: MA Experiment ID: 20000171 Result: Down-regulated in Transcription
  misc_feature: MA Experiment 20000171 PARAMETER Experiment Name: At_42deg_Heat_P Parameter: Age (day) Value: 14
  misc_feature: MA Experiment 20000171 PARAMETER Experiment Name: At_42deg_Heat_P Parameter: Organism Value: A. thaliana
  misc_feature: MA Experiment 20000171 PARAMETER Experiment Name: At_42deg_Heat_P Parameter: Plant Line Value: WS
  misc_feature: MA Experiment 20000171 PARAMETER Experiment Name: At_42deg_Heat_P Parameter: Temperature (deg C) Value: 42 vs. 22
  misc_feature: MA Experiment 20000171 PARAMETER Experiment Name: At_42deg_Heat_P Parameter: Timepoint (hr) Value: 1
  misc_feature: MA Experiment 20000171 PARAMETER Experiment Name: At_42deg_Heat_P Parameter: Tissue Value: Aerial
  misc_feature: MA Experiment ID: 20000173 Result: Down-regulated in Transcription
  misc_feature: MA Experiment 20000173 PARAMETER Experiment Name: At_42deg_Heat_P Parameter: Age (day) Value: 14
  misc_feature: MA Experiment 20000173 PARAMETER Experiment Name: At_42deg_Heat_P Parameter: Organism Value: A. thaliana
  misc_feature: MA Experiment 20000173 PARAMETER Experiment Name: At_42deg_Heat_P Parameter: Plant Line Value: WS
  misc_feature: MA Experiment 20000173 PARAMETER Experiment Name: At_42deg_Heat_P Parameter: Temperature (deg C) Value: 42 vs. 22
  misc_feature: MA Experiment 20000173 PARAMETER Experiment Name: At_42deg_Heat_P Parameter: Timepoint (hr) Value: 6
  misc_feature: MA Experiment 20000173 PARAMETER Experiment Name: At_42deg_Heat_P Parameter: Tissue Value: Aerial
  misc_feature: MA Experiment ID: 20000180 Result: Up-regulated in Transcription
  misc_feature: MA Experiment 20000180 PARAMETER Experiment Name: At_Germinating_Seeds_P Parameter: Age (hr) Value: 24 vs. 0
  misc_feature: MA Experiment 20000180 PARAMETER Experiment Name: At_Germinating_Seeds_P Parameter: Tissue Value: Germinating Seeds
  misc_feature: MA Experiment ID: 20001560 Result: Up-regulated in Transcription
  misc_feature: MA Experiment 20001560 PARAMETER Experiment Name: At_Drought_Soil_Dry_P Parameter: Age (day) Value: 28
  misc_feature: MA Experiment 20001560 PARAMETER Experiment Name: At_Drought_Soil_Dry_P Parameter: Organism Value: A. thaliana
  misc_feature: MA Experiment 20001560 PARAMETER Experiment Name: At_Drought_Soil_Dry_P Parameter: Plant Line Value: WS
  misc_feature: MA Experiment 20001560 PARAMETER Experiment Name: At_Drought_Soil_Dry_P Parameter: Post Timepoint (hr) Value: None
  misc_feature: MA Experiment 20001560 PARAMETER Experiment Name: At_Drought_Soil_Dry_P Parameter: Post-Treatment Value: None
  misc_feature: MA Experiment 20001560 PARAMETER Experiment Name: At_Drought_Soil_Dry_P Parameter: Timepoint (day) Value: 14
  misc_feature: MA Experiment 20001560 PARAMETER Experiment Name: At_Drought_Soil_Dry_P Parameter: Treatment Value: Drought vs. No Drought
gcgatcgggctaagtgcagaaacacttatacttgtgcattctgcaacacaacacacacacagagaattcgacgagagtatgatttgagtgtatcgagaacagagagagacattgatagagagatcgttggcaacgttttggggatccaatgcgttcgtaattgggaaagacatttcattcaattctaaatcgggaatatgaaaggcggaggcggtggtggaggaggtggtggcggaggaaaacgccggtggaaagttctggtgattggagttttggttcttgttattctttctatgcttgttcctcttgctttcttactcggtcttcacaatggctttcactctcctggatttgtcactgttcaaccggcttcttcatttgagagctttaccagaatcaatgctactaagcatacacagagagatgtatccgaacgggtcgatgaggttcttcaaaaaatcaatccagttcttcccaagaaaagcgacataaacgtgggttccagagatgtgaatgcaacaagcggcactgattctaaaaaaagaggattaccagtgtccccaactgttgttgccaatccaagccctgcaaataaaacaaaatcggaagcctcatatacaggtgttcagaggaaaatagtaagtggtgatgaaacttggagaacttgtgaagtgaaatatgggagctactgcctctggagggaggaaaataaggaaccaatgaaagatgccaaggtgaagcaaatgaaggaccagctgtttgtggctagagcatactatcccagtattgctaaaatgccttctcaaagcaagttgactcgggatatgaaacagaatatccaagagtttgagcgtattcttagtgaaagttctcaagatgctgaccttccaccacaggttgataaaaagttgcagaagatggaagctgtaattgcaaaggcaaagtcttttccagtcgactgtaacaatgttgacaagaaattgagacagatccttgatttgactgaggatgaagctagtttccacatgaaacagagtgtgttcctctaccagcttgcagtacagacaatgcctaagagtcttcattgcttgtcaatgcgactaactgtggaacatttcaagtcagattcacttgaggatcccattagtgagaaattttcagatccctcattacttcactttgttatcatctccgataatatactagcatcgtccgttgtgatcaactcaacggttgtacatgcaagggacagtaaaaactttgttttccatgtactgacagacgagcagaattactttgcaatgaaacaatggtttattaggaatccttgcaaacaatcaactgttcaagtattgaacattgaaaaactcgagctggacgattctgatatgaaactgtctttgtctgcggagttccgtgtttccttccccagtggtgaccttttggcgtctcaacagaatagaacacactacttatcccttttctctcaatctcactatcttcttcccaaattatttgacaaattggagaaggttgtgattctggatgatgacgttgtagtccagcgagacttatctcccctttgggaccttgatatggaagggaaagtgaatggcgctgttaagtcgtgcactgtgagattgggtcagctaaggagtctcaagagaggaaattttgataccaatgcttgtctctggatgtctggtttgaatgtcgttgatcttgctagatggagggcattgggtgtttcagaaacctatcaaaaatattataaagagatgagtagtggagatgagtcgagcgaagcaattgcattgcaggcaagcttgctcacatttcaagaccaagtatatgctcttgacgacaaatgggctctatcagggcttggttatgactactacatcaatgcacaagccataaaaaacgcagccatattgcactataacgggaacatgaagccgtggcttgagctgggaatcccaaattacaaaaactattggagaaggcatctgagtcgggaagatcggttcttgagtgactgtaacgtgaatccttgatgagtaagtagctacacggccaatgcttttagaagcaaggtcacacgc

SEQ ID NO: 79736 - protein, 619 aa, Arabidopsis thaliana
  peptide (1)..(619): Ceres Seq. ID no. 12652865
  misc_feature (105)..(619): Homolog of NCBI NO: 25352329 NR Description: hypothetical protein At2g38650 [imported] -
  misc_feature (1)..(96): Homolog of NCBI NO: 25352329 NR Description: hypothetical protein At2g38650 [imported] -
  misc_feature (23)..(619): Homolog of NCBI NO: 33146671 NR Description: putative glycosyl transferase protein A [Oryza
  misc_feature (175)..(619): Homolog of NCBI NO: 10177914 NR Description: emb|CAB71043.1~gene_id:MCA23.10~strong similarity
  misc_feature (175)..(619): Homolog of NCBI NO: 18422837 NR Description: putative protein; protein id: At5g47780.1, by cDNA: gi_15810326, supported by cDNA: gi_20259234 [Arabidopsis >gi|15810327|gb|AAL07051.1| unknown protein [Arabidopsis
  misc_feature (169)..(619): Homolog of NCBI NO: 38423965 NR Description: putative glycosyltransferase [Oryza sativa
  misc_feature (177)..(617): Homolog of NCBI NO: 18390688 NR Description: expressed protein; protein id: At1g06780.1, by cDNA: gi_15028086, supported by cDNA: gi_20259310 [Arabidopsis
  misc_feature (16)..(618): Homolog of NCBI NO: 30684642 NR Description: glycosyltransferase family 8 [Arabidopsis >gi|19698933|gb|AAL91202.1| unknown protein [Arabidopsis >gi|27311915|gb|AAO00923.1| unknown protein [Arabidopsis
  misc_feature (162)..(617): Homolog of NCBI NO: 15227235 NR Description: hypothetical protein; protein id: At2g46480.1
  misc_feature (162)..(478): Homolog of NCBI NO: 14517362 NR Description: AT3g61130/T20K12_30 [Arabidopsis thaliana]
MKGGGGGGGGGGGGKRRWKVLVIGVLVLVILSMLVPLAFLLGLHNGFHSPGFVTVQPASSFESFTRINATKHTQRDVSERVDEVLQKINPVLPKKSDINVGSRDVNATSGTDSKKRGLPVSPTVVANPSPANKTKSEASYTGVQRKIVSGDETWRTCEVKYGSYCLWREENKEPMKDAKVKQMKDQLFVARAYYPSIAKMPSQSKLTRDMKQNIQEFERILSESSQDADLPPQVDKKLQKMEAVIAKAKSFPVDCNNVDKKLRQILDLTEDEASFHMKQSVFLYQLAVQTMPKSLHCLSMRLTVEHFKSDSLEDPISEKFSDPSLLHFVIISDNILASSVVINSTVVHARDSKNFVFHVLTDEQNYFAMKQWFIRNPCKQSTVQVLNIEKLELDDSDMKLSLSAEFRVSFPSGDLLASQQNRTHYLSLFSQSHYLLPKLFDKLEKVVILDDDVVVQRDLSPLWDLDMEGKVNGAVKSCTVRLGQLRSLKRGNFDTNACLWMSGLNVVDLARWRALGVSETYQKYYKEMSSGDESSEAIALQASLLTFQDQVYALDDKWALSGLGYDYYINAQAIKNAAILHYNGNMKPWLELGIPNYKNYWRRHLSREDRFLSDCNVNP

SEQ ID NO: 79737 - protein, 587 aa, Arabidopsis thaliana
  peptide (1)..(587): Ceres Seq. ID no. 12652866
  misc_feature (73)..(587): Homolog of NCBI NO: 25352329 NR Description: hypothetical protein At2g38650 [imported] -
  misc_feature (1)..(64): Homolog of NCBI NO: 25352329 NR Description: hypothetical protein At2g38650 [imported] -
  misc_feature (1)..(587): Homolog of NCBI NO: 33146671 NR Description: putative glycosyl transferase protein A [Oryza
  misc_feature (143)..(587): Homolog of NCBI NO: 10177914 NR Description: emb|CAB71043.1~gene_id:MCA23.10~strong similarity
  misc_feature (143)..(587): Homolog of NCBI NO: 18422837 NR Description: putative protein; protein id: At5g47780.1, by cDNA: gi_15810326, supported by cDNA: gi_20259234 [Arabidopsis >gi|15810327|gb|AAL07051.1| unknown protein [Arabidopsis
  misc_feature (137)..(587): Homolog of NCBI NO: 38423965 NR Description: putative glycosyltransferase [Oryza sativa
  misc_feature (145)..(585): Homolog of NCBI NO: 18390688 NR Description: expressed protein; protein id: At1g06780.1, by cDNA: gi_15028086, supported by cDNA: gi_20259310 [Arabidopsis
  misc_feature (1)..(586): Homolog of NCBI NO: 30684642 NR Description: glycosyltransferase family 8 [Arabidopsis >gi|19698933|gb|AAL91202.1| unknown protein [Arabidopsis >gi|27311915|gb|AAO00923.1| unknown protein [Arabidopsis
  misc_feature (130)..(585): Homolog of NCBI NO: 15227235 NR Description: hypothetical protein; protein id: At2g46480.1
  misc_feature (130)..(446): Homolog of NCBI NO: 14517362 NR Description: AT3g61130/T20K12_30 [Arabidopsis thaliana]
MLVPLAFLLGLHNGFHSPGFVTVQPASSFESFTRINATKHTQRDVSERVDEVLQKINPVLPKKSDINVGSRDVNATSGTDSKKRGLPVSPTVVANPSPANKTKSEASYTGVQRKIVSGDETWRTCEVKYGSYCLWREENKEPMKDAKVKQMKDQLFVARAYYPSIAKMPSQSKLTRDMKQNIQEFERILSESSQDADLPPQVDKKLQKMEAVIAKAKSFPVDCNNVDKKLRQILDLTEDEASFHMKQSVFLYQLAVQTMPKSLHCLSMRLTVEHFKSDSLEDPISEKFSDPSLLHFVIISDNILASSVVINSTVVHARDSKNFVFHVLTDEQNYFAMKQWFIRNPCKQSTVQVLNIEKLELDDSDMKLSLSAEFRVSFPSGDLLASQQNRTHYLSLFSQSHYLLPKLFDKLEKVVILDDDVVVQRDLSPLWDLDMEGKVNGAVKSCTVRLGQLRSLKRGNFDTNACLWMSGLNVVDLARWRALGVSETYQKYYKEMSSGDESSEAIALQASLLTFQDQVYALDDKWALSGLGYDYYINAQAIKNAAILHYNGNMKPWLELGIPNYKNYWRRHLSREDRFLSDCNVNP

SEQ ID NO: 79738 - protein, 445 aa, Arabidopsis thaliana
  peptide (1)..(445): Ceres Seq. ID no. 12652867
  misc_feature (1)..(445): Homolog of NCBI NO: 25352329 NR Description: hypothetical protein At2g38650 [imported] -
  misc_feature (1)..(445): Homolog of NCBI NO: 33146671 NR Description: putative glycosyl transferase protein A [Oryza
  misc_feature (1)..(445): Homolog of NCBI NO: 10177914 NR Description: emb|CAB71043.1~gene_id:MCA23.10~strong similarity
  misc_feature (1)..(445): Homolog of NCBI NO: 18422837 NR Description: putative protein; protein id: At5g47780.1, by cDNA: gi_15810326, supported by cDNA: gi_20259234 [Arabidopsis >gi|15810327|gb|AAL07051.1| unknown protein [Arabidopsis
  misc_feature (1)..(445): Homolog of NCBI NO: 38423965 NR Description: putative glycosyltransferase [Oryza sativa
  misc_feature (3)..(443): Homolog of NCBI NO: 18390688 NR Description: expressed protein; protein id: At1g06780.1, by cDNA: gi_15028086, supported by cDNA: gi_20259310 [Arabidopsis
  misc_feature (1)..(444): Homolog of NCBI NO: 30684642 NR Description: glycosyltransferase family 8 [Arabidopsis >gi|19698933|gb|AAL91202.1| unknown protein [Arabidopsis >gi|27311915|gb|AAO00923.1| unknown protein [Arabidopsis
  misc_feature (1)..(443): Homolog of NCBI NO: 15227235 NR Description: hypothetical protein; protein id: At2g46480.1
  misc_feature (1)..(304): Homolog of NCBI NO: 14517362 NR Description: AT3g61130/T20K12_30 [Arabidopsis thaliana]
  misc_feature (1)..(304): Homolog of NCBI NO: 15233046 NR Description: putative protein; protein id: At3g61130.1, by cDNA: gi_14517361 [Arabidopsis thaliana]
MKDAKVKQMKDQLFVARAYYPSIAKMPSQSKLTRDMKQNIQEFERILSESSQDADLPPQVDKKLQKMEAVIAKAKSFPVDCNNVDKKLRQILDLTEDEASFHMKQSVFLYQLAVQTMPKSLHCLSMRLTVEHFKSDSLEDPISEKFSDPSLLHFVIISDNILASSVVINSTVVHARDSKNFVFHVLTDEQNYFAMKQWFIRNPCKQSTVQVLNIEKLELDDSDMKLSLSAEFRVSFPSGDLLASQQNRTHYLSLFSQSHYLLPKLFDKLEKVVILDDDVVVQRDLSPLWDLDMEGKVNGAVKSCTVRLGQLRSLKRGNFDTNACLWMSGLNVVDLARWRALGVSETYQKYYKEMSSGDESSEAIALQASLLTFQDQVYALDDKWALSGLGYDYYINAQAIKNAAILHYNGNMKPWLELGIPNYKNYWRRHLSREDRFLSDCNVNP

SEQ ID NO: 79739 - DNA, 750 bp, Arabidopsis thaliana
  misc_feature (1)..(750): Ceres Seq. ID no. 12652965
  misc_feature: MA Experiment ID: 20000173 Result: Up-regulated in Transcription
  misc_feature: MA Experiment 20000173 PARAMETER Experiment Name: At_42deg_Heat_P Parameter: Age (day) Value: 14
  misc_feature: MA Experiment 20000173 PARAMETER Experiment Name: At_42deg_Heat_P Parameter: Organism Value: A. thaliana
  misc_feature: MA Experiment 20000173 PARAMETER Experiment Name: At_42deg_Heat_P Parameter: Plant Line Value: WS
  misc_feature: MA Experiment 20000173 PARAMETER Experiment Name: At_42deg_Heat_P Parameter: Temperature (deg C) Value: 42 vs. 22
  misc_feature: MA Experiment 20000173 PARAMETER Experiment Name: At_42deg_Heat_P Parameter: Timepoint (hr) Value: 6
  misc_feature: MA Experiment 20000173 PARAMETER Experiment Name: At_42deg_Heat_P Parameter: Tissue Value: Aerial
  misc_feature: MA Experiment ID: 20000227 Result: Down-regulated in Transcription
  misc_feature: MA Experiment 20000227 PARAMETER Experiment Name: At_Root-Tips-vs-Tops_P Parameter: Tissue Value: Root Tips vs. Root Tops
  misc_feature: MA Experiment ID: 20001248 Result: Down-regulated in Transcription
  misc_feature: MA Experiment 20001248 PARAMETER Experiment Name: At_Far-red-induction_P Parameter: Age (day) Value: 7
  misc_feature: MA Experiment 20001248 PARAMETER Experiment Name: At_Far-red-induction_P Parameter: Light Value: Far-red vs. White
  misc_feature: MA Experiment 20001248 PARAMETER Experiment Name: At_Far-red-induction_P Parameter: Organism Value: A. thaliana
  misc_feature: MA Experiment 20001248 PARAMETER Experiment Name: At_Far-red-induction_P Parameter: Plant Line Value: Columbia
  misc_feature: MA Experiment 20001248 PARAMETER Experiment Name: At_Far-red-induction_P Parameter: Timepoint (hr) Value: 4
  misc_feature: MA Experiment 20001248 PARAMETER Experiment Name: At_Far-red-induction_P Parameter: Tissue Value: Whole Plant
  misc_feature: MA Experiment ID: 20001557 Result: Down-regulated in Transcription
  misc_feature: MA Experiment 20001557 PARAMETER Experiment Name: At_Drought_Soil_Dry_P Parameter: Age (day) Value: 27
  misc_feature: MA Experiment 20001557 PARAMETER Experiment Name: At_Drought_Soil_Dry_P Parameter: Organism Value: A. thaliana
  misc_feature: MA Experiment 20001557 PARAMETER Experiment Name: At_Drought_Soil_Dry_P Parameter: Plant Line Value: WS
  misc_feature: MA Experiment 20001557 PARAMETER Experiment Name: At_Drought_Soil_Dry_P Parameter: Post Timepoint (hr) Value: 3
  misc_feature: MA Experiment 20001557 PARAMETER Experiment Name: At_Drought_Soil_Dry_P Parameter: Post-Treatment Value: Re-Water vs. No Drought
  misc_feature: MA Experiment 20001557 PARAMETER Experiment Name: At_Drought_Soil_Dry_P Parameter: Timepoint (day) Value: 13
  misc_feature: MA Experiment 20001557 PARAMETER Experiment Name: At_Drought_Soil_Dry_P Parameter: Treatment Value: Drought vs. No Drought
atgtatccttgtggttacgttgctcaagtcaccaacttgtctcctcaagccactgagaaagatgttcataggttcttctctcactgtggtatcgtcgagctcgttgaaatcaccgggtgccaaggggatgcattaacggcttatgtaaccttcagagatgcgtatgctctggatatggctgtgttacttagcggagctacgatcgttgatcaaaccgtttggatatcggtctacggtgtctatttacatgaatctaacaatctcagacaagaagaagactatagtgttacggtgactcgttcagacgcgtttgcttcatcgcctggagaggccataaccgtggctcaacaagttgtgcagacgatgttagctaaaggctacgttttaagcaaagacgcgattggtaaagccaaagctttggatgagtctcagagattttcaagcttggtagcgaccaaattggcagagatcagccattaccttggcctcacacagaacattcagtcgagtatggaactcgtgagatcagcggacgagaagtatcatttctcggatttcactaaatccgcggttcttgtcacgggcacagctgctgtagccgcagccaccattacagggaaagtggctgcagctgcagcgactagtgtggtcaacagtcgttactttgctaatggggctttatggttctcagatgctttgggccgggctgcaaaagcagcggcccatatcggtggaggaggaagcaattga

SEQ ID NO: 79740 - protein, 249 aa, Arabidopsis thaliana
  peptide (1)..(249): Ceres Seq. ID no. 12652966
  misc_feature (8)..(75): Pfam Name: RNA recognition motif. (a.k.a. RRM, RBD, or RNP domain) Pfam Description: RNA recognition motif. (a.k.a. RRM, RBD, or RNP
  misc_feature (1)..(249): Homolog of NCBI NO: 6714467 NR Description: unknown protein [Arabidopsis thaliana]
  misc_feature (59)..(249): Homolog of NCBI NO: 30678301 NR Description: RNA recognition motif (RRM)-containing protein thaliana] >gi|26452178|dbj|BAC43177.1| unknown protein thaliana] >gi|28372926|gb|AAO39945.1| At3g01210 [Arabidopsis
  misc_feature (5)..(248): Homolog of NCBI NO: 18394102 NR Description: RRM-containing protein; protein id: At1g14340.1, by cDNA: 9495., supported by cDNA: gi_15292970, supported by gi_20259676 [Arabidopsis thaliana] >gi|15292971|gb|AAK93596.1|
  misc_feature (5)..(248): Homolog of NCBI NO: 21618045 NR Description: unknown [Arabidopsis thaliana]
  misc_feature (5)..(243): Homolog of NCBI NO: 25518024 NR Description: F14L17.11 protein - Arabidopsis thaliana Contains similarity to Vip1 protein from Schizosaccharomyces gb|Y13635.1 and contains a RNA recognition motif PF|00076. EST
  misc_feature (5)..(247): Homolog of NCBI NO: 38344906 NR Description: OSJNBb0079B02.9 [Oryza sativa (japonica
  misc_feature (9)..(244): Homolog of NCBI NO: 18414951 NR Description: RRM-containing protein; protein id: At4g17720.1, by cDNA: 39922. [Arabidopsis thaliana]
  misc_feature (9)..(244): Homolog of NCBI NO: 34897896 NR Description: ESTs D15336(C0474),C98053(C0474) correspond to a of the predicted gene.~Similar to Arabidopsis thaliana DNA
  misc_feature (9)..(244): Homolog of NCBI NO: 18421342 NR Description: RRM-containing protein; protein id: At5g32450.1, by cDNA: 5850. [Arabidopsis thaliana] >gi|21593919|gb|AAM65884.1|
  misc_feature (9)..(244): Homolog of NCBI NO: 8809670 NR Description: gene_id:MSD23.5~pir||C71447~similar to unknown
MYPCGYVAQVTNLSPQATEKDVHRFFSHCGIVELVEITGCQGDALTAYVTFRDAYALDMAVLLSGATIVDQTVWISVYGVYLHESNNLRQEEDYSVTVTRSDAFASSPGEAITVAQQVVQTMLAKGYVLSKDAIGKAKALDESQRFSSLVATKLAEISHYLGLTQNIQSSMELVRSADEKYHFSDFTKSAVLVTGTAAVAAATITGKVAAAAATSVVNSRYFANGALWFSDALGRAAKAAAHIGGGGSN

SEQ ID NO: 79741 - protein, 191 aa, Arabidopsis thaliana
  peptide (1)..(191): Ceres Seq. ID no. 12652967
  misc_feature (1)..(191): Homolog of NCBI NO: 6714467 NR Description: unknown protein [Arabidopsis thaliana]
  misc_feature (1)..(191): Homolog of NCBI NO: 30678301 NR Description: RNA recognition motif (RRM)-containing protein thaliana] >gi|26452178|dbj|BAC43177.1| unknown protein thaliana] >gi|28372926|gb|AAO39945.1| At3g01210 [Arabidopsis
  misc_feature (1)..(190): Homolog of NCBI NO: 18394102 NR Description: RRM-containing protein; protein id: At1g14340.1, by cDNA: 9495., supported by cDNA: gi_15292970, supported by gi_20259676 [Arabidopsis thaliana] >gi|15292971|gb|AAK93596.1|
  misc_feature (1)..(190): Homolog of NCBI NO: 21618045 NR Description: unknown [Arabidopsis thaliana]
  misc_feature (1)..(185): Homolog of NCBI NO: 25518024 NR Description: F14L17.11 protein - Arabidopsis thaliana Contains similarity to Vip1 protein from Schizosaccharomyces gb|Y13635.1 and contains a RNA recognition motif PF|00076. EST
  misc_feature (1)..(189): Homolog of NCBI NO: 38344906 NR Description: OSJNBb0079B02.9 [Oryza sativa (japonica
  misc_feature (1)..(186): Homolog of NCBI NO: 18414951 NR Description: RRM-containing protein; protein id: At4g17720.1, by cDNA: 39922. [Arabidopsis thaliana]
  misc_feature (1)..(186): Homolog of NCBI NO: 34897896 NR Description: ESTs D15336(C0474),C98053(C0474) correspond to a of the predicted gene.~Similar to Arabidopsis thaliana DNA
  misc_feature (1)..(186): Homolog of NCBI NO: 18421342 NR Description: RRM-containing protein; protein id: At5g32450.1, by cDNA: 5850. [Arabidopsis thaliana] >gi|21593919|gb|AAM65884.1|
  misc_feature (1)..(186): Homolog of NCBI NO: 8809670 NR Description: gene_id:MSD23.5~pir||C71447~similar to unknown
MAVLLSGATIVDQTVWISVYGVYLHESNNLRQEEDYSVTVTRSDAFASSPGEAITVAQQVVQTMLAKGYVLSKDAIGKAKALDESQRFSSLVATKLAEISHYLGLTQNIQSSMELVRSADEKYHFSDFTKSAVLVTGTAAVAAATITGKVAAAAATSVVNSRYFANGALWFSDALGRAAKAAAHIGGGGSN

SEQ ID NO: 79742 - protein, 128 aa, Arabidopsis thaliana
  peptide (1)..(128): Ceres Seq. ID no. 12652968
  misc_feature (1)..(128): Homolog of NCBI NO: 6714467 NR Description: unknown protein [Arabidopsis thaliana]
  misc_feature (1)..(128): Homolog of NCBI NO: 30678301 NR Description: RNA recognition motif (RRM)-containing protein thaliana] >gi|26452178|dbj|BAC43177.1| unknown protein thaliana] >gi|28372926|gb|AAO39945.1| At3g01210 [Arabidopsis
  misc_feature (1)..(127): Homolog of NCBI NO: 18394102 NR Description: RRM-containing protein; protein id: At1g14340.1, by cDNA: 9495., supported by cDNA: gi_15292970, supported by gi_20259676 [Arabidopsis thaliana] >gi|15292971|gb|AAK93596.1|
  misc_feature (1)..(127): Homolog of NCBI NO: 21618045 NR Description: unknown [Arabidopsis thaliana]
  misc_feature (1)..(122): Homolog of NCBI NO: 25518024 NR Description: F14L17.11 protein - Arabidopsis thaliana Contains similarity to Vip1 protein from Schizosaccharomyces gb|Y13635.1 and contains a RNA recognition motif PF|00076. EST
  misc_feature (1)..(126): Homolog of NCBI NO: 38344906 NR Description: OSJNBb0079B02.9 [Oryza sativa (japonica
  misc_feature (1)..(123): Homolog of NCBI NO: 18414951 NR Description: RRM-containing protein; protein id: At4g17720.1, by cDNA: 39922. [Arabidopsis thaliana]
  misc_feature (1)..(123): Homolog of NCBI NO: 34897896 NR Description: ESTs D15336(C0474),C98053(C0474) correspond to a of the predicted gene.~Similar to Arabidopsis thaliana DNA
  misc_feature (1)..(123): Homolog of NCBI NO: 18421342 NR Description: RRM-containing protein; protein id: At5g32450.1, by cDNA: 5850. [Arabidopsis thaliana] >gi|21593919|gb|AAM65884.1|
  misc_feature (1)..(123): Homolog of NCBI NO: 8809670 NR Description: gene_id:MSD23.5~pir||C71447~similar to unknown
MLAKGYVLSKDAIGKAKALDESQRFSSLVATKLAEISHYLGLTQNIQSSMELVRSADEKYHFSDFTKSAVLVTGTAAVAAATITGKVAAAAATSVVNSRYFANGALWFSDALGRAAKAAAHIGGGGSN

SEQ ID NO: 79743 - DNA, 822 bp, Arabidopsis thaliana
  misc_feature (1)..(822): Ceres Seq. ID no. 12652997
  misc_feature: MA Experiment ID: 20000185 Result: Down-regulated in Transcription
  misc_feature: MA Experiment 20000185 PARAMETER Experiment Name: At_Roots__P Parameter: Age (day) Value: 7 vs. 21
  misc_feature: MA Experiment 20000185 PARAMETER Experiment Name: At_Roots__P Parameter: Organism Value: A. thaliana
  misc_feature: MA Experiment 20000185 PARAMETER Experiment Name: At_Roots__P Parameter: Tissue Value: Roots vs. Whole Plant
  misc_feature: MA Experiment ID: 20000437 Result: Down-regulated in Transcription
  misc_feature: MA Experiment 20000437 PARAMETER Experiment Name: At_Drought_P Parameter: Age (day) Value: 8
  misc_feature: MA Experiment 20000437 PARAMETER Experiment Name: At_Drought_P Parameter: Organism Value: A. thaliana
  misc_feature: MA Experiment 20000437 PARAMETER Experiment Name: At_Drought_P Parameter: Plant Line Value: WS
  misc_feature: MA Experiment 20000437 PARAMETER Experiment Name: At_Drought_P Parameter: Timepoint (hr) Value: 24
  misc_feature: MA Experiment 20000437 PARAMETER Experiment Name: At_Drought_P Parameter: Tissue Value: Whole Plant
  misc_feature: MA Experiment 20000437 PARAMETER Experiment Name: At_Drought_P Parameter: Treatment Value: Drought vs. No Drought
  misc_feature: MA Experiment ID: 20001247 Result: Down-regulated in Transcription
  misc_feature: MA Experiment 20001247 PARAMETER Experiment Name: At_Far-red-induction_P Parameter: Age (day) Value: 7
  misc_feature: MA Experiment 20001247 PARAMETER Experiment Name: At_Far-red-induction_P Parameter: Light Value: Far-red vs. White
  misc_feature: MA Experiment 20001247 PARAMETER Experiment Name: At_Far-red-induction_P Parameter: Organism Value: A. thaliana
  misc_feature: MA Experiment 20001247 PARAMETER Experiment Name: At_Far-red-induction_P Parameter: Plant Line Value: Columbia
  misc_feature: MA Experiment 20001247 PARAMETER Experiment Name: At_Far-red-induction_P Parameter: Timepoint (hr) Value: 1
  misc_feature: MA Experiment 20001247 PARAMETER Experiment Name: At_Far-red-induction_P Parameter: Tissue Value: Whole Plant
  misc_feature: MA Experiment ID: 20001248 Result: Down-regulated in Transcription
  misc_feature: MA Experiment 20001248 PARAMETER Experiment Name: At_Far-red-induction_P Parameter: Age (day) Value: 7
  misc_feature: MA Experiment 20001248 PARAMETER Experiment Name: At_Far-red-induction_P Parameter: Light Value: Far-red vs. White
  misc_feature: MA Experiment 20001248 PARAMETER Experiment Name: At_Far-red-induction_P Parameter: Organism Value: A. thaliana
  misc_feature: MA Experiment 20001248 PARAMETER Experiment Name: At_Far-red-induction_P Parameter: Plant Line Value: Columbia
  misc_feature: MA Experiment 20001248 PARAMETER Experiment Name: At_Far-red-induction_P Parameter: Timepoint (hr) Value: 4
  misc_feature: MA Experiment 20001248 PARAMETER Experiment Name: At_Far-red-induction_P Parameter: Tissue Value: Whole Plant
  misc_feature: MA Experiment ID: 20001450 Result: Down-regulated in Transcription
  misc_feature: MA Experiment 20001450 PARAMETER Experiment Name: At_Far-red-induction_P Parameter: Age (day) Value: 7
  misc_feature: MA Experiment 20001450 PARAMETER Experiment Name: At_Far-red-induction_P Parameter: Light Value: Far-red vs. White
  misc_feature: MA Experiment 20001450 PARAMETER Experiment Name: At_Far-red-induction_P Parameter: Organism Value: A. thaliana
  misc_feature: MA Experiment 20001450 PARAMETER Experiment Name: At_Far-red-induction_P Parameter: Plant Line Value: Columbia
  misc_feature: MA Experiment 20001450 PARAMETER Experiment Name: At_Far-red-induction_P Parameter: Timepoint (hr) Value: 8
  misc_feature: MA Experiment 20001450 PARAMETER Experiment Name: At_Far-red-induction_P Parameter: Tissue Value: Whole Plant
  misc_feature: MA Experiment ID: 20001905 Result: Down-regulated in Transcription
  misc_feature: MA Experiment 20001905 PARAMETER Experiment Name: At_Drought_Reproduction_P Parameter: Age (day) Value: 40
  misc_feature: MA Experiment 20001905 PARAMETER Experiment Name: At_Drought_Reproduction_P Parameter: Organism Value: A. thaliana
  misc_feature: MA Experiment 20001905 PARAMETER Experiment Name: At_Drought_Reproduction_P Parameter: Plant Line Value: WS
  misc_feature: MA Experiment 20001905 PARAMETER Experiment Name: At_Drought_Reproduction_P Parameter: Timepoint (day) Value: 10
  misc_feature: MA Experiment 20001905 PARAMETER Experiment Name: At_Drought_Reproduction_P Parameter: Tissue Value: Rosettes
  misc_feature: MA Experiment 20001905 PARAMETER Experiment Name: At_Drought_Reproduction_P Parameter: Treatment Value: Drought vs. No Drought
atggattctcttcgattcaacctccaacaatctccatttcaattgaaacctagaattctccgaccaagaatcaccaacatatcaaaccgaatcgatgaaaccgatcctcgaccatcatcctcggccggtaggatccaaaggttagtacttaacaacgaaggtcggaccaaactaaacgccgatcctgaccgtgaattctattcatatccacggttcgtgaaccacgtagatgatagtttcatatcctccttaaccgaactatacagaaaccggttgagacccggttcgactgtacttgacttgatgagctcatgggtcagccatcttccagaagaagtgaagtacgagaaagtagtagggcatggtcttaacgcacaggagcttgctcgtaaccctagactcgattacttcttcgtcaaggatcttaatgaagatcagaagttcgagttcgaagacaagtatttcgacgctgttttgtgttctgttggtgtacagtatctacaacaacccgaaaaggtgtttgcagaagtgtatagagtgttgaaaccgggaggagtgttgatagtgagttttagcaaccggatgttttatgagaaagcaattagggtttggcgtgatggaaccgaatacagtcggatccaattggtggttcagtactttcagtctattgaagggtttactcagccggagatcatccggcaacagcctggagctcagatatcggttttgactcggcttatgggttttatcggtttagcttctacgcccgatccttttaatgctgtcattgcttataaaaatttcaaacctatttatgagtaa

SEQ ID NO: 79744 - protein, 273 aa, Arabidopsis thaliana
  peptide (1)..(273): Ceres Seq. ID no. 12652998
  misc_feature (65)..(205): Pfam Name: ubiE/COQ5 methyltransferase family Pfam Description: ubiE/COQ5 methyltransferase family
  misc_feature (1)..(273): Homolog of NCBI NO: 15232158 NR Description: hypothetical protein; protein id: At3g01660.1 thaliana] >gi|6016723|gb|AAF01549.1|AC009325_19 hypothetical
  misc_feature (38)..(271): Homolog of NCBI NO: 38345248 NR Description: OSJNBb0011N17.9 [Oryza sativa (japonica
  misc_feature (48)..(266): Homolog of NCBI NO: 17232182 NR Description: hypothetical protein [Nostoc sp. PCC 7120]
  misc_feature (55)..(267): Homolog of NCBI NO: 23129867 NR Description: hypothetical protein [Nostoc punctiforme]
  misc_feature (48)..(268): Homolog of NCBI NO: 23042398 NR Description: hypothetical protein [Trichodesmium erythraeum
  misc_feature (48)..(266): Homolog of NCBI NO: 22298320 NR Description: ORF_ID:tlr0778~hypothetical protein
  misc_feature (49)..(266): Homolog of NCBI NO: 33865864 NR Description: conserved hypothetical protein [Synechococcus sp.
  misc_feature (49)..(266): Homolog of NCBI NO: 33863287 NR Description: conserved hypothetical protein [Prochlorococcus str. MIT 9313] >gi|33640736|emb|CAE21191.1| conserved
  misc_feature (49)..(264): Homolog of NCBI NO: 33240896 NR Description: SAM-dependent methyltransferase [Prochlorococcus
  misc_feature (63)..(266): Homolog of NCBI NO: 37519856 NR Description: hypothetical protein glr0287 [Gloeobacter
MDSLRFNLQQSPFQLKPRILRPRITNISNRIDETDPRPSSSAGRIQRLVLNNEGRTKLNADPDREFYSYPRFVNHVDDSFISSLTELYRNRLRPGSTVLDLMSSWVSHLPEEVKYEKVVGHGLNAQELARNPRLDYFFVKDLNEDQKFEFEDKYFDAVLCSVGVQYLQQPEKVFAEVYRVLKPGGVLIVSFSNRMFYEKAIRVWRDGTEYSRIQLVVQYFQSIEGFTQPEIIRQQPGAQISVLTRLMGFIGLASTPDPFNAVIAYKNFKPIYE

SEQ ID NO: 79745 - protein, 172 aa, Arabidopsis thaliana
  peptide (1)..(172): Ceres Seq. ID no. 12652999
  misc_feature (1)..(104): Pfam Name: ubiE/COQ5 methyltransferase family Pfam Description: ubiE/COQ5 methyltransferase family
  misc_feature (1)..(172): Homolog of NCBI NO: 15232158 NR Description: hypothetical protein; protein id: At3g01660.1 thaliana] >gi|6016723|gb|AAF01549.1|AC009325_19 hypothetical
  misc_feature (1)..(170): Homolog of NCBI NO: 38345248 NR Description: OSJNBb0011N17.9 [Oryza sativa (japonica
  misc_feature (1)..(165): Homolog of NCBI NO: 17232182 NR Description: hypothetical protein [Nostoc sp. PCC 7120]
  misc_feature (1)..(166): Homolog of NCBI NO: 23129867 NR Description: hypothetical protein [Nostoc punctiforme]
  misc_feature (1)..(167): Homolog of NCBI NO: 23042398 NR Description: hypothetical protein [Trichodesmium erythraeum
  misc_feature (1)..(165): Homolog of NCBI NO: 22298320 NR Description: ORF_ID:tlr0778~hypothetical protein
  misc_feature (1)..(165): Homolog of NCBI NO: 33865864 NR Description: conserved hypothetical protein [Synechococcus sp.
  misc_feature (1)..(165): Homolog of NCBI NO: 33863287 NR Description: conserved hypothetical protein [Prochlorococcus str. MIT 9313] >gi|33640736|emb|CAE21191.1| conserved
  misc_feature (1)..(163): Homolog of NCBI NO: 33240896 NR Description: SAM-dependent methyltransferase [Prochlorococcus
  misc_feature (1)..(165): Homolog of NCBI NO: 37519856 NR Description: hypothetical protein glr0287 [Gloeobacter
MSSWVSHLPEEVKYEKVVGHGLNAQELARNPRLDYFFVKDLNEDQKFEFEDKYFDAVLCSVGVQYLQQPEKVFAEVYRVLKPGGVLIVSFSNRMFYEKAIRVWRDGTEYSRIQLVVQYFQSIEGFTQPEIIRQQPGAQISVLTRLMGFIGLASTPDPFNAVIAYKNFKPIYE

SEQ ID NO: 79746 - DNA, 2478 bp, Arabidopsis thaliana
  misc_feature (1)..(2478): Ceres Seq. ID no. 12653054
  misc_feature: MA Experiment ID: 20000307 Result: Down-regulated in Transcription
  misc_feature: MA Experiment 20000307 PARAMETER Experiment Name: At_Germinating_Seeds_Sub_P Parameter: Age (hr) Value: 24 vs. 0
  misc_feature: MA Experiment 20000307 PARAMETER Experiment Name: At_Germinating_Seeds_Sub_P Parameter: Organism Value: A. thaliana
  misc_feature: MA Experiment 20000307 PARAMETER Experiment Name: At_Germinating_Seeds_Sub_P Parameter: Plant Line Value: WS
  misc_feature: MA Experiment 20000307 PARAMETER Experiment Name: At_Germinating_Seeds_Sub_P Parameter: Tissue Value: Germinating Seeds
atgaaactttattgcaactctaatgaagtccgctcacgaactcttgccactttacggcagctccgacaaccgtcaccggcgacatttctcgacacacgacgtgttgatgctcgcatcattaaaactggcttcgacacagatacgtgtcgctccaatttcatcgtcgaggaccttctcaggagaggtcaagtttctgctgcacgcaaggtgtacgacgaaatgcctcacaagaacactgtctccaccaataccatgatttccggtcacgtgaagacgggtgatgtttccagcgcccgagacctttttgacgcaatgcccgacagaactgttgtcacgtggactatcttgatggggtggtacgcccggaacagccacttcgatgaagctttcaagcttttccgtcagatgtgcaggtcttcttcctgtaccctgcccgatcatgtcacctttactacgcttttaccaggctgcaatgacgctgttccccagaacgcggtcggtcaggttcatgcttttgccgtcaagttaggctttgataccaacccctttctcactgtctccaatgttctgcttaagtcctactgtgaggtaaggcgactcgatttagcctgtgtgttgttcgaggagattccagagaaagactctgtcacgttcaacacccttattacagggtacgagaaggatggcttgtacacggagtccatccatctctttcttaaaatgcggcagtctggtcaccagccttcagatttcacattttctggggttctcaaggctgttgttgggctgcacgattttgctcttggtcagcaactccatgctctgtcagttactaccggcttctccagggatgcttctgttggcaatcaaattcttgatttctactccaaacatgaccgtgttcttgaaactaggatgctttttgatgagatgcctgagttggattttgtttcttacaatgtggtcatctcaagctactcacaggctgatcaatacgaggcatccctccacttctttagagaaatgcagtgcatggggtttgatcgcagaaacttccctttcgcgacgatgctgagcatcgctgctaacttgtcatccttgcagatgggtcgacaattgcactgccaggccctcctggcaacggctgattcaatccttcatgttgggaattctttagtagatatgtatgcaaaatgcgaaatgttcgaggaagctgagttgatattcaagagtttaccacaacggaccaccgtttcctggactgccttgatctcaggttacgttcagaaagggcttcatggagctgggcttaagttgttcaccaagatgcgaggatcaaatttacgagcagaccaatcaacttttgctactgtattgaaagcttccgctagtttcgcttctctgttgctggggaaacaactccatgcattcataatcagatcagggaacttggaaaatgtgttctccggaagtggcctggttgatatgtacgccaaatgtggttctatcaaagatgcagttcaagtattcgaagagatgcccgatagaaatgcagtttcctggaatgctttgatttcagcacacgctgataacggagatggagaagcagctattggtgcatttgcaaagatgattgaatctggtctccagccagattcagtcagcatcttaggcgtcttaactgcatgtagtcactgtggatttgttgaacaaggaacagaatatttccaggcaatgtctccaatctatgggataactccaaaaaagaagcattatgcatgcatgctggatttgcttggcagaaacggaagatttgcagaagcagagaagttgatggacgaaatgccctttgagccagatgaaattatgtggtcgtcagtgttgaacgcatgtcggattcacaagaatcaaagccttgctgagagagcagcagagaagctcttcagtatggagaagctcagggacgctgctgcttatgtaagcatgtcaaacatctatgcagcggctggggaatgggaaaaagttagggatgtgaagaaagcaatgcgcgaacgcggaatcaaaaaggttccggcttatagctgggtagaagttaaccacaagattcatgtgttctcatcaaatgatcagacacacccaaacggagatgagatcgtgagaaagatcaatgaattgacagctgagattgagagagaagggtacaagcctgacactagttcggtagtacaagacgtagatgagcagatgaagattgagtcgcttaagtaccacagtgaacgtttagccgttgcatttgctctgatcagtacaccagaagggtgtccgattgttgtgatgaagaacttgagggcctgcagggattgccatgctgcaataaaactaatatcgaagattgtaaagagggagataactgtaagggatacaagcagattccatcactttagtgagggggtctgttcttgtggtgattactggtga

SEQ ID NO: 79747 - protein, 825 aa, Arabidopsis thaliana
  peptide (1)..(825): Ceres Seq. ID no. 12653055
  misc_feature (111)..(145): Pfam Name: PPR repeat Pfam Description: PPR repeat
  misc_feature (35)..(825): Homolog of NCBI NO: 34894002 NR Description: P0672D08.11 [Oryza sativa (japonica >gi|15128441|dbj|BAB62625.1| hypothetical protein~similar to thaliana chromosome 3, F28J7.34 [Oryza sativa (japonica F28J7.34
  misc_feature (80)..(825): Homolog of NCBI NO: 15226200 NR Description: putative selenium-binding protein; protein id:
  misc_feature (33)..(105): Homolog of NCBI NO: 15226200 NR Description: putative selenium-binding protein; protein id:
  misc_feature (83)..(825): Homolog of NCBI NO: 15228590 NR Description: hypothetical protein; protein id: At3g03580.1 thaliana] >gi|6091764|gb|AAF03474.1|AC009327_13 hypothetical [Arabidopsis thaliana] >gi|28393735|gb|AAO42278.1| unknown
  misc_feature (38)..(111): Homolog of NCBI NO: 15228590 NR Description: hypothetical protein; protein id: At3g03580.1 thaliana] >gi|6091764|gb|AAF03474.1|AC009327_13 hypothetical [Arabidopsis thaliana] >gi|28393735|gb|AAO42278.1| unknown
  misc_feature (75)..(825): Homolog of NCBI NO: 15234095 NR Description: putative protein; protein id: At4g33170.1
  misc_feature (41)..(104): Homolog of NCBI NO: 15234095 NR Description: putative protein; protein id: At4g33170.1
  misc_feature (83)..(825): Homolog of NCBI NO: 25354624 NR Description: protein F3O9.28 [imported] - Arabidopsis thaliana
  misc_feature (33)..(107): Homolog of NCBI NO: 25354624 NR Description: protein F3O9.28 [imported] - Arabidopsis thaliana
  misc_feature (83)..(825): Homolog of NCBI NO: 15219258 NR Description: hypothetical protein; protein id: At1g16480.1
MKLYCNSNEVRSRTLATLRQLRQPSPATFLDTRRVDARIIKTGFDTDTCRSNFIVEDLLRRGQVSAARKVYDEMPHKNTVSTNTMISGHVKTGDVSSARDLFDAMPDRTVVTWTILMGWYARNSHFDEAFKLFRQMCRSSSCTLPDHVTFTTLLPGCNDAVPQNAVGQVHAFAVKLGFDTNPFLTVSNVLLKSYCEVRRLDLACVLFEEIPEKDSVTFNTLITGYEKDGLYTESIHLFLKMRQSGHQPSDFTFSGVLKAVVGLHDFALGQQLHALSVTTGFSRDASVGNQILDFYSKHDRVLETRMLFDEMPELDFVSYNVVISSYSQADQYEASLHFFREMQCMGFDRRNFPFATMLSIAANLSSLQMGRQLHCQALLATADSILHVGNSLVDMYAKCEMFEEAELIFKSLPQRTTVSWTALISGYVQKGLHGAGLKLFTKMRGSNLRADQSTFATVLKASASFASLLLGKQLHAFIIRSGNLENVFSGSGLVDMYAKCGSIKDAVQVFEEMPDRNAVSWNALISAHADNGDGEAAIGAFAKMIESGLQPDSVSILGVLTACSHCGFVEQGTEYFQAMSPIYGITPKKKHYACMLDLLGRNGRFAEAEKLMDEMPFEPDEIMWSSVLNACRIHKNQSLAERAAEKLFSMEKLRDAAAYVSMSNIYAAAGEWEKVRDVKKAMRERGIKKVPAYSWVEVNHKIHVFSSNDQTHPNGDEIVRKINELTAEIEREGYKPDTSSVVQDVDEQMKIESLKYHSERLAVAFALISTPEGCPIVVMKNLRACRDCHAAIKLISKIVKREITVRDTSRFHHFSEGVCSCGDYW

SEQ ID NO: 79748 - protein, 752 aa, Arabidopsis thaliana
  peptide (1)..(752): Ceres Seq. ID no. 12653056
  misc_feature (38)..(72): Pfam Name: PPR repeat Pfam Description: PPR repeat
  misc_feature (1)..(752): Homolog of NCBI NO: 34894002 NR Description: P0672D08.11 [Oryza sativa (japonica >gi|15128441|dbj|BAB62625.1| hypothetical protein~similar to thaliana chromosome 3, F28J7.34 [Oryza sativa (japonica F28J7.34
  misc_feature (7)..(752): Homolog of NCBI NO: 15226200 NR Description: putative selenium-binding protein; protein id:
  misc_feature (1)..(32): Homolog of NCBI NO: 15226200 NR Description: putative selenium-binding protein; protein id:
  misc_feature (10)..(752): Homolog of NCBI NO: 15228590 NR Description: hypothetical protein; protein id: At3g03580.1 thaliana] >gi|6091764|gb|AAF03474.1|AC009327_13 hypothetical [Arabidopsis thaliana] >gi|28393735|gb|AAO42278.1| unknown
  misc_feature (1)..(38): Homolog of NCBI NO: 15228590 NR Description: hypothetical protein; protein id: At3g03580.1 thaliana] >gi|6091764|gb|AAF03474.1|AC009327_13 hypothetical [Arabidopsis thaliana] >gi|28393735|gb|AAO42278.1| unknown
  misc_feature (2)..(752): Homolog of NCBI NO: 15234095 NR Description: putative protein; protein id: At4g33170.1
  misc_feature (1)..(31): Homolog of NCBI NO: 15234095 NR Description: putative protein; protein id: At4g33170.1
  misc_feature (10)..(752): Homolog of NCBI NO: 25354624 NR Description: protein F3O9.28 [imported] - Arabidopsis thaliana
  misc_feature (1)..(34): Homolog of NCBI NO: 25354624 NR Description: protein F3O9.28 [imported] - Arabidopsis thaliana
  misc_feature (10)..(752): Homolog of NCBI NO: 15219258 NR Description: hypothetical protein; protein id: At1g16480.1
MPHKNTVSTNTMISGHVKTGDVSSARDLFDAMPDRTVVTWTILMGWYARNSHFDEAFKLFRQMCRSSSCTLPDHVTFTTLLPGCNDAVPQNAVGQVHAFAVKLGFDTNPFLTVSNVLLKSYCEVRRLDLACVLFEEIPEKDSVTFNTLITGYEKDGLYTESIHLFLKMRQSGHQPSDFTFSGVLKAVVGLHDFALGQQLHALSVTTGFSRDASVGNQILDFYSKHDRVLETRMLFDEMPELDFVSYNVVISSYSQADQYEASLHFFREMQCMGFDRRNFPFATMLSIAANLSSLQMGRQLHCQALLATADSILHVGNSLVDMYAKCEMFEEAELIFKSLPQRTTVSWTALISGYVQKGLHGAGLKLFTKMRGSNLRADQSTFATVLKASASFASLLLGKQLHAFIIRSGNLENVFSGSGLVDMYAKCGSIKDAVQVFEEMPDRNAVSWNALISAHADNGDGEAAIGAFAKMIESGLQPDSVSILGVLTACSHCGFVEQGTEYFQAMSPIYGITPKKKHYACMLDLLGRNGRFAEAEKLMDEMPFEPDEIMWSSVLNACRIHKNQSLAERAAEKLFSMEKLRDAAAYVSMSNIYAAAGEWEKVRDVKKAMRERGIKKVPAYSWVEVNHKIHVFSSNDQTHPNGDEIVRKINELTAEIEREGYKPDTSSVVQDVDEQMKIESLKYHSERLAVAFALISTPEGCPIVVMKNLRACRDCHAAIKLISKIVKREITVRDTSRFHHFSEGVCSCGDYW

SEQ ID NO: 79749 - protein, 741 aa, Arabidopsis thaliana
  peptide (1)..(741): Ceres Seq. ID no. 12653057
  misc_feature (27)..(61): Pfam Name: PPR repeat Pfam Description: PPR repeat
  misc_feature (1)..(741): Homolog of NCBI NO: 34894002 NR Description: P0672D08.11 [Oryza sativa (japonica >gi|15128441|dbj|BAB62625.1| hypothetical protein~similar to thaliana chromosome 3, F28J7.34 [Oryza sativa (japonica F28J7.34
  misc_feature (1)..(741): Homolog of NCBI NO: 15226200 NR Description: putative selenium-binding protein; protein id:
  misc_feature (1)..(21): Homolog of NCBI NO: 15226200 NR Description: putative selenium-binding protein; protein id:
  misc_feature (1)..(741): Homolog of NCBI NO: 15228590 NR Description: hypothetical protein; protein id: At3g03580.1 thaliana] >gi|6091764|gb|AAF03474.1|AC009327_13 hypothetical [Arabidopsis thaliana] >gi|28393735|gb|AAO42278.1| unknown
  misc_feature (1)..(27): Homolog of NCBI NO: 15228590 NR Description: hypothetical protein; protein id: At3g03580.1 thaliana] >gi|6091764|gb|AAF03474.1|AC009327_13 hypothetical [Arabidopsis thaliana] >gi|28393735|gb|AAO42278.1| unknown
  misc_feature (1)..(741): Homolog of NCBI NO: 15234095 NR Description: putative protein; protein id: At4g33170.1
  misc_feature (1)..(20): Homolog of NCBI NO: 15234095 NR Description: putative protein; protein id: At4g33170.1
  misc_feature (1)..(741): Homolog of NCBI NO: 25354624 NR Description: protein F3O9.28 [imported] - Arabidopsis thaliana
  misc_feature (1)..(23): Homolog of NCBI NO: 25354624 NR Description: protein F3O9.28 [imported] - Arabidopsis thaliana
  misc_feature (1)..(741): Homolog of NCBI NO: 15219258 NR Description: hypothetical protein; protein id: At1g16480.1
MISGHVKTGDVSSARDLFDAMPDRTVVTWTILMGWYARNSHFDEAFKLFRQMCRSSSCTLPDHVTFTTLLPGCNDAVPQNAVGQVHAFAVKLGFDTNPFLTVSNVLLKSYCEVRRLDLACVLFEEIPEKDSVTFNTLITGYEKDGLYTESIHLFLKMRQSGHQPSDFTFSGVLKAVVGLHDFALGQQLHALSVTTGFSRDASVGNQILDFYSKHDRVLETRMLFDEMPELDFVSYNVVISSYSQADQYEASLHFFREMQCMGFDRRNFPFATMLSIAANLSSLQMGRQLHCQALLATADSILHVGNSLVDMYAKCEMFEEAELIFKSLPQRTTVSWTALISGYVQKGLHGAGLKLFTKMRGSNLRADQSTFATVLKASASFASLLLGKQLHAFIIRSGNLENVFSGSGLVDMYAKCGSIKDAVQVFEEMPDRNAVSWNALISAHADNGDGEAAIGAFAKMIESGLQPDSVSILGVLTACSHCGFVEQGTEYFQAMSPIYGITPKKKHYACMLDLLGRNGRFAEAEKLMDEMPFEPDEIMWSSVLNACRIHKNQSLAERAAEKLFSMEKLRDAAAYVSMSNIYAAAGEWEKVRDVKKAMRERGIKKVPAYSWVEVNHKIHVFSSNDQTHPNGDEIVRKINELTAEIEREGYKPDTSSVVQDVDEQMKIESLKYHSERLAVAFALISTPEGCPIVVMKNLRACRDCHAAIKLISKIVKREITVRDTSRFHHFSEGVCSCGDYW

SEQ ID NO: 79750 - DNA, 765 bp, Arabidopsis thaliana
  misc_feature (1)..(765): Ceres Seq. ID no. 12653068
  misc_feature: MA Experiment ID: 20000227 Result: Down-regulated in Transcription
  misc_feature: MA Experiment 20000227 PARAMETER Experiment Name: At_Root-Tips-vs-Tops_P Parameter: Tissue Value: Root Tips vs. Root Tops
  misc_feature: MA Experiment ID: 20000269 Result: Up-regulated in Transcription
  misc_feature: MA Experiment 20000269 PARAMETER Experiment Name: At_1mM_KNO3_L-vs-H_Roots_P Parameter: Age (day) Value: 7,10,12
  misc_feature: MA Experiment 20000269 PARAMETER Experiment Name: At_1mM_KNO3_L-vs-H_Roots_P Parameter: Organism Value: A. thaliana
  misc_feature: MA Experiment 20000269 PARAMETER Experiment Name: At_1mM_KNO3_L-vs-H_Roots_P Parameter: Plant Line Value: WS
  misc_feature: MA Experiment 20000269 PARAMETER Experiment Name: At_1mM_KNO3_L-vs-H_Roots_P Parameter: Timepoint (day) Value: 7,10,12
  misc_feature: MA Experiment 20000269 PARAMETER Experiment Name: At_1mM_KNO3_L-vs-H_Roots_P Parameter: Tissue Value: Roots
  misc_feature: MA Experiment 20000269 PARAMETER Experiment Name: At_1mM_KNO3_L-vs-H_Roots_P Parameter: Treatment Value: 1mM KNO3 vs. 50mM KNO3
  misc_feature: MA Experiment ID: 20000439 Result: Up-regulated in Transcription
  misc_feature: MA Experiment 20000439 PARAMETER Experiment Name: At_Roots__P Parameter: Age (day) Value: 14 vs. 21
  misc_feature: MA Experiment 20000439 PARAMETER Experiment Name: At_Roots__P Parameter: Organism Value: A. thaliana
  misc_feature: MA Experiment 20000439 PARAMETER Experiment Name: At_Roots__P Parameter: Tissue Value: Roots vs. Whole Plant
  misc_feature: MA Experiment ID: 20000460 Result: Down-regulated in Transcription
  misc_feature: MA Experiment 20000460 PARAMETER Experiment Name: At_10percent_PEG_P Parameter: Age (day) Value: 12
  misc_feature: MA Experiment 20000460 PARAMETER Experiment Name: At_10percent_PEG_P Parameter: Organism Value: A. thaliana
  misc_feature: MA Experiment 20000460 PARAMETER Experiment Name: At_10percent_PEG_P Parameter: Plant Line Value: WS
  misc_feature: MA Experiment 20000460 PARAMETER Experiment Name: At_10percent_PEG_P Parameter: Timepoint (day) Value: 12
  misc_feature: MA Experiment 20000460 PARAMETER Experiment Name: At_10percent_PEG_P Parameter: Tissue Value: Whole Plant
  misc_feature: MA Experiment 20000460 PARAMETER Experiment Name: At_10percent_PEG_P Parameter: Treatment Value: 10percent PEG vs. No Treatment
  misc_feature: MA Experiment ID: 20000527 Result: Down-regulated in Transcription
  misc_feature: MA Experiment 20000527 PARAMETER Experiment Name: At_10percent_PEG_P Parameter: Age (day) Value: 20
  misc_feature: MA Experiment 20000527 PARAMETER Experiment Name: At_10percent_PEG_P Parameter: Organism Value: A. thaliana
  misc_feature: MA Experiment 20000527 PARAMETER Experiment Name: At_10percent_PEG_P Parameter: Plant Line Value: WS
  misc_feature: MA Experiment 20000527 PARAMETER Experiment Name: At_10percent_PEG_P Parameter: Timepoint (day) Value: 20
  misc_feature: MA Experiment 20000527 PARAMETER Experiment Name: At_10percent_PEG_P Parameter: Tissue Value: Whole Plant
  misc_feature: MA Experiment 20000527 PARAMETER Experiment Name: At_10percent_PEG_P Parameter: Treatment Value: 10percent PEG vs. No Treatment
  misc_feature: MA Experiment ID: 20000574 Result: Down-regulated in Transcription
  misc_feature: MA Experiment 20000574 PARAMETER Experiment Name: At_100uM_ABA_Mutants__P Parameter: Organism Value: A. thaliana
  misc_feature: MA Experiment 20000574 PARAMETER Experiment Name: At_100uM_ABA_Mutants__P Parameter: Plant Line Value: CS23 vs. Ler wt
  misc_feature: MA Experiment 20000574 PARAMETER Experiment Name: At_100uM_ABA_Mutants__P Parameter: Timepoint (hr) Value: N/A
  misc_feature: MA Experiment 20000574 PARAMETER Experiment Name: At_100uM_ABA_Mutants__P Parameter: Tissue Value: Whole Plant
  misc_feature: MA Experiment 20000574 PARAMETER Experiment Name: At_100uM_ABA_Mutants__P Parameter: Treatment Value: None
  misc_feature: MA Experiment ID: 20000606 Result: Up-regulated in Transcription
  misc_feature: MA Experiment 20000606 PARAMETER Experiment Name: At_CS8548_Mutant_P Parameter: Age (day) Value: 14
  misc_feature: MA Experiment 20000606 PARAMETER Experiment Name: At_CS8548_Mutant_P Parameter: Plant Line Value: CS8548 vs. wt
  misc_feature: MA Experiment 20000606 PARAMETER Experiment Name: At_CS8548_Mutant_P Parameter: Tissue Value: Whole Plant
atggctgattctaagatgaagctccactgtggctttatctggggtaattcggcagctctcttttgtatcaatgagaaaggtcttgactttgagcttgtcttcgtagattggcttgctggtgaagccaaaaccaaaacttttctctctactctcaacccatttggtgaagtcccggttcttgaagatggagatctcaaacttttcgaaccaaaggcgatcacgcgatacctagccgagcaatacaaagacgttggaacaaatctattaccagatgatcccaaaaagagagcaatcatgtcgatgtggatggaagtagatagcaatcaatttcttcctatagcatcaacactcatcaaagaactcatcatcaatccatatcaaggtttagccacagacgatacagcagttcaagagaacaaagaaaagttatcagaggttctgaacatctacgagactcgtttaggcgagtctccttacttggctggtgaaagcttcagtttagcggatctgcatcatcttgcgccgattgattacttgttgaacacggacgaagaagagttgaaaaacttgatctattcacgtcccaatgtagcggcatgggtcgagaaaatgaaaatgaggccagcttggctgaaaacagtagtcatgaaaaatcacatcgttgacttgatgaagcagcgtcgtttgcctataaagttagattcatcgtgtcatgagtcaaccgttgtggctcaaaaaaatgcgatcgccattgagaacaagtaa

SEQ ID NO: 79751 - protein, 254 aa, Arabidopsis thaliana
  peptide (1)..(254): Ceres Seq. ID no. 12653069
  misc_feature (25)..(79): Pfam Name: Glutathione S-transferase, N-terminal domain Pfam Description: Glutathione S-transferase, N-terminal domain
  misc_feature (1)..(254): Homolog of NCBI NO: 15222832 NR Description: glutathione transferase, putative; protein id: [Arabidopsis thaliana] >gi|25287133|pir||E96535 hypothetical
  misc_feature (23)..(217): Homolog of NCBI NO: 1170094 NR Description: Glutathione S-transferase (GST class-PHI) (25 kDa binding protein) >gi|860956|emb|CAA55039.1| glutathione
  misc_feature (23)..(214): Homolog of NCBI NO: 7434067 NR Description: glutathione transferase (EC 2.5.1.18), class-phi -
  misc_feature (22)..(212): Homolog of NCBI NO: 1170088 NR Description: GLUTATHIONE S-TRANSFERASE APIC (GST CLASS-PHI)
  misc_feature (22)..(209): Homolog of NCBI NO: 1279588 NR Description: glutathione S-transferase [Nicotiana
  misc_feature (22)..(212): Homolog of NCBI NO: 232202 NR Description: GLUTATHIONE S-TRANSFERASE PARB (GST CLASS-PHI)
  misc_feature (20)..(226): Homolog of NCBI NO: 12643792 NR Description: Glutathione S-transferase 6 (GST class phi)
  misc_feature (20)..(226): Homolog of NCBI NO: 30690772 NR Description: glutathione transferase, putative (GST6)
  misc_feature (6)..(216): Homolog of NCBI NO: 7649155 NR Description: glutathione S-transferase [Euphorbia esula]
  misc_feature (25)..(216): Homolog of NCBI NO: 16416392 NR Description: glutathione S-transferase [Medicago sativa]
MADSKMKLHCGFIWGNSAALFCINEKGLDFELVFVDWLAGEAKTKTFLSTLNPFGEVPVLEDGDLKLFEPKAITRYLAEQYKDVGTNLLPDDPKKRAIMSMWMEVDSNQFLPIASTLIKELIINPYQGLATDDTAVQENKEKLSEVLNIYETRLGESPYLAGESFSLADLHHLAPIDYLLNTDEEELKNLIYSRPNVAAWVEKMKMRPAWLKTVVMKNHIVDLMKQRRLPIKLDSSCHESTVVAQKNAIAIENK

SEQ ID NO: 79752 - protein, 249 aa, Arabidopsis thaliana
  peptide (1)..(249): Ceres Seq. ID no. 12653070
  misc_feature (20)..(74): Pfam Name: Glutathione S-transferase, N-terminal domain Pfam Description: Glutathione S-transferase, N-terminal domain
  misc_feature (1)..(249): Homolog of NCBI NO: 15222832 NR Description: glutathione transferase, putative; protein id: [Arabidopsis thaliana] >gi|25287133|pir||E96535 hypothetical
  misc_feature (18)..(212): Homolog of NCBI NO: 1170094 NR Description: Glutathione S-transferase (GST class-PHI) (25 kDa binding protein) >gi|860956|emb|CAA55039.1| glutathione
  misc_feature (18)..(209): Homolog of NCBI NO: 7434067 NR Description: glutathione transferase (EC 2.5.1.18), class-phi -
  misc_feature (17)..(207): Homolog of NCBI NO: 1170088 NR Description: GLUTATHIONE S-TRANSFERASE APIC (GST CLASS-PHI)
  misc_feature (17)..(204): Homolog of NCBI NO: 1279588 NR Description: glutathione S-transferase [Nicotiana
  misc_feature (17)..(207): Homolog of NCBI NO: 232202 NR Description: GLUTATHIONE S-TRANSFERASE PARB (GST CLASS-PHI)
  misc_feature (15)..(221): Homolog of NCBI NO: 12643792 NR Description: Glutathione S-transferase 6 (GST class phi)
  misc_feature (15)..(221): Homolog of NCBI NO: 30690772 NR Description: glutathione transferase, putative (GST6)
  misc_feature (1)..(211): Homolog of NCBI NO: 7649155 NR Description: glutathione S-transferase [Euphorbia esula]
  misc_feature (20)..(211): Homolog of NCBI NO: 16416392 NR Description: glutathione S-transferase [Medicago sativa]
MKLHCGFIWGNSAALFCINEKGLDFELVFVDWLAGEAKTKTFLSTLNPFGEVPVLEDGDLKLFEPKAITRYLAEQYKDVGTNLLPDDPKKRAIMSMWMEVDSNQFLPIASTLIKELIINPYQGLATDDTAVQENKEKLSEVLNIYETRLGESPYLAGESFSLADLHHLAPIDYLLNTDEEELKNLIYSRPNVAAWVEKMKMRPAWLKTVVMKNHIVDLMKQRRLPIKLDSSCHESTVVAQKNAIAIENK

SEQ ID NO: 79753 - protein, 156 aa, Arabidopsis thaliana
  peptide (1)..(156): Ceres Seq. ID no. 12653071
  misc_feature (1)..(156): Homolog of NCBI NO: 15222832 NR Description: glutathione transferase, putative; protein id: [Arabidopsis thaliana] >gi|25287133|pir||E96535 hypothetical
  misc_feature (1)..(119): Homolog of NCBI NO: 1170094 NR Description: Glutathione S-transferase (GST class-PHI) (25 kDa binding protein) >gi|860956|emb|CAA55039.1| glutathione
  misc_feature (1)..(116): Homolog of NCBI NO: 7434067 NR Description: glutathione transferase (EC 2.5.1.18), class-phi -
  misc_feature (1)..(114): Homolog of NCBI NO: 1170088 NR Description: GLUTATHIONE S-TRANSFERASE APIC (GST CLASS-PHI)
  misc_feature (1)..(111): Homolog of NCBI NO: 1279588 NR Description: glutathione S-transferase [Nicotiana
  misc_feature (1)..(114): Homolog of NCBI NO: 232202 NR Description: GLUTATHIONE S-TRANSFERASE PARB (GST CLASS-PHI)
  misc_feature (1)..(128): Homolog of NCBI NO: 12643792 NR Description: Glutathione S-transferase 6 (GST class phi)
  misc_feature (1)..(128): Homolog of NCBI NO: 30690772 NR Description: glutathione transferase, putative (GST6)
  misc_feature (1)..(118): Homolog of NCBI NO: 7649155 NR Description: glutathione S-transferase [Euphorbia esula]
  misc_feature (1)..(118): Homolog of NCBI NO: 16416392 NR Description: glutathione S-transferase [Medicago sativa]
MSMWMEVDSNQFLPIASTLIKELIINPYQGLATDDTAVQENKEKLSEVLNIYETRLGESPYLAGESFSLADLHHLAPIDYLLNTDEEELKNLIYSRPNVAAWVEKMKMRPAWLKTVVMKNHIVDLMKQRRLPIKLDSSCHESTVVAQKNAIAIENK

SEQ ID NO: 79754 - DNA, 1614 bp, Arabidopsis thaliana
  misc_feature (1)..(1614): Ceres Seq. ID no. 12653091
  misc_feature: MA Experiment ID: 20000182 Result: Down-regulated in Transcription
  misc_feature: MA Experiment 20000182 PARAMETER Experiment Name: At_2mM_SA_P Parameter: Age (day) Value: 14
  misc_feature: MA Experiment 20000182 PARAMETER Experiment Name: At_2mM_SA_P Parameter: Organism Value: A. thaliana
  misc_feature: MA Experiment 20000182 PARAMETER Experiment Name: At_2mM_SA_P Parameter: Plant Line Value: WS
  misc_feature: MA Experiment 20000182 PARAMETER Experiment Name: At_2mM_SA_P Parameter: Timepoint (hr) Value: 6
  misc_feature: MA Experiment 20000182 PARAMETER Experiment Name: At_2mM_SA_P Parameter: Tissue Value: Aerial
  misc_feature: MA Experiment 20000182 PARAMETER Experiment Name: At_2mM_SA_P Parameter: Treatment Value: 2mM SA vs. No Treatment
  misc_feature: MA Experiment ID: 20000185 Result: Down-regulated in Transcription
  misc_feature: MA Experiment 20000185 PARAMETER Experiment Name: At_Roots__P Parameter: Age (day) Value: 7 vs. 21
  misc_feature: MA Experiment 20000185 PARAMETER Experiment Name: At_Roots__P Parameter: Organism Value: A. thaliana
  misc_feature: MA Experiment 20000185 PARAMETER Experiment Name: At_Roots__P Parameter: Tissue Value: Roots vs. Whole Plant
  misc_feature: MA Experiment ID: 20000234 Result: Down-regulated in Transcription
  misc_feature: MA Experiment 20000234 PARAMETER Experiment Name: At_Siliques_P Parameter: Age (day) Value: 21
  misc_feature: MA Experiment 20000234 PARAMETER Experiment Name: At_Siliques_P Parameter: Organism Value: A. thaliana
  misc_feature: MA Experiment 20000234 PARAMETER Experiment Name: At_Siliques_P Parameter: Plant Line Value: WS
  misc_feature: MA Experiment 20000234 PARAMETER Experiment Name: At_Siliques_P Parameter: Tissue Value: Less Than 5mm Siliques vs. Whole Plant
  misc_feature: MA Experiment ID: 20000264 Result: Down-regulated in Transcription
  misc_feature: MA Experiment 20000264 PARAMETER Experiment Name: At_Open_Flower_P Parameter: Age (day) Value: 21
  misc_feature: MA Experiment 20000264 PARAMETER Experiment Name: At_Open_Flower_P Parameter: Plant Line Value: WS
  misc_feature: MA Experiment 20000264 PARAMETER Experiment Name: At_Open_Flower_P Parameter: Tissue Value: Open Flower vs. Whole Plant
  misc_feature: MA Experiment ID: 20000265 Result: Down-regulated in Transcription
  misc_feature: MA Experiment 20000265 PARAMETER Experiment Name: At_Open_Flower_P Parameter: Age (day) Value: 21
  misc_feature: MA Experiment 20000265 PARAMETER Experiment Name: At_Open_Flower_P Parameter: Plant Line Value: WS
  misc_feature: MA Experiment 20000265 PARAMETER Experiment Name: At_Open_Flower_P Parameter: Tissue Value: Closed Flower vs. Whole Plant
  misc_feature: MA Experiment ID: 20000286 Result: Down-regulated in Transcription
  misc_feature: MA Experiment 20000286 PARAMETER Experiment Name: At_Open_Flower_P Parameter: Age (day) Value: 21
  misc_feature: MA Experiment 20000286 PARAMETER Experiment Name: At_Open_Flower_P Parameter: Plant Line Value: WS
  misc_feature: MA Experiment 20000286 PARAMETER Experiment Name: At_Open_Flower_P Parameter: Tissue Value: Half Open vs. Whole Plant
  misc_feature: MA Experiment ID: 20000438 Result: Down-regulated in Transcription
  misc_feature: MA Experiment 20000438 PARAMETER Experiment Name: At_Shoots__P Parameter: Age (day) Value: 14
  misc_feature: MA Experiment 20000438 PARAMETER Experiment Name: At_Shoots__P Parameter: Tissue Value: Shoots vs. Whole Plant
  misc_feature: MA Experiment ID: 20000439 Result: Down-regulated in Transcription
  misc_feature: MA Experiment 20000439 PARAMETER Experiment Name: At_Roots__P Parameter: Age (day) Value: 14 vs. 21
  misc_feature: MA Experiment 20000439 PARAMETER Experiment Name: At_Roots__P Parameter: Organism Value: A. thaliana
  misc_feature: MA Experiment 20000439 PARAMETER Experiment Name: At_Roots__P Parameter: Tissue Value: Roots vs. Whole Plant
  misc_feature: MA Experiment ID: 20000452 Result: Down-regulated in Transcription
  misc_feature: MA Experiment 20000452 PARAMETER Experiment Name: At_CS6879_Shoots-Roots_P Parameter: Age (day) Value: 14
  misc_feature: MA Experiment 20000452 PARAMETER Experiment Name: At_CS6879_Shoots-Roots_P Parameter: Organism Value: A. thaliana
  misc_feature: MA Experiment 20000452 PARAMETER Experiment Name: At_CS6879_Shoots-Roots_P Parameter: Plant Line Value: CS6879 vs. WS
  misc_feature: MA Experiment 20000452 PARAMETER Experiment Name: At_CS6879_Shoots-Roots_P Parameter: Tissue Value: Shoots
  misc_feature: MA Experiment ID: 20000527 Result: Up-regulated in Transcription
  misc_feature: MA Experiment 20000527 PARAMETER Experiment Name: At_10percent_PEG_P Parameter: Age (day) Value: 20
  misc_feature: MA Experiment 20000527 PARAMETER Experiment Name: At_10percent_PEG_P Parameter: Organism Value: A. thaliana
  misc_feature: MA Experiment 20000527 PARAMETER Experiment Name: At_10percent_PEG_P Parameter: Plant Line Value: WS
  misc_feature: MA Experiment 20000527 PARAMETER Experiment Name: At_10percent_PEG_P Parameter: Timepoint (day) Value: 20
  misc_feature: MA Experiment 20000527 PARAMETER Experiment Name: At_10percent_PEG_P Parameter: Tissue Value: Whole Plant
  misc_feature: MA Experiment 20000527 PARAMETER Experiment Name: At_10percent_PEG_P Parameter: Treatment Value: 10percent PEG vs. No Treatment
  misc_feature: MA Experiment ID: 20000606 Result: Up-regulated in Transcription
  misc_feature: MA Experiment 20000606 PARAMETER Experiment Name: At_CS8548_Mutant_P Parameter: Age (day) Value: 14
  misc_feature: MA Experiment 20000606 PARAMETER Experiment Name: At_CS8548_Mutant_P Parameter: Plant Line Value: CS8548 vs. wt
  misc_feature: MA Experiment 20000606 PARAMETER Experiment Name: At_CS8548_Mutant_P Parameter: Tissue Value: Whole Plant
  misc_feature: MA Experiment ID: 20000794 Result: Down-regulated in Transcription
  misc_feature: MA Experiment 20000794 PARAMETER Experiment Name: At_Petals_P Parameter: Age (day) Value: 23-25 days
  misc_feature: MA Experiment 20000794 PARAMETER Experiment Name: At_Petals_P Parameter: Plant Line Value: WS
  misc_feature: MA Experiment 20000794 PARAMETER Experiment Name: At_Petals_P Parameter: Tissue Value: Petals vs. Whole plant
  misc_feature: MA Experiment ID: 20001247 Result: Up-regulated in Transcription
  misc_feature: MA Experiment 20001247 PARAMETER Experiment Name: At_Far-red-induction_P Parameter: Age (day) Value: 7
  misc_feature: MA Experiment 20001247 PARAMETER Experiment Name: At_Far-red-induction_P Parameter: Light Value: Far-red vs. White
  misc_feature: MA Experiment 20001247 PARAMETER Experiment Name: At_Far-red-induction_P Parameter: Organism Value: A. thaliana
  misc_feature: MA Experiment 20001247 PARAMETER Experiment Name: At_Far-red-induction_P Parameter: Plant Line Value: Columbia
  misc_feature: MA Experiment 20001247 PARAMETER Experiment Name: At_Far-red-induction_P Parameter: Timepoint (hr) Value: 1
  misc_feature: MA Experiment 20001247 PARAMETER Experiment Name: At_Far-red-induction_P Parameter: Tissue Value: Whole Plant
  misc_feature: MA Experiment ID: 20001450 Result: Up-regulated in Transcription
  misc_feature: MA Experiment 20001450 PARAMETER Experiment Name: At_Far-red-induction_P Parameter: Age (day) Value: 7
  misc_feature: MA Experiment 20001450 PARAMETER Experiment Name: At_Far-red-induction_P Parameter: Light Value: Far-red vs. White
  misc_feature: MA Experiment 20001450 PARAMETER Experiment Name: At_Far-red-induction_P Parameter: Organism Value: A. thaliana
  misc_feature: MA Experiment 20001450 PARAMETER Experiment Name: At_Far-red-induction_P Parameter: Plant Line Value: Columbia
  misc_feature: MA Experiment 20001450 PARAMETER Experiment Name: At_Far-red-induction_P Parameter: Timepoint (hr) Value: 8
  misc_feature: MA Experiment 20001450 PARAMETER Experiment Name: At_Far-red-induction_P Parameter: Tissue Value: Whole Plant
  misc_feature: MA Experiment ID: 20001451 Result: Up-regulated in Transcription
  misc_feature: MA Experiment 20001451 PARAMETER Experiment Name: At_Far-red-induction_P Parameter: Age (day) Value: 7
  misc_feature: MA Experiment 20001451 PARAMETER Experiment Name: At_Far-red-induction_P Parameter: Light Value: Far-red vs. White
  misc_feature: MA Experiment 20001451 PARAMETER Experiment Name: At_Far-red-induction_P Parameter: Organism Value: A. thaliana
  misc_feature: MA Experiment 20001451 PARAMETER Experiment Name: At_Far-red-induction_P Parameter: Plant Line Value: Columbia
  misc_feature: MA Experiment 20001451 PARAMETER Experiment Name: At_Far-red-induction_P Parameter: Timepoint (hr) Value: 24
  misc_feature: MA Experiment 20001451 PARAMETER Experiment Name: At_Far-red-induction_P Parameter: Tissue Value: Whole Plant
  misc_feature: MA Experiment ID: 20001556 Result: Down-regulated in Transcription
  misc_feature: MA Experiment 20001556 PARAMETER Experiment Name: At_Drought_Soil_Dry_P Parameter: Age (day) Value: 26
  misc_feature: MA Experiment 20001556 PARAMETER Experiment Name: At_Drought_Soil_Dry_P Parameter: Organism Value: A. thaliana
  misc_feature: MA Experiment 20001556 PARAMETER Experiment Name: At_Drought_Soil_Dry_P Parameter: Plant Line Value: WS
  misc_feature: MA Experiment 20001556 PARAMETER Experiment Name: At_Drought_Soil_Dry_P Parameter: Post Timepoint (hr) Value: None
  misc_feature: MA Experiment 20001556 PARAMETER Experiment Name: At_Drought_Soil_Dry_P Parameter: Post-Treatment Value: None
  misc_feature: MA Experiment 20001556 PARAMETER Experiment Name: At_Drought_Soil_Dry_P Parameter: Timepoint (day) Value: 12
  misc_feature: MA Experiment 20001556 PARAMETER Experiment Name: At_Drought_Soil_Dry_P Parameter: Treatment Value: Drought vs. No Drought
  misc_feature: MA Experiment ID: 20001557 Result: Up-regulated in Transcription
  misc_feature: MA Experiment 20001557 PARAMETER Experiment Name: At_Drought_Soil_Dry_P Parameter: Age (day) Value: 27
  misc_feature: MA Experiment 20001557 PARAMETER Experiment Name: At_Drought_Soil_Dry_P Parameter: Organism Value: A. thaliana
  misc_feature: MA Experiment 20001557 PARAMETER Experiment Name: At_Drought_Soil_Dry_P Parameter: Plant Line Value: WS
  misc_feature: MA Experiment 20001557 PARAMETER Experiment Name: At_Drought_Soil_Dry_P Parameter: Post Timepoint (hr) Value: 3
  misc_feature: MA Experiment 20001557 PARAMETER Experiment Name: At_Drought_Soil_Dry_P Parameter: Post-Treatment Value: Re-Water vs. No Drought
  misc_feature: MA Experiment 20001557 PARAMETER Experiment Name: At_Drought_Soil_Dry_P Parameter: Timepoint (day) Value: 13
  misc_feature: MA Experiment 20001557 PARAMETER Experiment Name: At_Drought_Soil_Dry_P Parameter: Treatment Value: Drought vs. No Drought
  misc_feature: MA Experiment ID: 20001558 Result: Up-regulated in Transcription
  misc_feature: MA Experiment 20001558 PARAMETER Experiment Name: At_Drought_Soil_Dry_P Parameter: Age (day) Value: 27
  misc_feature: MA Experiment 20001558 PARAMETER Experiment Name: At_Drought_Soil_Dry_P Parameter: Organism Value: A. thaliana
  misc_feature: MA Experiment 20001558 PARAMETER Experiment Name: At_Drought_Soil_Dry_P Parameter: Plant Line Value: WS
  misc_feature: MA Experiment 20001558 PARAMETER Experiment Name: At_Drought_Soil_Dry_P Parameter: Post Timepoint (hr) Value: 6
  misc_feature: MA Experiment 20001558 PARAMETER Experiment Name: At_Drought_Soil_Dry_P Parameter: Post-Treatment Value: Re-Water vs. No Drought
  misc_feature: MA Experiment 20001558 PARAMETER Experiment Name: At_Drought_Soil_Dry_P Parameter: Timepoint (day) Value: 13
  misc_feature: MA Experiment 20001558 PARAMETER Experiment Name: At_Drought_Soil_Dry_P Parameter: Treatment Value: Drought vs. No Drought
  misc_feature: MA Experiment ID: 20001560 Result: Up-regulated in Transcription
  misc_feature: MA Experiment 20001560 PARAMETER Experiment Name: At_Drought_Soil_Dry_P Parameter: Age (day) Value: 28
  misc_feature: MA Experiment 20001560 PARAMETER Experiment Name: At_Drought_Soil_Dry_P Parameter: Organism Value: A. thaliana
  misc_feature: MA Experiment 20001560 PARAMETER Experiment Name: At_Drought_Soil_Dry_P Parameter: Plant Line Value: WS
  misc_feature: MA Experiment 20001560 PARAMETER Experiment Name: At_Drought_Soil_Dry_P Parameter: Post Timepoint (hr) Value: None
  misc_feature: MA Experiment 20001560 PARAMETER Experiment Name: At_Drought_Soil_Dry_P Parameter: Post-Treatment Value: None
  misc_feature: MA Experiment 20001560 PARAMETER Experiment Name: At_Drought_Soil_Dry_P Parameter: Timepoint (day) Value: 14
  misc_feature: MA Experiment 20001560 PARAMETER Experiment Name: At_Drought_Soil_Dry_P Parameter: Treatment Value: Drought vs. No Drought
  misc_feature: MA Experiment ID: 20001904 Result: Down-regulated in Transcription
  misc_feature: MA Experiment 20001904 PARAMETER Experiment Name: At_Drought_Reproduction_P Parameter: Age (day) Value: 37
  misc_feature: MA Experiment 20001904 PARAMETER Experiment Name: At_Drought_Reproduction_P Parameter: Organism Value: A. thaliana
  misc_feature: MA Experiment 20001904 PARAMETER Experiment Name: At_Drought_Reproduction_P Parameter: Plant Line Value: WS
  misc_feature: MA Experiment 20001904 PARAMETER Experiment Name: At_Drought_Reproduction_P Parameter: Timepoint (day) Value: 7
  misc_feature: MA Experiment 20001904 PARAMETER Experiment Name: At_Drought_Reproduction_P Parameter: Tissue Value: Rosettes
  misc_feature: MA Experiment 20001904 PARAMETER Experiment Name: At_Drought_Reproduction_P Parameter: Treatment Value: Drought vs. No Drought
  misc_feature: MA Experiment ID: 20001906 Result: Down-regulated in Transcription
  misc_feature: MA Experiment 20001906 PARAMETER Experiment Name: At_Drought_Reproduction_P Parameter: Age (day) Value: 35
  misc_feature: MA Experiment 20001906 PARAMETER Experiment Name: At_Drought_Reproduction_P Parameter: Organism Value: A. thaliana
  misc_feature: MA Experiment 20001906 PARAMETER Experiment Name: At_Drought_Reproduction_P Parameter: Plant Line Value: WS
  misc_feature: MA Experiment 20001906 PARAMETER Experiment Name: At_Drought_Reproduction_P Parameter: Timepoint (day) Value: 5
  misc_feature: MA Experiment 20001906 PARAMETER Experiment Name: At_Drought_Reproduction_P Parameter: Tissue Value: Siliques
  misc_feature: MA Experiment 20001906 PARAMETER Experiment Name: At_Drought_Reproduction_P Parameter: Treatment Value: Drought vs. No Drought
  misc_feature: MA Experiment ID: 20001907 Result: Down-regulated in Transcription
  misc_feature: MA Experiment 20001907 PARAMETER Experiment Name: At_Drought_Reproduction_P Parameter: Age (day) Value: 37
  misc_feature: MA Experiment 20001907 PARAMETER Experiment Name: At_Drought_Reproduction_P Parameter: Organism Value: A. thaliana
  misc_feature: MA Experiment 20001907 PARAMETER Experiment Name: At_Drought_Reproduction_P Parameter: Plant Line Value: WS
  misc_feature: MA Experiment 20001907 PARAMETER Experiment Name: At_Drought_Reproduction_P Parameter: Timepoint (day) Value: 7
  misc_feature: MA Experiment 20001907 PARAMETER Experiment Name: At_Drought_Reproduction_P Parameter: Tissue Value: Siliques
  misc_feature: MA Experiment 20001907 PARAMETER Experiment Name: At_Drought_Reproduction_P Parameter: Treatment Value: Drought vs. No Drought
aattctctcttaaaccctaaactagttagggttagtagtgttaaagttcctttcttcgtagctctgactaattaacatttaccgataattcaatcttcaattcacaatggatccttgctctttcgtacgcatcatcgtcgggaatttggcggttaggtttccgagatcaccgtcgtcatcatcgtcgtcttcttcttcatctggaccgtctgtttcggatgtatcctctggtaattgctattgtaaaatcaagttcaagagtttcccacgccagattgtttctgttcccgttctgttgcgaaccgaatcggaatcagagtctcggtgttgttccggtaacgtctcaaccgtcgctgcttgctttagtctaagtaagtctcagattgagacgtctcttaagaaggctaaatggagtgttctctccgtcgaggtttactctcgccgtagtgcgtcgtgtggatttgtcgctgcttccggtgagaagctgattggtcggtttcaggttacgcttgatttgaaggcggcggagtcaaagacgtgtttggcacacaacggctgggttgatttgggcactaaatcgaagaataataagaagtccgggtcggatcctgagctccacgttagcgtacgggttgaacccgacacgaggtttgtgtttcaattcgacggcgagcccgagtgtagtcctcaggtttttcaagtccaaggaaacgcaaaacaagctgttttcacttgcaagttcgggttcagaaactccggtgatcggaatcttagtctcagcttatcatcggtgacaagtggaaaggaacagttttcaaaagagagaaaaggttggtcgataacgatccatgatctctctggttcaccagtagctatggcttcaatggtcacacctttcgtaccatctcctggttccaaccgcgtctctcggtctagtcctggagcttggctaatcctcagacctgatggctacacctggaagccatgggttcgccttcaggcatggcgtgaaccaggcgtctccgatgttctaggttaccgtttcgagctttataaagacggtatcgctgttgcagtctctgcttcctcgtcgatcagcacaaaacttggcgggagtttcatcattgatggatccacttctacgactacgactgcttcttggagtagctctgaaggaagtttcgatctttcttcgtggtcaagcatcagatcatcaagaactgattcaggatcggggtcggatttcaggttctcactgtctcaagcgcaacaaaacttggggtttgtgatgtcgacgagggtgcaaggagtggagaaacagagcaagcctaaggtggaggtaggtgtgaagcacgtgacttgtacggaggatgcggcggcgcacgtggcactagcagcggcggtggatctaagcatggatgcttgtaggctcttctctcagaagctaagaaatgagctgagacagccaagtcgtgttgatatcgtttgacgtttattgctttgtcgttttgatacatgagatagaattgtcagttgtcttccactcgctagttttttttttgtttctagtgagggaaattggggaaatttgagtaaagtggaaaagtctttttg

SEQ ID NO: 79755 - protein, 460 aa, Arabidopsis thaliana
  peptide (1)..(460): Ceres Seq. ID no. 12653092
  misc_feature (260)..(456): Pfam Name: Protein of unknown function (DUF1005) Pfam Description: Protein of unknown function (DUF1005)
  misc_feature (1)..(460): Homolog of NCBI NO: 15222861 NR Description: hypothetical protein; protein id: At1g50040.1, by cDNA: gi_18389271, supported by cDNA: gi_20258934 [Arabidopsis
  misc_feature (115)..(460): Homolog of NCBI NO: 15230917 NR Description: unknown protein; protein id: At3g19680.1, by cDNA: gi_18176371 [Arabidopsis thaliana]
  misc_feature (115)..(460): Homolog of NCBI NO: 18176372 NR Description: unknown protein [Arabidopsis thaliana]
  misc_feature (1)..(451): Homolog of NCBI NO: 15218372 NR Description: unknown protein; protein id: At1g10020.1
  misc_feature (1)..(460): Homolog of NCBI NO: 36104436 NR Description: unknown protein [Oryza sativa (japonica
  misc_feature (1)..(345): Homolog of NCBI NO: 15233530 NR Description: putative protein; protein id: At4g29310.1, by cDNA: gi_20260629 [Arabidopsis thaliana]
  misc_feature (334)..(451): Homolog of NCBI NO: 15233530 NR Description: putative protein; protein id: At4g29310.1, by cDNA: gi_20260629 [Arabidopsis thaliana]
  misc_feature (1)..(231): Homolog of NCBI NO: 18176372 NR Description: unknown protein [Arabidopsis thaliana]
  misc_feature (1)..(231): Homolog of NCBI NO: 15230917 NR Description: unknown protein; protein id: At3g19680.1, by cDNA: gi_18176371 [Arabidopsis thaliana]
  misc_feature (82)..(460): Homolog of NCBI NO: 34896878 NR Description: unknown protein [Oryza sativa (japonica
MDPCSFVRIIVGNLAVRFPRSPSSSSSSSSSSGPSVSDVSSGNCYCKIKFKSFPRQIVSVPVLLRTESESESRCCSGNVSTVAACFSLSKSQIETSLKKAKWSVLSVEVYSRRSASCGFVAASGEKLIGRFQVTLDLKAAESKTCLAHNGWVDLGTKSKNNKKSGSDPELHVSVRVEPDTRFVFQFDGEPECSPQVFQVQGNAKQAVFTCKFGFRNSGDRNLSLSLSSVTSGKEQFSKERKGWSITIHDLSGSPVAMASMVTPFVPSPGSNRVSRSSPGAWLILRPDGYTWKPWVRLQAWREPGVSDVLGYRFELYKDGIAVAVSASSSISTKLGGSFIIDGSTSTTTTASWSSSEGSFDLSSWSSIRSSRTDSGSGSDFRFSLSQAQQNLGFVMSTRVQGVEKQSKPKVEVGVKHVTCTEDAAAHVALAAAVDLSMDACRLFSQKLRNELRQPSRVDIV

SEQ ID NO: 79756 - DNA, 486 bp, Arabidopsis thaliana
  misc_feature (1)..(486): Ceres Seq. ID no. 12653093
  misc_feature: MA Experiment ID: 20000307 Result: Up-regulated in Transcription
  misc_feature: MA Experiment 20000307 PARAMETER Experiment Name: At_Germinating_Seeds_Sub_P Parameter: Age (hr) Value: 24 vs. 0
  misc_feature: MA Experiment 20000307 PARAMETER Experiment Name: At_Germinating_Seeds_Sub_P Parameter: Organism Value: A. thaliana
  misc_feature: MA Experiment 20000307 PARAMETER Experiment Name: At_Germinating_Seeds_Sub_P Parameter: Plant Line Value: WS
  misc_feature: MA Experiment 20000307 PARAMETER Experiment Name: At_Germinating_Seeds_Sub_P Parameter: Tissue Value: Germinating Seeds
atgaatactttcaaaaccccttttctcgtcatcgttgcgattagctttcttgttgttgcaaccaatgctcaaaacactccacaagactaccttaactctcacaacaccgctcgtgcgcaggttggagtaccgaacgtggtgtgggacacaactctcgcggcctacgcattgaactattcaaattttagaaaagccgactgcaaccttgttcactccaacggaccatatggagaaaacctagccaagggaagtagttcctcgttctcggccatctcggccgtcaaactttgggtcgacgagaaaccttactacagctacgcatacaataattgcacaggtggaaaacaatgcttgcattacacgcaagtggtgtggagagattcagtgaagatagggtgtgctagggttcaatgcaccaatacttggtggttcgtgagttgtaactataactcacccggtaattgggtcggagagtacccttactga

SEQ ID NO: 79757 - protein, 161 aa, Arabidopsis thaliana
  peptide (1)..(161): Ceres Seq. ID no. 12653094
  misc_feature (31)..(148): Pfam Name: SCP-like extracellular protein Pfam Description: SCP-like extracellular protein
  misc_feature (1)..(161): Homolog of NCBI NO: 15222865 NR Description: branched-chain amino acid aminotransferase, protein id: At1g50060.1 [Arabidopsis thaliana]
  misc_feature (1)..(161): Homolog of NCBI NO: 25296205 NR Description: hypothetical protein F2J10.7 [imported] - thaliana >gi|8569095|gb|AAF76440.1|AC015445_7 Contains similarity PR1a protein precursor from Nicotiana tabacum gb|D90196 and
  misc_feature (1)..(151): Homolog of NCBI NO: 15222863 NR Description: pathogenesis-related protein 1b precursor
  misc_feature (1)..(161): Homolog of NCBI NO: 33413141 NR Description: putative pathogenesis related protein 1 precursor
  misc_feature (9)..(161): Homolog of NCBI NO: 13560653 NR Description: pathogenesis-related protein PR-1 precursor
  misc_feature (9)..(161): Homolog of NCBI NO: 282959 NR Description: pathogenesis-related protein 1b - common tobacco
  misc_feature (9)..(161): Homolog of NCBI NO: 218304 NR Description: PR1a protein precursor [Nicotiana tabacum]
  misc_feature (9)..(161): Homolog of NCBI NO: 130826 NR Description: Pathogenesis-related protein 1A precursor (PR-1A)
  misc_feature (9)..(161): Homolog of NCBI NO: 548586 NR Description: Pathogenesis-related leaf protein 4 precursor (P4)
  misc_feature (9)..(161): Homolog of NCBI NO: 548587 NR Description: Pathogenesis-related leaf protein 6 precursor (P6)
MNTFKTPFLVIVAISFLVVATNAQNTPQDYLNSHNTARAQVGVPNVVWDTTLAAYALNYSNFRKADCNLVHSNGPYGENLAKGSSSSFSAISAVKLWVDEKPYYSYAYNNCTGGKQCLHYTQVVWRDSVKIGCARVQCTNTWWFVSCNYNSPGNWVGEYPY

SEQ ID NO: 79758 - DNA, 1923 bp, Arabidopsis thaliana
  misc_feature (1)..(1923): Ceres Seq. ID no. 12653099
  misc_feature: MA Experiment ID: 20000315 Result: Down-regulated in Transcription
  misc_feature: MA Experiment 20000315 PARAMETER Experiment Name: At_14day_Shoots-Roots_Sub_P Parameter: Age (day) Value: 14
  misc_feature: MA Experiment 20000315 PARAMETER Experiment Name: At_14day_Shoots-Roots_Sub_P Parameter: Organism Value: A. thaliana
  misc_feature: MA Experiment 20000315 PARAMETER Experiment Name: At_14day_Shoots-Roots_Sub_P Parameter: Plant Line Value: WS
  misc_feature: MA Experiment 20000315 PARAMETER Experiment Name: At_14day_Shoots-Roots_Sub_P Parameter: Tissue Value: Shoots vs. Whole Plant
  misc_feature: MA Experiment ID: 20000440 Result: Up-regulated in Transcription
  misc_feature: MA Experiment 20000440 PARAMETER Experiment Name: At_Closed-Flower__Sub_P Parameter: Tissue Value: Closed Flower vs. Whole Plant
atggatcacagggtcgtattggggaagatttccacatctgatggtcaaaagagtgcttttaccgttattcctggcaggccattgtctagtggacaacgtggagaggtatatgaggtgattgggaaccgtgttgctgtcatattcgaatacggtgatgataaaacatcagagggaagtgagaaaaagccagcagagcagccccagatgttacccatccactggttagatgtgaaagacctgaagtacgatttggatatgcaggcagttgatggctacattgctatggaagctttaaatgaggttttgcaatccattcaaccacttatagtctattttccagactcgacgcagtggttgtctagagctgtgcctaagacaagacgaaaggaatttgtagacaaagttaaggaaatgtttgataaactatcaggtccgattgttatgatctgtgggcagaacaagatagaaacaggctcaaaagaaagagagaaattcacgatggtactcccaaaccttagccgagttgtgaagctgcctcttcccttgaagggcctaactgagggattcacgggaaggggaaaatcagaggagaatgagatatacaagcttttcactaatgttatgcgcctacatcctccgaaggaggaggataccctcagattattcaagaaacaactaggagaagataggagaattgtgatatcgcggagcaatataaatgagttgctaaaggcacttgaagaacatgagttattgtgcacagatttatatcaagtgaacaccgatggggttatattgacaaagcaaaaagcagagaaagctattggctgggccaaaaatcactatttagcttcttgtccagtcccattggttaaaggaggtcgcttgtctctgcctcgtgaaagccttgagatatcaattgcgaggttaagaaaattagaagataactccctaaagccttcgcaaaacttgaagaatattgcaaaggatgagtacgaaagaaattttgtctcggctgtggttgctcctggagaaattggcgtcaaatttgaagatattggggctctcgaagacgtgaaaaaagcattaaatgagctggttattcttcccatgagaaggccagagctttttgcccgtggaaatctcttgcggccctgtaaaggaatattgctttttggtcctcctggaacgggtaagacgctcctagctaaggcgcttgcaacagaagctggggcaaacttcattagcataactggctcaacacttacatcaaagtggttcggagatgcagagaagctcactaaggctctcttttcctttgccaccaagctagcacctgtaattatttttgttgatgagatcgacagtctgctaggtgctcgtggtggctcttccgagcacgaagctaccagaagaatgagaaatgagttcatggcagcttgggacgggctcaggtcaaaagacagccaaaggatcctcattcttggtgccaccaaccgtccctttgatcttgatgatgctgtcattcgtcgtctaccaaggcggatatatgtcgacttaccagatgccgaaaaccggttaaagatactgaaaatatttctaactcctgaaaatctggaatctgatttccagttcgagaaacttgcaaaggaaactgaaggttattccggtagcgatctgaagaatctatgcattgctgctgcgtacaggcctgttcaagaactgttacaagaagaacaaaagggtgcaagagcagaagcatctcctggtctacggtcgctaagtttggatgacttcattcagtctaaagctaaggtgagcccatctgtggcgtacgatgcgactacgatgaatgagctgagaaaatggaacgagcaatatggtgaaggaggcagcaggacaaagtctccttttggcttctga

SEQ ID NO: 79759 - protein, 640 aa, Arabidopsis thaliana
  peptide (1)..(640): Ceres Seq. ID no. 12653100
  misc_feature (388)..(573): Pfam Name: ATPase family associated with various cellular Pfam Description: ATPase family associated with various cellular
  misc_feature (208)..(640): Homolog of NCBI NO: 15230942 NR Description: ATPase, putative; protein id: At3g19740.1
  misc_feature (371)..(640): Homolog of NCBI NO: 25454662 NR Description: hypothetical protein MMB12.22 [imported] - thaliana >gi|9294440|dbj|BAB02560.1| contains similarity to
  misc_feature (135)..(640): Homolog of NCBI NO: 20259341 NR Description: unknown protein [Arabidopsis thaliana]
  misc_feature (135)..(640): Homolog of NCBI NO: 30679158 NR Description: expressed protein [Arabidopsis thaliana]
  misc_feature (135)..(640): Homolog of NCBI NO: 30678418 NR Description: expressed protein [Arabidopsis thaliana]
  misc_feature (147)..(640): Homolog of NCBI NO: 33146850 NR Description: putative MSP1(mitochondrial sorting of proteins)
  misc_feature (286)..(640): Homolog of NCBI NO: 7487016 NR Description: hypothetical protein T14P8.7 - Arabidopsis >gi|3193292|gb|AAC19276.1| similar to ATPases associated with
  misc_feature (102)..(589): Homolog of NCBI NO: 34912822 NR Description: P0501G01.20 [Oryza sativa (japonica
  misc_feature (578)..(635): Homolog of NCBI NO: 34912822 NR Description: P0501G01.20 [Oryza sativa (japonica
  misc_feature (213)..(640): Homolog of NCBI NO: 15234019 NR Description: putative protein; protein id: At4g24850.1
MDHRVVLGKISTSDGQKSAFTVIPGRPLSSGQRGEVYEVIGNRVAVIFEYGDDKTSEGSEKKPAEQPQMLPIHWLDVKDLKYDLDMQAVDGYIAMEALNEVLQSIQPLIVYFPDSTQWLSRAVPKTRRKEFVDKVKEMFDKLSGPIVMICGQNKIETGSKEREKFTMVLPNLSRVVKLPLPLKGLTEGFTGRGKSEENEIYKLFTNVMRLHPPKEEDTLRLFKKQLGEDRRIVISRSNINELLKALEEHELLCTDLYQVNTDGVILTKQKAEKAIGWAKNHYLASCPVPLVKGGRLSLPRESLEISIARLRKLEDNSLKPSQNLKNIAKDEYERNFVSAVVAPGEIGVKFEDIGALEDVKKALNELVILPMRRPELFARGNLLRPCKGILLFGPPGTGKTLLAKALATEAGANFISITGSTLTSKWFGDAEKLTKALFSFATKLAPVIIFVDEIDSLLGARGGSSEHEATRRMRNEFMAAWDGLRSKDSQRILILGATNRPFDLDDAVIRRLPRRIYVDLPDAENRLKILKIFLTPENLESDFQFEKLAKETEGYSGSDLKNLCIAAAYRPVQELLQEEQKGARAEASPGLRSLSLDDFIQSKAKVSPSVAYDATTMNELRKWNEQYGEGGSRTKSPFGF

SEQ ID NO: 79760 - protein, 572 aa, Arabidopsis thaliana
  peptide (1)..(572): Ceres Seq. ID no. 12653101
  misc_feature (320)..(505): Pfam Name: ATPase family associated with various cellular Pfam Description: ATPase family associated with various cellular
  misc_feature (140)..(572): Homolog of NCBI NO: 15230942 NR Description: ATPase, putative; protein id: At3g19740.1
  misc_feature (303)..(572): Homolog of NCBI NO: 25454662 NR Description: hypothetical protein MMB12.22 [imported] - thaliana >gi|9294440|dbj|BAB02560.1| contains similarity to
  misc_feature (67)..(572): Homolog of NCBI NO: 20259341 NR Description: unknown protein [Arabidopsis thaliana]
  misc_feature (67)..(572): Homolog of NCBI NO: 30679158 NR Description: expressed protein [Arabidopsis thaliana]
  misc_feature (67)..(572): Homolog of NCBI NO: 30678418 NR Description: expressed protein [Arabidopsis thaliana]
  misc_feature (79)..(572): Homolog of NCBI NO: 33146850 NR Description: putative MSP1(mitochondrial sorting of proteins)
  misc_feature (218)..(572): Homolog of NCBI NO: 7487016 NR Description: hypothetical protein T14P8.7 - Arabidopsis >gi|3193292|gb|AAC19276.1| similar to ATPases associated with
  misc_feature (34)..(521): Homolog of NCBI NO: 34912822 NR Description: P0501G01.20 [Oryza sativa (japonica
  misc_feature (510)..(567): Homolog of NCBI NO: 34912822 NR Description: P0501G01.20 [Oryza sativa (japonica
  misc_feature (145)..(572): Homolog of NCBI NO: 15234019 NR Description: putative protein; protein id: At4g24850.1
MLPIHWLDVKDLKYDLDMQAVDGYIAMEALNEVLQSIQPLIVYFPDSTQWLSRAVPKTRRKEFVDKVKEMFDKLSGPIVMICGQNKIETGSKEREKFTMVLPNLSRVVKLPLPLKGLTEGFTGRGKSEENEIYKLFTNVMRLHPPKEEDTLRLFKKQLGEDRRIVISRSNINELLKALEEHELLCTDLYQVNTDGVILTKQKAEKAIGWAKNHYLASCPVPLVKGGRLSLPRESLEISIARLRKLEDNSLKPSQNLKNIAKDEYERNFVSAVVAPGEIGVKFEDIGALEDVKKALNELVILPMRRPELFARGNLLRPCKGILLFGPPGTGKTLLAKALATEAGANFISITGSTLTSKWFGDAEKLTKALFSFATKLAPVIIFVDEIDSLLGARGGSSEHEATRRMRNEFMAAWDGLRSKDSQRILILGATNRPFDLDDAVIRRLPRRIYVDLPDAENRLKILKIFLTPENLESDFQFEKLAKETEGYSGSDLKNLCIAAAYRPVQELLQEEQKGARAEASPGLRSLSLDDFIQSKAKVSPSVAYDATTMNELRKWNEQYGEGGSRTKSPFGF

SEQ ID NO: 79761 - protein, 555 aa, Arabidopsis thaliana
  peptide (1)..(555): Ceres Seq. ID no. 12653102
  misc_feature (303)..(488): Pfam Name: ATPase family associated with various cellular Pfam Description: ATPase family associated with various cellular
  misc_feature (123)..(555): Homolog of NCBI NO: 15230942 NR Description: ATPase, putative; protein id: At3g19740.1
  misc_feature (286)..(555): Homolog of NCBI NO: 25454662 NR Description: hypothetical protein MMB12.22 [imported] - thaliana >gi|9294440|dbj|BAB02560.1| contains similarity to
  misc_feature (50)..(555): Homolog of NCBI NO: 20259341 NR Description: unknown protein [Arabidopsis thaliana]
  misc_feature (50)..(555): Homolog of NCBI NO: 30679158 NR Description: expressed protein [Arabidopsis thaliana]
  misc_feature (50)..(555): Homolog of NCBI NO: 30678418 NR Description: expressed protein [Arabidopsis thaliana]
  misc_feature (62)..(555): Homolog of NCBI NO: 33146850 NR Description: putative MSP1(mitochondrial sorting of proteins)
  misc_feature (201)..(555): Homolog of NCBI NO: 7487016 NR Description: hypothetical protein T14P8.7 - Arabidopsis >gi|3193292|gb|AAC19276.1| similar to ATPases associated with
  misc_feature (17)..(504): Homolog of NCBI NO: 34912822 NR Description: P0501G01.20 [Oryza sativa (japonica
  misc_feature (493)..(550): Homolog of NCBI NO: 34912822 NR Description: P0501G01.20 [Oryza sativa (japonica
  misc_feature (128)..(555): Homolog of NCBI NO: 15234019 NR Description: putative protein; protein id: At4g24850.1
MQAVDGYIAMEALNEVLQSIQPLIVYFPDSTQWLSRAVPKTRRKEFVDKVKEMFDKLSGPIVMICGQNKIETGSKEREKFTMVLPNLSRVVKLPLPLKGLTEGFTGRGKSEENEIYKLFTNVMRLHPPKEEDTLRLFKKQLGEDRRIVISRSNINELLKALEEHELLCTDLYQVNTDGVILTKQKAEKAIGWAKNHYLASCPVPLVKGGRLSLPRESLEISIARLRKLEDNSLKPSQNLKNIAKDEYERNFVSAVVAPGEIGVKFEDIGALEDVKKALNELVILPMRRPELFARGNLLRPCKGILLFGPPGTGKTLLAKALATEAGANFISITGSTLTSKWFGDAEKLTKALFSFATKLAPVIIFVDEIDSLLGARGGSSEHEATRRMRNEFMAAWDGLRSKDSQRILILGATNRPFDLDDAVIRRLPRRIYVDLPDAENRLKILKIFLTPENLESDFQFEKLAKETEGYSGSDLKNLCIAAAYRPVQELLQEEQKGARAEASPGLRSLSLDDFIQSKAKVSPSVAYDATTMNELRKWNEQYGEGGSRTKSPFGF

SEQ ID NO: 79762 - DNA, 873 bp, Arabidopsis thaliana
  misc_feature (1)..(873): Ceres Seq. ID no. 12653122
  misc_feature: MA Experiment ID: 20000227 Result: Down-regulated in Transcription
  misc_feature: MA Experiment 20000227 PARAMETER Experiment Name: At_Root-Tips-vs-Tops_P Parameter: Tissue Value: Root Tips vs. Root Tops
  misc_feature: MA Experiment ID: 20000234 Result: Up-regulated in Transcription
  misc_feature: MA Experiment 20000234 PARAMETER Experiment Name: At_Siliques_P Parameter: Age (day) Value: 21
  misc_feature: MA Experiment 20000234 PARAMETER Experiment Name: At_Siliques_P Parameter: Organism Value: A. thaliana
  misc_feature: MA Experiment 20000234 PARAMETER Experiment Name: At_Siliques_P Parameter: Plant Line Value: WS
  misc_feature: MA Experiment 20000234 PARAMETER Experiment Name: At_Siliques_P Parameter: Tissue Value: Less Than 5mm Siliques vs. Whole Plant
  misc_feature: MA Experiment ID: 20000235 Result: Up-regulated in Transcription
  misc_feature: MA Experiment 20000235 PARAMETER Experiment Name: At_Siliques_P Parameter: Age (day) Value: 21
  misc_feature: MA Experiment 20000235 PARAMETER Experiment Name: At_Siliques_P Parameter: Organism Value: A. thaliana
  misc_feature: MA Experiment 20000235 PARAMETER Experiment Name: At_Siliques_P Parameter: Plant Line Value: WS
  misc_feature: MA Experiment 20000235 PARAMETER Experiment Name: At_Siliques_P Parameter: Tissue Value: 5-10mm Siliques vs. Whole Plant
  misc_feature: MA Experiment ID: 20000264 Result: Up-regulated in Transcription
  misc_feature: MA Experiment 20000264 PARAMETER Experiment Name: At_Open_Flower_P Parameter: Age (day) Value: 21
  misc_feature: MA Experiment 20000264 PARAMETER Experiment Name: At_Open_Flower_P Parameter: Plant Line Value: WS
  misc_feature: MA Experiment 20000264 PARAMETER Experiment Name: At_Open_Flower_P Parameter: Tissue Value: Open Flower vs. Whole Plant
  misc_feature: MA Experiment ID: 20000265 Result: Up-regulated in Transcription
  misc_feature: MA Experiment 20000265 PARAMETER Experiment Name: At_Open_Flower_P Parameter: Age (day) Value: 21
  misc_feature: MA Experiment 20000265 PARAMETER Experiment Name: At_Open_Flower_P Parameter: Plant Line Value: WS
  misc_feature: MA Experiment 20000265 PARAMETER Experiment Name: At_Open_Flower_P Parameter: Tissue Value: Closed Flower vs. Whole Plant
  misc_feature: MA Experiment ID: 20000286 Result: Up-regulated in Transcription
  misc_feature: MA Experiment 20000286 PARAMETER Experiment Name: At_Open_Flower_P Parameter: Age (day) Value: 21
  misc_feature: MA Experiment 20000286 PARAMETER Experiment Name: At_Open_Flower_P Parameter: Plant Line Value: WS
  misc_feature: MA Experiment 20000286 PARAMETER Experiment Name: At_Open_Flower_P Parameter: Tissue Value: Half Open vs. Whole Plant
  misc_feature: MA Experiment ID: 20000438 Result: Up-regulated in Transcription
  misc_feature: MA Experiment 20000438 PARAMETER Experiment Name: At_Shoots__P Parameter: Age (day) Value: 14
  misc_feature: MA Experiment 20000438 PARAMETER Experiment Name: At_Shoots__P Parameter: Tissue Value: Shoots vs. Whole Plant
  misc_feature: MA Experiment ID: 20000451 Result: Down-regulated in Transcription
  misc_feature: MA Experiment 20000451 PARAMETER Experiment Name: At_CS6879_Shoots-Roots_P Parameter: Age (day) Value: 14
  misc_feature: MA Experiment 20000451 PARAMETER Experiment Name: At_CS6879_Shoots-Roots_P Parameter: Organism Value: A. thaliana
  misc_feature: MA Experiment 20000451 PARAMETER Experiment Name: At_CS6879_Shoots-Roots_P Parameter: Plant Line Value: CS6879 vs. WS
  misc_feature: MA Experiment 20000451 PARAMETER Experiment Name: At_CS6879_Shoots-Roots_P Parameter: Tissue Value: Roots
  misc_feature: MA Experiment ID: 20000452 Result: Down-regulated in Transcription
  misc_feature: MA Experiment 20000452 PARAMETER Experiment Name: At_CS6879_Shoots-Roots_P Parameter: Age (day) Value: 14
  misc_feature: MA Experiment 20000452 PARAMETER Experiment Name: At_CS6879_Shoots-Roots_P Parameter: Organism Value: A. thaliana
  misc_feature: MA Experiment 20000452 PARAMETER Experiment Name: At_CS6879_Shoots-Roots_P Parameter: Plant Line Value: CS6879 vs. WS
  misc_feature: MA Experiment 20000452 PARAMETER Experiment Name: At_CS6879_Shoots-Roots_P Parameter: Tissue Value: Shoots
  misc_feature: MA Experiment ID: 20000453 Result: Up-regulated in Transcription
  misc_feature: MA Experiment 20000453 PARAMETER Experiment Name: At_100uM_ABA_P Parameter: Age (day) Value: 15
  misc_feature: MA Experiment 20000453 PARAMETER Experiment Name: At_100uM_ABA_P Parameter: Organism Value: A. thaliana
  misc_feature: MA Experiment 20000453 PARAMETER Experiment Name: At_100uM_ABA_P Parameter: Plant Line Value: WS
  misc_feature: MA Experiment 20000453 PARAMETER Experiment Name: At_100uM_ABA_P Parameter: Timepoint (hr) Value: 24
  misc_feature: MA Experiment 20000453 PARAMETER Experiment Name: At_100uM_ABA_P Parameter: Tissue Value: Aerial
  misc_feature: MA Experiment 20000453 PARAMETER Experiment Name: At_100uM_ABA_P Parameter: Treatment Value: 100uM ABA vs. No Treatment
  misc_feature: MA Experiment ID: 20000573 Result: Up-regulated in Transcription
  misc_feature: MA Experiment 20000573 PARAMETER Experiment Name: At_100uM_ABA_Mutants__P Parameter: Organism Value: A. thaliana
  misc_feature: MA Experiment 20000573 PARAMETER Experiment Name: At_100uM_ABA_Mutants__P Parameter: Plant Line Value: CS22 vs. Ler wt
  misc_feature: MA Experiment 20000573 PARAMETER Experiment Name: At_100uM_ABA_Mutants__P Parameter: Timepoint (hr) Value: N/A
  misc_feature: MA Experiment 20000573 PARAMETER Experiment Name: At_100uM_ABA_Mutants__P Parameter: Tissue Value: Whole Plant
  misc_feature: MA Experiment 20000573 PARAMETER Experiment Name: At_100uM_ABA_Mutants__P Parameter: Treatment Value: None
  misc_feature: MA Experiment ID: 20000574 Result: Up-regulated in Transcription
  misc_feature: MA Experiment 20000574 PARAMETER Experiment Name: At_100uM_ABA_Mutants__P Parameter: Organism Value: A. thaliana
  misc_feature: MA Experiment 20000574 PARAMETER Experiment Name: At_100uM_ABA_Mutants__P Parameter: Plant Line Value: CS23 vs. Ler wt
  misc_feature: MA Experiment 20000574 PARAMETER Experiment Name: At_100uM_ABA_Mutants__P Parameter: Timepoint (hr) Value: N/A
  misc_feature: MA Experiment 20000574 PARAMETER Experiment Name: At_100uM_ABA_Mutants__P Parameter: Tissue Value: Whole Plant
  misc_feature: MA Experiment 20000574 PARAMETER Experiment Name: At_100uM_ABA_Mutants__P Parameter: Treatment Value: None
  misc_feature: MA Experiment ID: 20000794 Result: Up-regulated in Transcription
  misc_feature: MA Experiment 20000794 PARAMETER Experiment Name: At_Petals_P Parameter: Age (day) Value: 23-25 days
  misc_feature: MA Experiment 20000794 PARAMETER Experiment Name: At_Petals_P Parameter: Plant Line Value: WS
  misc_feature: MA Experiment 20000794 PARAMETER Experiment Name: At_Petals_P Parameter: Tissue Value: Petals vs. Whole plant
  misc_feature: MA Experiment ID: 20001248 Result: Down-regulated in Transcription
  misc_feature: MA Experiment 20001248 PARAMETER Experiment Name: At_Far-red-induction_P Parameter: Age (day) Value: 7
  misc_feature: MA Experiment 20001248 PARAMETER Experiment Name: At_Far-red-induction_P Parameter: Light Value: Far-red vs. White
  misc_feature: MA Experiment 20001248 PARAMETER Experiment Name: At_Far-red-induction_P Parameter: Organism Value: A. thaliana
  misc_feature: MA Experiment 20001248 PARAMETER Experiment Name: At_Far-red-induction_P Parameter: Plant Line Value: Columbia
  misc_feature: MA Experiment 20001248 PARAMETER Experiment Name: At_Far-red-induction_P Parameter: Timepoint (hr) Value: 4
  misc_feature: MA Experiment 20001248 PARAMETER Experiment Name: At_Far-red-induction_P Parameter: Tissue Value: Whole Plant
  misc_feature: MA Experiment ID: 20001451 Result: Up-regulated in Transcription
  misc_feature: MA Experiment 20001451 PARAMETER Experiment Name: At_Far-red-induction_P Parameter: Age (day) Value: 7
  misc_feature: MA Experiment 20001451 PARAMETER Experiment Name: At_Far-red-induction_P Parameter: Light Value: Far-red vs. White
  misc_feature: MA Experiment 20001451 PARAMETER Experiment Name: At_Far-red-induction_P Parameter: Organism Value: A. thaliana
  misc_feature: MA Experiment 20001451 PARAMETER Experiment Name: At_Far-red-induction_P Parameter: Plant Line Value: Columbia
  misc_feature: MA Experiment 20001451 PARAMETER Experiment Name: At_Far-red-induction_P Parameter: Timepoint (hr) Value: 24
  misc_feature: MA Experiment 20001451 PARAMETER Experiment Name: At_Far-red-induction_P Parameter: Tissue Value: Whole Plant
  misc_feature: MA Experiment ID: 20001557 Result: Down-regulated in Transcription
  misc_feature: MA Experiment 20001557 PARAMETER Experiment Name: At_Drought_Soil_Dry_P Parameter: Age (day) Value: 27
  misc_feature: MA Experiment 20001557 PARAMETER Experiment Name: At_Drought_Soil_Dry_P Parameter: Organism Value: A. thaliana
  misc_feature: MA Experiment 20001557 PARAMETER Experiment Name: At_Drought_Soil_Dry_P Parameter: Plant Line Value: WS
  misc_feature: MA Experiment 20001557 PARAMETER Experiment Name: At_Drought_Soil_Dry_P Parameter: Post Timepoint (hr) Value: 3
  misc_feature: MA Experiment 20001557 PARAMETER Experiment Name: At_Drought_Soil_Dry_P Parameter: Post-Treatment Value: Re-Water vs. No Drought
  misc_feature: MA Experiment 20001557 PARAMETER Experiment Name: At_Drought_Soil_Dry_P Parameter: Timepoint (day) Value: 13
  misc_feature: MA Experiment 20001557 PARAMETER Experiment Name: At_Drought_Soil_Dry_P Parameter: Treatment Value: Drought vs. No Drought
  misc_feature: MA Experiment ID: 20001558 Result: Down-regulated in Transcription
  misc_feature: MA Experiment 20001558 PARAMETER Experiment Name: At_Drought_Soil_Dry_P Parameter: Age (day) Value: 27
  misc_feature: MA Experiment 20001558 PARAMETER Experiment Name: At_Drought_Soil_Dry_P Parameter: Organism Value: A. thaliana
  misc_feature: MA Experiment 20001558 PARAMETER Experiment Name: At_Drought_Soil_Dry_P Parameter: Plant Line Value: WS
  misc_feature: MA Experiment 20001558 PARAMETER Experiment Name: At_Drought_Soil_Dry_P Parameter: Post Timepoint (hr) Value: 6
  misc_feature: MA Experiment 20001558 PARAMETER Experiment Name: At_Drought_Soil_Dry_P Parameter: Post-Treatment Value: Re-Water vs. No Drought
  misc_feature: MA Experiment 20001558 PARAMETER Experiment Name: At_Drought_Soil_Dry_P Parameter: Timepoint (day) Value: 13
  misc_feature: MA Experiment 20001558 PARAMETER Experiment Name: At_Drought_Soil_Dry_P Parameter: Treatment Value: Drought vs. No Drought
  misc_feature: MA Experiment ID: 20001560 Result: Down-regulated in Transcription
  misc_feature: MA Experiment 20001560 PARAMETER Experiment Name: At_Drought_Soil_Dry_P Parameter: Age (day) Value: 28
  misc_feature: MA Experiment 20001560 PARAMETER Experiment Name: At_Drought_Soil_Dry_P Parameter: Organism Value: A. thaliana
  misc_feature: MA Experiment 20001560 PARAMETER Experiment Name: At_Drought_Soil_Dry_P Parameter: Plant Line Value: WS
  misc_feature: MA Experiment 20001560 PARAMETER Experiment Name: At_Drought_Soil_Dry_P Parameter: Post Timepoint (hr) Value: None
  misc_feature: MA Experiment 20001560 PARAMETER Experiment Name: At_Drought_Soil_Dry_P Parameter: Post-Treatment Value: None
  misc_feature: MA Experiment 20001560 PARAMETER Experiment Name: At_Drought_Soil_Dry_P Parameter: Timepoint (day) Value: 14
  misc_feature: MA Experiment 20001560 PARAMETER Experiment Name: At_Drought_Soil_Dry_P Parameter: Treatment Value: Drought vs. No Drought
  misc_feature: MA Experiment ID: 20001910 Result: Up-regulated in Transcription
  misc_feature: MA Experiment 20001910 PARAMETER Experiment Name: At_Drought_Reproduction_P Parameter: Age (day) Value: 37
  misc_feature: MA Experiment 20001910 PARAMETER Experiment Name: At_Drought_Reproduction_P Parameter: Organism Value: A. thaliana
  misc_feature: MA Experiment 20001910 PARAMETER Experiment Name: At_Drought_Reproduction_P Parameter: Plant Line Value: WS
  misc_feature: MA Experiment 20001910 PARAMETER Experiment Name: At_Drought_Reproduction_P Parameter: Timepoint (day) Value: 7
  misc_feature: MA Experiment 20001910 PARAMETER Experiment Name: At_Drought_Reproduction_P Parameter: Tissue Value: Flowers
  misc_feature: MA Experiment 20001910 PARAMETER Experiment Name: At_Drought_Reproduction_P Parameter: Treatment Value: Drought vs. No Drought
  misc_feature: MA Experiment ID: 20001911 Result: Up-regulated in Transcription
  misc_feature: MA Experiment 20001911 PARAMETER Experiment Name: At_Drought_Reproduction_P Parameter: Age (day) Value: 40
  misc_feature: MA Experiment 20001911 PARAMETER Experiment Name: At_Drought_Reproduction_P Parameter: Organism Value: A. thaliana
  misc_feature: MA Experiment 20001911 PARAMETER Experiment Name: At_Drought_Reproduction_P Parameter: Plant Line Value: WS
  misc_feature: MA Experiment 20001911 PARAMETER Experiment Name: At_Drought_Reproduction_P Parameter: Timepoint (day) Value: 10
  misc_feature: MA Experiment 20001911 PARAMETER Experiment Name: At_Drought_Reproduction_P Parameter: Tissue Value: Flowers
  misc_feature: MA Experiment 20001911 PARAMETER Experiment Name: At_Drought_Reproduction_P Parameter: Treatment Value: Drought vs. No Drought
gtggacaatatagtttctgaaactataataggataagaaaaaattaagcttatttgtggggatatatattaatgtcatatcattgtcataaacatggtcggcaaaacttgggacggcagtttaccagaataatccggtcgacagaattcaacagttcctctctctaaaagatatgaaggagattaattttggctttgttagcaaagatggccggtcctcttctggcaaatccggcttttacaagcggttttggccggcttttatccttcctccgccgttcgatcggttgttcttaccgattgctttagtttctttttcagtttttctttcaataatttctaaagatttcaattggagattaattttaggtcataatagcctaagattaagttttcggatttgtatctttagaaagtttgatttgcagaattacctcaagtatgaaaggaagttttgtttccagcatattgggattgcctgtagccgtttctacatgtttatggagcttcgatcgatcaaatttgaggaatactcagatttttctttcctcattacctgtttttgccaaatctcttgattgatgattttggaattgaattctctgtttgtgtatcctcccttctctgtttagcagtttccggtgagaaaaaaacaaaaatcgatgtttgccctttttcgacgttgattgtgttcaccggatcggagtctttgacggcacaggatgacaggaacgtttcatcgcttctcttgcaacacgtgtcttgttatacgatcgtgttttgttaaagagatatccttcctttaaagaaatgtaactaagtggacctttgttgggctgtattctgtggatcattaataaacataatctttcca

SEQ ID NO: 79763 - protein, 134 aa, Arabidopsis thaliana
  peptide (1)..(134): Ceres Seq. ID no. 12653123
  misc_feature (1)..(134): Homolog of NCBI NO: 18403010 NR Description: expressed protein; protein id: At1g50290.1, by cDNA: gi_15983429 [Arabidopsis thaliana] At1g50290/F14I3_12 [Arabidopsis thaliana]
MKEINFGFVSKDGRSSSGKSGFYKRFWPAFILPPPFDRLFLPIALVSFSVFLSIISKDFNWRLILGHNSLRLSFRICIFRKFDLQNYLKYERKFCFQHIGIACSRFYMFMELRSIKFEEYSDFSFLITCFCQIS

SEQ ID NO: 79764 - DNA, 1554 bp, Arabidopsis thaliana
  misc_feature (1)..(1554): Ceres Seq. ID no. 12653128
  misc_feature: MA Experiment ID: 20000171 Result: Up-regulated in Transcription
  misc_feature: MA Experiment 20000171 PARAMETER Experiment Name: At_42deg_Heat_P Parameter: Age (day) Value: 14
  misc_feature: MA Experiment 20000171 PARAMETER Experiment Name: At_42deg_Heat_P Parameter: Organism Value: A. thaliana
  misc_feature: MA Experiment 20000171 PARAMETER Experiment Name: At_42deg_Heat_P Parameter: Plant Line Value: WS
  misc_feature: MA Experiment 20000171 PARAMETER Experiment Name: At_42deg_Heat_P Parameter: Temperature (deg C) Value: 42 vs. 22
  misc_feature: MA Experiment 20000171 PARAMETER Experiment Name: At_42deg_Heat_P Parameter: Timepoint (hr) Value: 1
  misc_feature: MA Experiment 20000171 PARAMETER Experiment Name: At_42deg_Heat_P Parameter: Tissue Value: Aerial
  misc_feature: MA Experiment ID: 20000265 Result: Up-regulated in Transcription
  misc_feature: MA Experiment 20000265 PARAMETER Experiment Name: At_Open_Flower_P Parameter: Age (day) Value: 21
  misc_feature: MA Experiment 20000265 PARAMETER Experiment Name: At_Open_Flower_P Parameter: Plant Line Value: WS
  misc_feature: MA Experiment 20000265 PARAMETER Experiment Name: At_Open_Flower_P Parameter: Tissue Value: Closed Flower vs. Whole Plant
  misc_feature: MA Experiment ID: 20000286 Result: Up-regulated in Transcription
  misc_feature: MA Experiment 20000286 PARAMETER Experiment Name: At_Open_Flower_P Parameter: Age (day) Value: 21
  misc_feature: MA Experiment 20000286 PARAMETER Experiment Name: At_Open_Flower_P Parameter: Plant Line Value: WS
  misc_feature: MA Experiment 20000286 PARAMETER Experiment Name: At_Open_Flower_P Parameter: Tissue Value: Half Open vs. Whole Plant
  misc_feature: MA Experiment ID: 20000439 Result: Up-regulated in Transcription
  misc_feature: MA Experiment 20000439 PARAMETER Experiment Name: At_Roots__P Parameter: Age (day) Value: 14 vs. 21
  misc_feature: MA Experiment 20000439 PARAMETER Experiment Name: At_Roots__P Parameter: Organism Value: A. thaliana
  misc_feature: MA Experiment 20000439 PARAMETER Experiment Name: At_Roots__P Parameter: Tissue Value: Roots vs. Whole Plant
atggctggaggagcctttgtatcagaaggtggtggtggaggaaacagctatgaaggcggagtcaccgtctttgtcatcatgacatgtattgtggccgctatgggaggtctcctctttggttatgacctcggtatctcaggtggagtgacatctatggaggagtttctgagcaagtttttcccggaggtggataagcaaatgcacgaagcaaggcgcgagactgcttactgcaaattcgataaccaattgctacagttgttcacttcctcactctacctcgcggcactcgcgtcttcctttgtagcttcggctgtcacaaggaagtacggacgcaaaatctccatgtttgttggaggggttgctttcctcataggttctctattcaacgcatttgctaccaatgtcgcaatgctcatcgttggtagattgttgctcggagtcggtgttggatttgccaatcagtctacgcctgtttatctctcggagatggctccagcgaagatccgaggagcacttaacatcgggtttcaaatggctataaccatcgggattttgattgcaaacttaatcaactacggaacatctcaaatggctaagaacggatggagagtatcattgggtttagccgctgtaccggcagttattatggttattggatcttttgtcttgcccgatacaccaaactcgatgctcgagagaggcaagtacgaacaagcgagagagatgttgcaaaagattcgtggagctgataacgtagatgaggagtttcaagatctgtgtgatgcttgtgaggctgctaagaaagtggataatccatggaagaacattttccaacaggcaaaatacagacccgctcttgttttctgttctgcgattcctttcttccaacagattactggtatcaatgttatcatgttctacgcccccgttctctttaagactctcggttttgcggatgatgcctcgctcatctcagcggttattacgggtgcggtcaatgttgtctctacccttgtctccatctatgcggttgacaggtacggaagaaggattctcttccttgaaggaggcatccaaatgattgtttcccagatcgttgttggtaccttgattggtatgaagtttggaaccacgggatcagggaccttaacacctgcaacagcagattggatcctggctttcatatgtttgtatgttgcaggatttgcatggtcatggggtccattaggatggttagtaccaagtgagatctgtccattggaaatcagaccagcgggacaagccatcaacgtctctgtcaacatgttcttcactttcctcattggacagtttttcctcacgatgctttgccacatgaagtttggtctcttctacttctttggaggaatggttgcagtcatgaccgtcttcatctacttcttgttgccggagacaaaaggggttccaattgaagaaatgggaagagtatggaagcaacatccgttctggaaacgttacatgccagatgatgctgttattggaggaggtgaagaaaactacgtcaaggaggtttga

SEQ ID NO: 79765 - protein, 517 aa, Arabidopsis thaliana
  peptide (1)..(517): Ceres Seq. ID no. 12653129
  misc_feature (28)..(490): Pfam Name: Sugar (and other) transporter Pfam Description: Sugar (and other) transporter
  misc_feature (1)..(517): Homolog of NCBI NO: 15222935 NR Description: hexose transporter, putative; protein id: [Arabidopsis thaliana] >gi|25308942|pir||D96539 hypothetical
  misc_feature (1)..(512): Homolog of NCBI NO: 15231001 NR Description: putative monosaccharide transport protein, STP4; id: At3g19940.1 [Arabidopsis thaliana]
  misc_feature (1)..(503): Homolog of NCBI NO: 15237271 NR Description: monosaccharide transporter; protein id: [Arabidopsis thaliana] >gi|10177816|dbj|BAB11182.1| transporter [Arabidopsis thaliana] >gi|15487260|emb|CAC69075.1|
  misc_feature (1)..(503): Homolog of NCBI NO: 3108161 NR Description: putative monosaccharide transporter 1 [Petunia x
  misc_feature (1)..(517): Homolog of NCBI NO: 15230987 NR Description: monosaccharide transport protein, STP4; protein At3g19930.1, supported by cDNA: gi_13605905, supported by cDNA: [Arabidopsis thaliana] >gi|99758|pir||S25009 monosaccharide
  misc_feature (1)..(511): Homolog of NCBI NO: 1353516 NR Description: sugar transporter
  misc_feature (1)..(502): Homolog of NCBI NO: 100347 NR Description: monosaccharide transport protein MST1 - common >gi|19885|emb|CAA47324.1| monosaccharid transporter [Nicotiana
  misc_feature (12)..(517): Homolog of NCBI NO: 4138724 NR Description: hexose transporter [Vitis vinifera]
  misc_feature (11)..(503): Homolog of NCBI NO: 7446727 NR Description: monosaccharid transport protein - fava bean
MAGGAFVSEGGGGGNSYEGGVTVFVIMTCIVAAMGGLLFGYDLGISGGVTSMEEFLSKFFPEVDKQMHEARRETAYCKFDNQLLQLFTSSLYLAALASSFVASAVTRKYGRKISMFVGGVAFLIGSLFNAFATNVAMLIVGRLLLGVGVGFANQSTPVYLSEMAPAKIRGALNIGFQMAITIGILIANLINYGTSQMAKNGWRVSLGLAAVPAVIMVIGSFVLPDTPNSMLERGKYEQAREMLQKIRGADNVDEEFQDLCDACEAAKKVDNPWKNIFQQAKYRPALVFCSAIPFFQQITGINVIMFYAPVLFKTLGFADDASLISAVITGAVNVVSTLVSIYAVDRYGRRILFLEGGIQMIVSQIVVGTLIGMKFGTTGSGTLTPATADWILAFICLYVAGFAWSWGPLGWLVPSEICPLEIRPAGQAINVSVNMFFTFLIGQFFLTMLCHMKFGLFYFFGGMVAVMTVFIYFLLPETKGVPIEEMGRVWKQHPFWKRYMPDDAVIGGGEENYVKEV

SEQ ID NO: 79766 - protein, 491 aa, Arabidopsis thaliana
  peptide (1)..(491): Ceres Seq. ID no. 12653130
  misc_feature (2)..(464): Pfam Name: Sugar (and other) transporter Pfam Description: Sugar (and other) transporter
  misc_feature (1)..(491): Homolog of NCBI NO: 15222935 NR Description: hexose transporter, putative; protein id: [Arabidopsis thaliana] >gi|25308942|pir||D96539 hypothetical
  misc_feature (1)..(486): Homolog of NCBI NO: 15231001 NR Description: putative monosaccharide transport protein, STP4; id: At3g19940.1 [Arabidopsis thaliana]
  misc_feature (1)..(477): Homolog of NCBI NO: 15237271 NR Description: monosaccharide transporter; protein id: [Arabidopsis thaliana] >gi|10177816|dbj|BAB11182.1| transporter [Arabidopsis thaliana] >gi|15487260|emb|CAC69075.1|
  misc_feature (1)..(477): Homolog of NCBI NO: 3108161 NR Description: putative monosaccharide transporter 1 [Petunia x
  misc_feature (1)..(491): Homolog of NCBI NO: 15230987 NR Description: monosaccharide transport protein, STP4; protein At3g19930.1, supported by cDNA: gi_13605905, supported by cDNA: [Arabidopsis thaliana] >gi|99758|pir||S25009 monosaccharide
  misc_feature (1)..(485): Homolog of NCBI NO: 1353516 NR Description: sugar transporter
  misc_feature (1)..(476): Homolog of NCBI NO: 100347 NR Description: monosaccharide transport protein MST1 - common >gi|19885|emb|CAA47324.1| monosaccharid transporter [Nicotiana
  misc_feature (1)..(491): Homolog of NCBI NO: 4138724 NR Description: hexose transporter [Vitis vinifera]
  misc_feature (1)..(477): Homolog of NCBI NO: 7446727 NR Description: monosaccharid transport protein - fava bean
MTCIVAAMGGLLFGYDLGISGGVTSMEEFLSKFFPEVDKQMHEARRETAYCKFDNQLLQLFTSSLYLAALASSFVASAVTRKYGRKISMFVGGVAFLIGSLFNAFATNVAMLIVGRLLLGVGVGFANQSTPVYLSEMAPAKIRGALNIGFQMAITIGILIANLINYGTSQMAKNGWRVSLGLAAVPAVIMVIGSFVLPDTPNSMLERGKYEQAREMLQKIRGADNVDEEFQDLCDACEAAKKVDNPWKNIFQQAKYRPALVFCSAIPFFQQITGINVIMFYAPVLFKTLGFADDASLISAVITGAVNVVSTLVSIYAVDRYGRRILFLEGGIQMIVSQIVVGTLIGMKFGTTGSGTLTPATADWILAFICLYVAGFAWSWGPLGWLVPSEICPLEIRPAGQAINVSVNMFFTFLIGQFFLTMLCHMKFGLFYFFGGMVAVMTVFIYFLLPETKGVPIEEMGRVWKQHPFWKRYMPDDAVIGGGEENYVKEV

SEQ ID NO: 79767 - protein, 484 aa, Arabidopsis thaliana
  peptide (1)..(484): Ceres Seq. ID no. 12653131
  misc_feature (1)..(457): Pfam Name: Sugar (and other) transporter Pfam Description: Sugar (and other) transporter
  misc_feature (1)..(484): Homolog of NCBI NO: 15222935 NR Description: hexose transporter, putative; protein id: [Arabidopsis thaliana] >gi|25308942|pir||D96539 hypothetical
  misc_feature (1)..(479): Homolog of NCBI NO: 15231001 NR Description: putative monosaccharide transport protein, STP4; id: At3g19940.1 [Arabidopsis thaliana]
  misc_feature (1)..(470): Homolog of NCBI NO: 15237271 NR Description: monosaccharide transporter; protein id: [Arabidopsis thaliana] >gi|10177816|dbj|BAB11182.1| transporter [Arabidopsis thaliana] >gi|15487260|emb|CAC69075.1|
  misc_feature (1)..(470): Homolog of NCBI NO: 3108161 NR Description: putative monosaccharide transporter 1 [Petunia x
  misc_feature (1)..(484): Homolog of NCBI NO: 15230987 NR Description: monosaccharide transport protein, STP4; protein At3g19930.1, supported by cDNA: gi_13605905, supported by cDNA: [Arabidopsis thaliana] >gi|99758|pir||S25009 monosaccharide
  misc_feature (1)..(478): Homolog of NCBI NO: 1353516 NR Description: sugar transporter
  misc_feature (1)..(469): Homolog of NCBI NO: 100347 NR Description: monosaccharide transport protein MST1 - common >gi|19885|emb|CAA47324.1| monosaccharid transporter [Nicotiana
  misc_feature (1)..(484): Homolog of NCBI NO: 4138724 NR Description: hexose transporter [Vitis vinifera]
  misc_feature (1)..(470): Homolog of NCBI NO: 7446727 NR Description: monosaccharid transport protein - fava bean
MGGLLFGYDLGISGGVTSMEEFLSKFFPEVDKQMHEARRETAYCKFDNQLLQLFTSSLYLAALASSFVASAVTRKYGRKISMFVGGVAFLIGSLFNAFATNVAMLIVGRLLLGVGVGFANQSTPVYLSEMAPAKIRGALNIGFQMAITIGILIANLINYGTSQMAKNGWRVSLGLAAVPAVIMVIGSFVLPDTPNSMLERGKYEQAREMLQKIRGADNVDEEFQDLCDACEAAKKVDNPWKNIFQQAKYRPALVFCSAIPFFQQITGINVIMFYAPVLFKTLGFADDASLISAVITGAVNVVSTLVSIYAVDRYGRRILFLEGGIQMIVSQIVVGTLIGMKFGTTGSGTLTPATADWILAFICLYVAGFAWSWGPLGWLVPSEICPLEIRPAGQAINVSVNMFFTFLIGQFFLTMLCHMKFGLFYFFGGMVAVMTVFIYFLLPETKGVPIEEMGRVWKQHPFWKRYMPDDAVIGGGEENYVKEV

SEQ ID NO: 79768 - DNA, 933 bp, Arabidopsis thaliana
  misc_feature (1)..(933): Ceres Seq. ID no. 12653136
  misc_feature: MA Experiment ID: 20000180 Result: Down-regulated in Transcription
  misc_feature: MA Experiment 20000180 PARAMETER Experiment Name: At_Germinating_Seeds_P Parameter: Age (hr) Value: 24 vs. 0
  misc_feature: MA Experiment 20000180 PARAMETER Experiment Name: At_Germinating_Seeds_P Parameter: Tissue Value: Germinating Seeds
  misc_feature: MA Experiment ID: 20001458 Result: Up-regulated in Transcription
  misc_feature: MA Experiment 20001458 PARAMETER Experiment Name: At_50mM_NH4NO3_L-to-H_P Parameter: Age (day) Value: Undefined
  misc_feature: MA Experiment 20001458 PARAMETER Experiment Name: At_50mM_NH4NO3_L-to-H_P Parameter: Organism Value: Undefined
  misc_feature: MA Experiment 20001458 PARAMETER Experiment Name: At_50mM_NH4NO3_L-to-H_P Parameter: Plant Line Value: Undefined
  misc_feature: MA Experiment 20001458 PARAMETER Experiment Name: At_50mM_NH4NO3_L-to-H_P Parameter: Timepoint (hr) Value: 2
  misc_feature: MA Experiment 20001458 PARAMETER Experiment Name: At_50mM_NH4NO3_L-to-H_P Parameter: Tissue Value: Siliques
  misc_feature: MA Experiment 20001458 PARAMETER Experiment Name: At_50mM_NH4NO3_L-to-H_P Parameter: Treatment Value: 50mM NH4NO3 vs. 100mM Manitol
atggagggcttttcaccaccgattaacactgcgcaagtcgatgcaaagaccaaacttgacgagaaagtggattactcaaacctcccttgccctgtcctctatgaggaactcaaccgtgaagctaccatggctttaaagccagagctatttgagggtttccgcctcgactataacaagtcgcttaaccagaagttttttctcagccatagcatattgatggggccaactgaggttcctaatccaactccatcatccgaaataatcaaaattccaactgccaattatgactttggtgctggtttcatcgatccaaagctatatcttatcggaaggatcacgacggacggtagactaaatgcgagagccaagttcgatttaactgacaatttttccgtcaaggctaatgctctgctgacagatgaagaagataagtcgcaaggccacctcgtcattgattacaaggggtctgactacagaactcagcttcagcttggaaacaattccgtttatgcagctaactatattcagcatgtgacaccacacctgtctttgggtggtgaggctttctggcttggtcagcaactgatgtcgggtgttggttatgcagctcgatatgagactgacaaaacggttgcctctgggcaaattgcttccactggtgtggctgtcatgaactatgttcataaggtttcagagaagttgtcatttgcaacggatttcatctacaattatttgtcacgagatgttacagctagtgtcgggtatgacctcattactagacagtctcgattaagaggaaaggttgattctaacggtgttgtcgctgcttaccttgaagaacaattgcctattggactcagatttcttctatctgcagaggtggatcatgtgaagaaggattacaagtttggtttcggtgttaacgccttttaa

SEQ ID NO: 79769 - protein, 310 aa, Arabidopsis thaliana
  peptide (1)..(310): Ceres Seq. ID no. 12653137
  misc_feature (30)..(106): Pfam Name: Eukaryotic porin Pfam Description: Eukaryotic porin
  misc_feature (1)..(310): Homolog of NCBI NO: 15222963 NR Description: hypothetical protein; protein id: At1g50400.1
  misc_feature (138)..(310): Homolog of NCBI NO: 13162531 NR Description: Hypothetical protein [Arabidopsis thaliana]
  misc_feature (1)..(106): Homolog of NCBI NO: 13162531 NR Description: Hypothetical protein [Arabidopsis thaliana]
  misc_feature (1)..(307): Homolog of NCBI NO: 15231008 NR Description: membrane import protein, putative; protein id: supported by cDNA: gi_15292982 [Arabidopsis thaliana] Probable mitochondrial import receptor subunit TOM40 homolog
  misc_feature (138)..(310): Homolog of NCBI NO: 25405370 NR Description: hypothetical protein F14I3.2 [imported] -
  misc_feature (73)..(106): Homolog of NCBI NO: 25405370 NR Description: hypothetical protein F14I3.2 [imported] -
  misc_feature (138)..(307): Homolog of NCBI NO: 11994775 NR Description: membrane import protein-like [Arabidopsis
  misc_feature (1)..(106): Homolog of NCBI NO: 11994775 NR Description: membrane import protein-like [Arabidopsis
  misc_feature (184)..(307): Homolog of NCBI NO: 34903264 NR Description: unnamed protein product [Oryza sativa (japonica group)] >gi|6539563|dbj|BAA88180.1| unnamed protein product
  misc_feature (5)..(106): Homolog of NCBI NO: 34903264 NR Description: unnamed protein product [Oryza sativa (japonica group)] >gi|6539563|dbj|BAA88180.1| unnamed protein product
MEGFSPPINTAQVDAKTKLDEKVDYSNLPCPVLYEELNREATMALKPELFEGFRLDYNKSLNQKFFLSHSILMGPTEVPNPTPSSEIIKIPTANYDFGAGFIDPKLYLIGRITTDGRLNARAKFDLTDNFSVKANALLTDEEDKSQGHLVIDYKGSDYRTQLQLGNNSVYAANYIQHVTPHLSLGGEAFWLGQQLMSGVGYAARYETDKTVASGQIASTGVAVMNYVHKVSEKLSFATDFIYNYLSRDVTASVGYDLITRQSRLRGKVDSNGVVAAYLEEQLPIGLRFLLSAEVDHVKKDYKFGFGVNAF

SEQ ID NO: 79770 - protein, 268 aa, Arabidopsis thaliana
  peptide (1)..(268): Ceres Seq. ID no. 12653138
  misc_feature (1)..(64): Pfam Name: Eukaryotic porin Pfam Description: Eukaryotic porin
  misc_feature (1)..(268): Homolog of NCBI NO: 15222963 NR Description: hypothetical protein; protein id: At1g50400.1
  misc_feature (96)..(268): Homolog of NCBI NO: 13162531 NR Description: Hypothetical protein [Arabidopsis thaliana]
  misc_feature (1)..(64): Homolog of NCBI NO: 13162531 NR Description: Hypothetical protein [Arabidopsis thaliana]
  misc_feature (1)..(265): Homolog of NCBI NO: 15231008 NR Description: membrane import protein, putative; protein id: supported by cDNA: gi_15292982 [Arabidopsis thaliana] Probable mitochondrial import receptor subunit TOM40 homolog
  misc_feature (96)..(268): Homolog of NCBI NO: 25405370 NR Description: hypothetical protein F14I3.2 [imported] -
  misc_feature (31)..(64): Homolog of NCBI NO: 25405370 NR Description: hypothetical protein F14I3.2 [imported] -
  misc_feature (96)..(265): Homolog of NCBI NO: 11994775 NR Description: membrane import protein-like [Arabidopsis
  misc_feature (1)..(64): Homolog of NCBI NO: 11994775 NR Description: membrane import protein-like [Arabidopsis
  misc_feature (142)..(265): Homolog of NCBI NO: 34903264 NR Description: unnamed protein product [Oryza sativa (japonica group)] >gi|6539563|dbj|BAA88180.1| unnamed protein product
  misc_feature (1)..(64): Homolog of NCBI NO: 34903264 NR Description: unnamed protein product [Oryza sativa (japonica group)] >gi|6539563|dbj|BAA88180.1| unnamed protein product
MALKPELFEGFRLDYNKSLNQKFFLSHSILMGPTEVPNPTPSSEIIKIPTANYDFGAGFIDPKLYLIGRITTDGRLNARAKFDLTDNFSVKANALLTDEEDKSQGHLVIDYKGSDYRTQLQLGNNSVYAANYIQHVTPHLSLGGEAFWLGQQLMSGVGYAARYETDKTVASGQIASTGVAVMNYVHKVSEKLSFATDFIYNYLSRDVTASVGYDLITRQSRLRGKVDSNGVVAAYLEEQLPIGLRFLLSAEVDHVKKDYKFGFGVNAF

SEQ ID NO: 79771 - protein, 238 aa, Arabidopsis thaliana
  peptide (1)..(238): Ceres Seq. ID no. 12653139
  misc_feature (66)..(232): Pfam Name: Eukaryotic porin Pfam Description: Eukaryotic porin
  misc_feature (1)..(238): Homolog of NCBI NO: 15222963 NR Description: hypothetical protein; protein id: At1g50400.1
  misc_feature (66)..(238): Homolog of NCBI NO: 13162531 NR Description: Hypothetical protein [Arabidopsis thaliana]
  misc_feature (1)..(34): Homolog of NCBI NO: 13162531 NR Description: Hypothetical protein [Arabidopsis thaliana]
  misc_feature (1)..(235): Homolog of NCBI NO: 15231008 NR Description: membrane import protein, putative; protein id: supported by cDNA: gi_15292982 [Arabidopsis thaliana] Probable mitochondrial import receptor subunit TOM40 homolog
  misc_feature (66)..(238): Homolog of NCBI NO: 25405370 NR Description: hypothetical protein F14I3.2 [imported] -
  misc_feature (1)..(34): Homolog of NCBI NO: 25405370 NR Description: hypothetical protein F14I3.2 [imported] -
  misc_feature (66)..(235): Homolog of NCBI NO: 11994775 NR Description: membrane import protein-like [Arabidopsis
  misc_feature (1)..(34): Homolog of NCBI NO: 11994775 NR Description: membrane import protein-like [Arabidopsis
  misc_feature (112)..(235): Homolog of NCBI NO: 34903264 NR Description: unnamed protein product [Oryza sativa (japonica group)] >gi|6539563|dbj|BAA88180.1| unnamed protein product
  misc_feature (1)..(34): Homolog of NCBI NO: 34903264 NR Description: unnamed protein product [Oryza sativa (japonica group)] >gi|6539563|dbj|BAA88180.1| unnamed protein product
MGPTEVPNPTPSSEIIKIPTANYDFGAGFIDPKLYLIGRITTDGRLNARAKFDLTDNFSVKANALLTDEEDKSQGHLVIDYKGSDYRTQLQLGNNSVYAANYIQHVTPHLSLGGEAFWLGQQLMSGVGYAARYETDKTVASGQIASTGVAVMNYVHKVSEKLSFATDFIYNYLSRDVTASVGYDLITRQSRLRGKVDSNGVVAAYLEEQLPIGLRFLLSAEVDHVKKDYKFGFGVNAF

SEQ ID NO: 79772 - DNA, 1984 bp, Arabidopsis thaliana
  misc_feature (1)..(1984): Ceres Seq. ID no. 12653150
  misc_feature: MA Experiment ID: 20000437 Result: Down-regulated in Transcription
  misc_feature: MA Experiment 20000437 PARAMETER Experiment Name: At_Drought_P Parameter: Age (day) Value: 8
  misc_feature: MA Experiment 20000437 PARAMETER Experiment Name: At_Drought_P Parameter: Organism Value: A. thaliana
  misc_feature: MA Experiment 20000437 PARAMETER Experiment Name: At_Drought_P Parameter: Plant Line Value: WS
  misc_feature: MA Experiment 20000437 PARAMETER Experiment Name: At_Drought_P Parameter: Timepoint (hr) Value: 24
  misc_feature: MA Experiment 20000437 PARAMETER Experiment Name: At_Drought_P Parameter: Tissue Value: Whole Plant
  misc_feature: MA Experiment 20000437 PARAMETER Experiment Name: At_Drought_P Parameter: Treatment Value: Drought vs. No Drought
  misc_feature: MA Experiment ID: 20000439 Result: Up-regulated in Transcription
  misc_feature: MA Experiment 20000439 PARAMETER Experiment Name: At_Roots__P Parameter: Age (day) Value: 14 vs. 21
  misc_feature: MA Experiment 20000439 PARAMETER Experiment Name: At_Roots__P Parameter: Organism Value: A. thaliana
  misc_feature: MA Experiment 20000439 PARAMETER Experiment Name: At_Roots__P Parameter: Tissue Value: Roots vs. Whole Plant
gatctaaagagtacatataataaaaccagtctgcttcatctaaccctctctgcagtttttagacaacaatggcagcaatcagcgttgactttcagctctgcttcatcttcatcctcctagcaatcttctcactcttctgtttctctgctttcttcttcaagaaaccaaaagacccacaacttcaaggctgcggtctacctccgagcccaccgtctctaccgatcattggtcatcttcactttctcctctctgttccatgttacaaatcctttcagaaactctcctccaagtatggtcccttccttcacctccgcgctttcaatatccctatagttctagtctcgtcgggctccatggccaacgaagttttgaggatccaagacctgaactttgctagccgtgatagcgggcagactcctataatggaaaaatcattactttttggatcttttggctttgtctcagttccttatggagattactggagattcatgaagaagctcttagtcaaaaaacttctcgggtctcattccctcgagcagacacggctcctccgtgggaaagaactccaaactttccgtgctatgttgtttgataaggcggcaaagaatgagactgttgacgttggtaaagagatgatgaagctaacgaacaacagcatttgcaggatgacaatggggaggagctgttcagaggagaacggtgaagcagagcaagtcaggggtttggtgaccaaatcacttagtttgacgaagaagttcctcatagctagcattgttggtcaattttccaagctggtcgggatctctttgtttgggaaggaaatcatggaggtctcgcagaggtacgatgaattgctggagaaaattattaaggaacacgaagaaaatcccaacaatggagaggatagagacatgatggatgttctattggaagtttgtgcagatgacaacgccgagtttaagatttccaggaaccaaatcaaagcactttttgtggagattttccttgcaggcactgatacttcagcacaaacaatacagtggatattggcagaactcattaaccatcccgagattcttgaaaagttgagaaaagagatagaatctgttgttggggttaggagactgattcaagaaacagatctccccaacctgccgtatttacaggctgtgatgaaagaagggctaagactacacccgcatacgccaatcttggtgaggaatgcaacagaaggatgcaagatcggagggtattacatagggcagaacacaacaatgatggtaaacgcttatgcggtgctgagagatccggattcatgggaatatccagaagaatttcagcccgagaggttcatgacttctcctttaaaagggaaagaagatgagaaagcacagctagccttgaacttcattcctttcgggagtggaagaagaggatgtctcggaaaaaacttgggttatatcttcatgggagtagccattggaacaatggtgcagggttttgattggagaatcaatggagataaggttaacatggaagagactggagaaatgacgctgaccatggctcatccacttaaatgcattcctgttgctcgaatcaacccagctagctttgatccttagttgatgatggaggagtatgatatgtcttgttgaagttgcagacatatgtctcaaactgataatggaactagatttgggtattttcgaattaaccatctagctaccgtcaatctagagatccttacatgatggttgaatttgatatatcctgttgatgttgaagacatatatctctgcaactggtaatggaacttgctgtctttgtattgttttcttcttcaaacacaaacttgttgtctttatgtctttgtattgttttcttcttcaaacacaaacttcttgtctttatgtctatctgttatatgagaagggaagagattatgaaactttagtactaaattggaaaagttgcagat

SEQ ID NO: 79773 - protein, 519 aa, Arabidopsis thaliana
  peptide (1)..(519): Ceres Seq. ID no. 12653151
  misc_feature (44)..(510): Pfam Name: Cytochrome P450 Pfam Description: Cytochrome P450
  misc_feature (1)..(519): Homolog of NCBI NO: 15223584 NR Description: cytochrome P450, putative; protein id: supported by cDNA: gi_17064993 [Arabidopsis thaliana]
  misc_feature (1)..(519): Homolog of NCBI NO: 15223580 NR Description: cytochrome p450 family; protein id: At1g50520.1
  misc_feature (5)..(517): Homolog of NCBI NO: 15231049 NR Description: cytochrome p450 family; protein id: At3g20100.1, by cDNA: 149380., supported by cDNA: gi_15215771 [Arabidopsis
  misc_feature (5)..(517): Homolog of NCBI NO: 21553521 NR Description: cytochrome P450, putative [Arabidopsis thaliana]
  misc_feature (1)..(512): Homolog of NCBI NO: 15225585 NR Description: cytochrome p450 family; protein id: At2g14100.1
  misc_feature (1)..(518): Homolog of NCBI NO: 9293969 NR Description: cytochrome P450-like protein [Arabidopsis
  misc_feature (1)..(514): Homolog of NCBI NO: 9294003 NR Description: cytochrome P450-like protein [Arabidopsis
  misc_feature (4)..(517): Homolog of NCBI NO: 15231047 NR Description: cytochrome P450, putative; protein id: At3g20090.1
  misc_feature (1)..(511): Homolog of NCBI NO: 15231053 NR Description: cytochrome p450 family; protein id: At3g20140.1
  misc_feature (1)..(511): Homolog of NCBI NO: 15238866 NR Description: cytochrome p450 family; protein id: At5g47990.1 thaliana] >gi|10177750|dbj|BAB11063.1| cytochrome P450
MAAISVDFQLCFIFILLAIFSLFCFSAFFFKKPKDPQLQGCGLPPSPPSLPIIGHLHFLLSVPCYKSFQKLSSKYGPFLHLRAFNIPIVLVSSGSMANEVLRIQDLNFASRDSGQTPIMEKSLLFGSFGFVSVPYGDYWRFMKKLLVKKLLGSHSLEQTRLLRGKELQTFRAMLFDKAAKNETVDVGKEMMKLTNNSICRMTMGRSCSEENGEAEQVRGLVTKSLSLTKKFLIASIVGQFSKLVGISLFGKEIMEVSQRYDELLEKIIKEHEENPNNGEDRDMMDVLLEVCADDNAEFKISRNQIKALFVEIFLAGTDTSAQTIQWILAELINHPEILEKLRKEIESVVGVRRLIQETDLPNLPYLQAVMKEGLRLHPHTPILVRNATEGCKIGGYYIGQNTTMMVNAYAVLRDPDSWEYPEEFQPERFMTSPLKGKEDEKAQLALNFIPFGSGRRGCLGKNLGYIFMGVAIGTMVQGFDWRINGDKVNMEETGEMTLTMAHPLKCIPVARINPASFDP

SEQ ID NO: 79774 - protein, 424 aa, Arabidopsis thaliana
  peptide (1)..(424): Ceres Seq. ID no. 12653152
  misc_feature (1)..(415): Pfam Name: Cytochrome P450 Pfam Description: Cytochrome P450
  misc_feature (1)..(424): Homolog of NCBI NO: 15223584 NR Description: cytochrome P450, putative; protein id: supported by cDNA: gi_17064993 [Arabidopsis thaliana]
  misc_feature (1)..(424): Homolog of NCBI NO: 15223580 NR Description: cytochrome p450 family; protein id: At1g50520.1
  misc_feature (1)..(422): Homolog of NCBI NO: 15231049 NR Description: cytochrome p450 family; protein id: At3g20100.1, by cDNA: 149380., supported by cDNA: gi_15215771 [Arabidopsis
  misc_feature (1)..(422): Homolog of NCBI NO: 21553521 NR Description: cytochrome P450, putative [Arabidopsis thaliana]
  misc_feature (1)..(417): Homolog of NCBI NO: 15225585 NR Description: cytochrome p450 family; protein id: At2g14100.1
  misc_feature (1)..(423): Homolog of NCBI NO: 9293969 NR Description: cytochrome P450-like protein [Arabidopsis
  misc_feature (1)..(419): Homolog of NCBI NO: 9294003 NR Description: cytochrome P450-like protein [Arabidopsis
  misc_feature (1)..(422): Homolog of NCBI NO: 15231047 NR Description: cytochrome P450, putative; protein id: At3g20090.1
  misc_feature (1)..(416): Homolog of NCBI NO: 15231053 NR Description: cytochrome p450 family; protein id: At3g20140.1
  misc_feature (1)..(416): Homolog of NCBI NO: 15238866 NR Description: cytochrome p450 family; protein id: At5g47990.1 thaliana] >gi|10177750|dbj|BAB11063.1| cytochrome P450
MANEVLRIQDLNFASRDSGQTPIMEKSLLFGSFGFVSVPYGDYWRFMKKLLVKKLLGSHSLEQTRLLRGKELQTFRAMLFDKAAKNETVDVGKEMMKLTNNSICRMTMGRSCSEENGEAEQVRGLVTKSLSLTKKFLIASIVGQFSKLVGISLFGKEIMEVSQRYDELLEKIIKEHEENPNNGEDRDMMDVLLEVCADDNAEFKISRNQIKALFVEIFLAGTDTSAQTIQWILAELINHPEILEKLRKEIESVVGVRRLIQETDLPNLPYLQAVMKEGLRLHPHTPILVRNATEGCKIGGYYIGQNTTMMVNAYAVLRDPDSWEYPEEFQPERFMTSPLKGKEDEKAQLALNFIPFGSGRRGCLGKNLGYIFMGVAIGTMVQGFDWRINGDKVNMEETGEMTLTMAHPLKCIPVARINPASFDP

SEQ ID NO: 79775 - protein, 401 aa, Arabidopsis thaliana
  peptide (1)..(401): Ceres Seq. ID no. 12653153
  misc_feature (1)..(392): Pfam Name: Cytochrome P450 Pfam Description: Cytochrome P450
  misc_feature (1)..(401): Homolog of NCBI NO: 15223584 NR Description: cytochrome P450, putative; protein id: supported by cDNA: gi_17064993 [Arabidopsis thaliana]
  misc_feature (1)..(401): Homolog of NCBI NO: 15223580 NR Description: cytochrome p450 family; protein id: At1g50520.1
  misc_feature (1)..(399): Homolog of NCBI NO: 15231049 NR Description: cytochrome p450 family; protein id: At3g20100.1, by cDNA: 149380., supported by cDNA: gi_15215771 [Arabidopsis
  misc_feature (1)..(399): Homolog of NCBI NO: 21553521 NR Description: cytochrome P450, putative [Arabidopsis thaliana]
  misc_feature (1)..(394): Homolog of NCBI NO: 15225585 NR Description: cytochrome p450 family; protein id: At2g14100.1
  misc_feature (1)..(400): Homolog of NCBI NO: 9293969 NR Description: cytochrome P450-like protein [Arabidopsis
  misc_feature (1)..(396): Homolog of NCBI NO: 9294003 NR Description: cytochrome P450-like protein [Arabidopsis
  misc_feature (1)..(399): Homolog of NCBI NO: 15231047 NR Description: cytochrome P450, putative; protein id: At3g20090.1
  misc_feature (1)..(393): Homolog of NCBI NO: 15231053 NR Description: cytochrome p450 family; protein id: At3g20140.1
  misc_feature (1)..(393): Homolog of NCBI NO: 15238866 NR Description: cytochrome p450 family; protein id: At5g47990.1 thaliana] >gi|10177750|dbj|BAB11063.1| cytochrome P450
MEKSLLFGSFGFVSVPYGDYWRFMKKLLVKKLLGSHSLEQTRLLRGKELQTFRAMLFDKAAKNETVDVGKEMMKLTNNSICRMTMGRSCSEENGEAEQVRGLVTKSLSLTKKFLIASIVGQFSKLVGISLFGKEIMEVSQRYDELLEKIIKEHEENPNNGEDRDMMDVLLEVCADDNAEFKISRNQIKALFVEIFLAGTDTSAQTIQWILAELINHPEILEKLRKEIESVVGVRRLIQETDLPNLPYLQAVMKEGLRLHPHTPILVRNATEGCKIGGYYIGQNTTMMVNAYAVLRDPDSWEYPEEFQPERFMTSPLKGKEDEKAQLALNFIPFGSGRRGCLGKNLGYIFMGVAIGTMVQGFDWRINGDKVNMEETGEMTLTMAHPLKCIPVARINPASFDP

SEQ ID NO: 79776 - DNA, 1347 bp, Arabidopsis thaliana
  misc_feature (1)..(1347): Ceres Seq. ID no. 12653158
  misc_feature: MA Experiment ID: 20000180 Result: Up-regulated in Transcription
  misc_feature: MA Experiment 20000180 PARAMETER Experiment Name: At_Germinating_Seeds_P Parameter: Age (hr) Value: 24 vs. 0
  misc_feature: MA Experiment 20000180 PARAMETER Experiment Name: At_Germinating_Seeds_P Parameter: Tissue Value: Germinating Seeds
atgggatcaaaatttcatgcttttatgtatccatggtttggttttggtcatatgattccatatcttcatttagccaacaaactagctgagaaaggtcatagggtcactttcttcctccccaagaaagctcataagcagctccaacctctcaatctgttcccagacagcattgtctttgagcctcttactctccctcctgtcgatggtctcccttttggcgccgagacagcctcggatctcccaaactcaactaagaaacccatattcgttgccatggatctcttacgcgatcagatcgaagcaaaggtccgtgctttgaaaccagatctaatctttttcgattttgttcattgggttccagaaatggcagaagagtttggaataaagagtgtcaattaccagatcatatcggcagcttgtgtagctatggttcttgcacctagggctgaattagggtttcctccgccggattatcctttatccaaagtggcgttacgtggacatgaagctaacgtctgttctctctttgcgaattcccatgagcttttcggtctgatcaccaaaggccttaagaactgtgacgtcgtttccataaggacctgcgtggaacttgaaggtaagctatgcggtttcatcgaaaaagaatgtcaaaagaaacttctcttaaccggtccaatgctccctgaaccgcaaaataagagtggtaaatttctagaagaccgatggaatcactggttaaacggatttgaaccagggtcggtagtgttttgtgcgtttggcactcaattctttttcgagaaggatcaatttcaagaattctgtttaggaatggagctaatgggtctaccgtttttaatatcggttatgccgccaaaaggctcaccaacggttcaagaagcgttaccaaaaggattcgaagaacgggttaaaaagcatggaatcgtttgggaaggatggttggaacaacctttgatattgtctcatccatcagtaggttgctttgtgaaccattgtggctttggttcaatgtgggagtctttggttagtgattgtcagattgtgtttattccacaattggcagatcaagttctcatcacaagattgttgactgaagaactcgaagtctctgtgaaagtgcagagagaagattccggatggttctcgaaagaggacttgagagatactgttaaatctgtgatggatatagatagtgagattgggaacttagtgaagaggaatcataagaaattgaaagagactttagttagtcctggattgttaagtggttatgctgataagtttgtagaagcattggagattgaagtcaacaacaccaaattttcttga

SEQ ID NO: 79777 - protein, 448 aa, Arabidopsis thaliana
  peptide (1)..(448): Ceres Seq. ID no. 12653159
  misc_feature (1)..(448): Homolog of NCBI NO: 15223589 NR Description: putative indole-3-acetate protein id: At1g50580.1 [Arabidopsis thaliana]
  misc_feature (1)..(444): Homolog of NCBI NO: 15230017 NR Description: flavonol 3-O-Glucosyltransferase, putative;
  misc_feature (1)..(445): Homolog of NCBI NO: 15239523 NR Description: flavonol 3-O-glucosyltransferase-like protein; id: At5g53990.1, supported by cDNA: gi_17529305, supported by gi_20465446 [Arabidopsis thaliana] >gi|10177261|dbj|BAB10729.1|
  misc_feature (1)..(444): Homolog of NCBI NO: 15239525 NR Description: flavonol 3-O-glucosyltransferase-like protein;
  misc_feature (1)..(443): Homolog of NCBI NO: 15217796 NR Description: anthocyanidin-3-glucoside rhamnosyltransferase, protein id: At1g64920.1 [Arabidopsis thaliana]
  misc_feature (1)..(446): Homolog of NCBI NO: 15217773 NR Description: rhamnosyltransferase, putative; protein id:
  misc_feature (1)..(439): Homolog of NCBI NO: 15233903 NR Description: putative protein; protein id: At4g09500.1
  misc_feature (2)..(445): Homolog of NCBI NO: 15234196 NR Description: UDP rhamnose--anthocyanidin-3-glucoside
  misc_feature (2)..(445): Homolog of NCBI NO: 15234195 NR Description: UDP rhamnose-anthocyanidin-3-glucoside
  misc_feature (1)..(439): Homolog of NCBI NO: 15227766 NR Description: putative flavonol 3-O-glucosyltransferase;
MGSKFHAFMYPWFGFGHMIPYLHLANKLAEKGHRVTFFLPKKAHKQLQPLNLFPDSIVFEPLTLPPVDGLPFGAETASDLPNSTKKPIFVAMDLLRDQIEAKVRALKPDLIFFDFVHWVPEMAEEFGIKSVNYQIISAACVAMVLAPRAELGFPPPDYPLSKVALRGHEANVCSLFANSHELFGLITKGLKNCDVVSIRTCVELEGKLCGFIEKECQKKLLLTGPMLPEPQNKSGKFLEDRWNHWLNGFEPGSVVFCAFGTQFFFEKDQFQEFCLGMELMGLPFLISVMPPKGSPTVQEALPKGFEERVKKHGIVWEGWLEQPLILSHPSVGCFVNHCGFGSMWESLVSDCQIVFIPQLADQVLITRLLTEELEVSVKVQREDSGWFSKEDLRDTVKSVMDIDSEIGNLVKRNHKKLKETLVSPGLLSGYADKFVEALEIEVNNTKFS

SEQ ID NO: 79778 - protein, 440 aa, Arabidopsis thaliana
  peptide (1)..(440): Ceres Seq. ID no. 12653160
  misc_feature (1)..(440): Homolog of NCBI NO: 15223589 NR Description: putative indole-3-acetate protein id: At1g50580.1 [Arabidopsis thaliana]
  misc_feature (1)..(436): Homolog of NCBI NO: 15230017 NR Description: flavonol 3-O-Glucosyltransferase, putative;
  misc_feature (1)..(437): Homolog of NCBI NO: 15239523 NR Description: flavonol 3-O-glucosyltransferase-like protein; id: At5g53990.1, supported by cDNA: gi_17529305, supported by gi_20465446 [Arabidopsis thaliana] >gi|10177261|dbj|BAB10729.1|
  misc_feature (1)..(436): Homolog of NCBI NO: 15239525 NR Description: flavonol 3-O-glucosyltransferase-like protein;
  misc_feature (1)..(435): Homolog of NCBI NO: 15217796 NR Description: anthocyanidin-3-glucoside rhamnosyltransferase, protein id: At1g64920.1 [Arabidopsis thaliana]
  misc_feature (1)..(438): Homolog of NCBI NO: 15217773 NR Description: rhamnosyltransferase, putative; protein id:
  misc_feature (1)..(431): Homolog of NCBI NO: 15233903 NR Description: putative protein; protein id: At4g09500.1
  misc_feature (1)..(437): Homolog of NCBI NO: 15234196 NR Description: UDP rhamnose--anthocyanidin-3-glucoside
  misc_feature (1)..(437): Homolog of NCBI NO: 15234195 NR Description: UDP rhamnose-anthocyanidin-3-glucoside
  misc_feature (1)..(431): Homolog of NCBI NO: 15227766 NR Description: putative flavonol 3-O-glucosyltransferase;
MYPWFGFGHMIPYLHLANKLAEKGHRVTFFLPKKAHKQLQPLNLFPDSIVFEPLTLPPVDGLPFGAETASDLPNSTKKPIFVAMDLLRDQIEAKVRALKPDLIFFDFVHWVPEMAEEFGIKSVNYQIISAACVAMVLAPRAELGFPPPDYPLSKVALRGHEANVCSLFANSHELFGLITKGLKNCDVVSIRTCVELEGKLCGFIEKECQKKLLLTGPMLPEPQNKSGKFLEDRWNHWLNGFEPGSVVFCAFGTQFFFEKDQFQEFCLGMELMGLPFLISVMPPKGSPTVQEALPKGFEERVKKHGIVWEGWLEQPLILSHPSVGCFVNHCGFGSMWESLVSDCQIVFIPQLADQVLITRLLTEELEVSVKVQREDSGWFSKEDLRDTVKSVMDIDSEIGNLVKRNHKKLKETLVSPGLLSGYADKFVEALEIEVNNTKFS

SEQ ID NO: 79779 - protein, 431 aa, Arabidopsis thaliana
  peptide (1)..(431): Ceres Seq. ID no. 12653161
  misc_feature (1)..(431): Homolog of NCBI NO: 15223589 NR Description: putative indole-3-acetate protein id: At1g50580.1 [Arabidopsis thaliana]
  misc_feature (1)..(427): Homolog of NCBI NO: 15230017 NR Description: flavonol 3-O-Glucosyltransferase, putative;
  misc_feature (1)..(428): Homolog of NCBI NO: 15239523 NR Description: flavonol 3-O-glucosyltransferase-like protein; id: At5g53990.1, supported by cDNA: gi_17529305, supported by gi_20465446 [Arabidopsis thaliana] >gi|10177261|dbj|BAB10729.1|
  misc_feature (1)..(427): Homolog of NCBI NO: 15239525 NR Description: flavonol 3-O-glucosyltransferase-like protein;
  misc_feature (1)..(426): Homolog of NCBI NO: 15217796 NR Description: anthocyanidin-3-glucoside rhamnosyltransferase, protein id: At1g64920.1 [Arabidopsis thaliana]
  misc_feature (1)..(429): Homolog of NCBI NO: 15217773 NR Description: rhamnosyltransferase, putative; protein id:
  misc_feature (1)..(422): Homolog of NCBI NO: 15233903 NR Description: putative protein; protein id: At4g09500.1
  misc_feature (1)..(428): Homolog of NCBI NO: 15234196 NR Description: UDP rhamnose--anthocyanidin-3-glucoside
  misc_feature (1)..(428): Homolog of NCBI NO: 15234195 NR Description: UDP rhamnose-anthocyanidin-3-glucoside
  misc_feature (1)..(422): Homolog of NCBI NO: 15227766 NR Description: putative flavonol 3-O-glucosyltransferase;
MIPYLHLANKLAEKGHRVTFFLPKKAHKQLQPLNLFPDSIVFEPLTLPPVDGLPFGAETASDLPNSTKKPIFVAMDLLRDQIEAKVRALKPDLIFFDFVHWVPEMAEEFGIKSVNYQIISAACVAMVLAPRAELGFPPPDYPLSKVALRGHEANVCSLFANSHELFGLITKGLKNCDVVSIRTCVELEGKLCGFIEKECQKKLLLTGPMLPEPQNKSGKFLEDRWNHWLNGFEPGSVVFCAFGTQFFFEKDQFQEFCLGMELMGLPFLISVMPPKGSPTVQEALPKGFEERVKKHGIVWEGWLEQPLILSHPSVGCFVNHCGFGSMWESLVSDCQIVFIPQLADQVLITRLLTEELEVSVKVQREDSGWFSKEDLRDTVKSVMDIDSEIGNLVKRNHKKLKETLVSPGLLSGYADKFVEALEIEVNNTKFS

SEQ ID NO: 79780 - DNA, 1566 bp, Arabidopsis thaliana
  misc_feature (1)..(1566): Ceres Seq. ID no. 12653174
  misc_feature: MA Experiment ID: 20000315 Result: Down-regulated in Transcription
  misc_feature: MA Experiment 20000315 PARAMETER Experiment Name: At_14day_Shoots-Roots_Sub_P Parameter: Age (day) Value: 14
  misc_feature: MA Experiment 20000315 PARAMETER Experiment Name: At_14day_Shoots-Roots_Sub_P Parameter: Organism Value: A. thaliana
  misc_feature: MA Experiment 20000315 PARAMETER Experiment Name: At_14day_Shoots-Roots_Sub_P Parameter: Plant Line Value: WS
  misc_feature: MA Experiment 20000315 PARAMETER Experiment Name: At_14day_Shoots-Roots_Sub_P Parameter: Tissue Value: Shoots vs. Whole Plant
  misc_feature: MA Experiment ID: 20000327 Result: Down-regulated in Transcription
  misc_feature: MA Experiment 20000327 PARAMETER Experiment Name: At_42deg_Heat_Sub_P Parameter: Age (day) Value: 14
  misc_feature: MA Experiment 20000327 PARAMETER Experiment Name: At_42deg_Heat_Sub_P Parameter: Organism Value: A. thaliana
  misc_feature: MA Experiment 20000327 PARAMETER Experiment Name: At_42deg_Heat_Sub_P Parameter: Plant Line Value: WS
  misc_feature: MA Experiment 20000327 PARAMETER Experiment Name: At_42deg_Heat_Sub_P Parameter: Temperature (deg C) Value: 42 vs. 22
  misc_feature: MA Experiment 20000327 PARAMETER Experiment Name: At_42deg_Heat_Sub_P Parameter: Timepoint (hr) Value: 1
  misc_feature: MA Experiment 20000327 PARAMETER Experiment Name: At_42deg_Heat_Sub_P Parameter: Tissue Value: Aerial
  misc_feature: MA Experiment ID: 20000328 Result: Down-regulated in Transcription
  misc_feature: MA Experiment 20000328 PARAMETER Experiment Name: At_42deg_Heat_Sub_P Parameter: Age (day) Value: 14
  misc_feature: MA Experiment 20000328 PARAMETER Experiment Name: At_42deg_Heat_Sub_P Parameter: Organism Value: A. thaliana
  misc_feature: MA Experiment 20000328 PARAMETER Experiment Name: At_42deg_Heat_Sub_P Parameter: Plant Line Value: WS
  misc_feature: MA Experiment 20000328 PARAMETER Experiment Name: At_42deg_Heat_Sub_P Parameter: Temperature (deg C) Value: 42 vs. 22
  misc_feature: MA Experiment 20000328 PARAMETER Experiment Name: At_42deg_Heat_Sub_P Parameter: Timepoint (hr) Value: 6
  misc_feature: MA Experiment 20000328 PARAMETER Experiment Name: At_42deg_Heat_Sub_P Parameter: Tissue Value: Aerial
atggggaattgcttagccaagaaatacggattggtgatgaaaccacaacaaaatggtgaaagatcagttgagatcgagaacagaagaaggagcacccaccaagatccgtctaaaatatccaccggaacgaatcaaccaccaccttggcggaatccagcgaaacacagtggtgctgcagctatactcgagaagccgtacgaagacgtgaaactgttctacactttgagcaaagaattgggtcgaggccagtttggagtaacgtatctgtgcacagagaagtcgacggggaagagattcgcttgcaagtcgatttccaagaagaaacttgtgacgaaaggtgataaagaagatatgaggagagagattcagattatgcagcatttgagtggacaacctaacattgttgagtttaaaggagcttatgaagatgagaaagctgtgaatttggttatggagctttgtgctggtggtgaattgttcgataggattttagcaaagggacattacagtgagagagcagctgcttctgtttgtagacagattgttaatgttgtcaatatttgtcatttcatgggtgtgatgcatagagacttaaagcctgagaatttcttgttatctagcaaagatgagaaggctcttatcaaagccactgatttcggattatcagtctttatcgaagaagggagagtgtataaagatatagttgggagtgcatattatgttgctcctgaagttttgaagcggagatatggtaaagaaatcgatatatggagtgctggaattatactatacattctacttagtggtgtgcctccgttttgggctgaaacggagaaagggatatttgatgctatattggaaggtgaaatcgactttgaatcccaaccttggccctcaatttccaatagtgctaaagatttggtacgtagaatgttgacacaagatccgaaaagacggatttctgctgctgaagttcttaagcatccatggctaagagaaggtggagaagcatcggataagcctattgatagtgctgttctctcaaggatgaagcaatttagagcgatgaataaactaaagaaacttgctttaaaggtcattgcggagaacattgacacggaagaaatacaaggcttaaaggcgatgtttgctaatatagatacagacaatagtggtactatcacatacgaagaattgaaagaaggattagccaaactgggatcaagactcactgaagctgaagtgaaacagctcatggatgctgctgacgttgatggaaatgggtcaatagattacattgagtttattactgcaacaatgcatagacataggcttgaaagtaatgagaacgtttacaaagccttccaacattttgacaaagatgggagtggatacattacgacagacgagctagaggctgctttgaaggaatatggaatgggagatgatgctactatcaaagagattttgtctgatgtcgacgctgataatgacggtagaatcaactatgacgagttttgtgctatgatgagaagtgggaatccacaacaaccaagattgttctaa

SEQ ID NO: 79781 - protein, 521 aa, Arabidopsis thaliana
  peptide (1)..(521): Ceres Seq. ID no. 12653175
  misc_feature (73)..(331): Pfam Name: Protein kinase domain Pfam Description: Protein kinase domain
  misc_feature (1)..(521): Homolog of NCBI NO: 15223629 NR Description: calcium-dependent protein kinase; protein id:
  misc_feature (32)..(521): Homolog of NCBI NO: 15231140 NR Description: calmodulin-domain protein kinase CDPK isoform 9; id: At3g20410.1, supported by cDNA: gi_1399264 [Arabidopsis
  misc_feature (1)..(518): Homolog of NCBI NO: 4336426 NR Description: Ca2+-dependent protein kinase [Mesembryanthemum
  misc_feature (17)..(521): Homolog of NCBI NO: 7434369 NR Description: calcium-dependent protein kinase (EC 2.7.1.-) - potato >gi|1552214|dbj|BAA13440.1| calcium dependent protein
  misc_feature (16)..(521): Homolog of NCBI NO: 13561063 NR Description: protein kinase [Medicago sativa]
MGNCLAKKYGLVMKPQQNGERSVEIENRRRSTHQDPSKISTGTNQPPPWRNPAKHSGAAAILEKPYEDVKLFYTLSKELGRGQFGVTYLCTEKSTGKRFACKSISKKKLVTKGDKEDMRREIQIMQHLSGQPNIVEFKGAYEDEKAVNLVMELCAGGELFDRILAKGHYSERAAASVCRQIVNVVNICHFMGVMHRDLKPENFLLSSKDEKALIKATDFGLSVFIEEGRVYKDIVGSAYYVAPEVLKRRYGKEIDIWSAGIILYILLSGVPPFWAETEKGIFDAILEGEIDFESQPWPSISNSAKDLVRRMLTQDPKRRISAAEVLKHPWLREGGEASDKPIDSAVLSRMKQFRAMNKLKKLALKVIAENIDTEEIQGLKAMFANIDTDNSGTITYEELKEGLAKLGSRLTEAEVKQLMDAADVDGNGSIDYIEFITATMHRHRLESNENVYKAFQHFDKDGSGYITTDELEAALKEYGMGDDATIKEILSDVDADNDGRINYDEFCAMMRSGNPQQPRLF

SEQ ID NO: 79782 - protein, 509 aa, Arabidopsis thaliana
  peptide (1)..(509): Ceres Seq. ID no. 12653176
  misc_feature (61)..(319): Pfam Name: Protein kinase domain Pfam Description: Protein kinase domain
  misc_feature (1)..(509): Homolog of NCBI NO: 15223629 NR Description: calcium-dependent protein kinase; protein id:
  misc_feature (20)..(509): Homolog of NCBI NO: 15231140 NR Description: calmodulin-domain protein kinase CDPK isoform 9; id: At3g20410.1, supported by cDNA: gi_1399264 [Arabidopsis
  misc_feature (1)..(506): Homolog of NCBI NO: 4336426 NR Description: Ca2+-dependent protein kinase [Mesembryanthemum
  misc_feature (5)..(509): Homolog of NCBI NO: 7434369 NR Description: calcium-dependent protein kinase (EC 2.7.1.-) - potato >gi|1552214|dbj|BAA13440.1| calcium dependent protein
  misc_feature (4)..(509): Homolog of NCBI NO: 13561063 NR Description: protein kinase [Medicago sativa]
MKPQQNGERSVEIENRRRSTHQDPSKISTGTNQPPPWRNPAKHSGAAAILEKPYEDVKLFYTLSKELGRGQFGVTYLCTEKSTGKRFACKSISKKKLVTKGDKEDMRREIQIMQHLSGQPNIVEFKGAYEDEKAVNLVMELCAGGELFDRILAKGHYSERAAASVCRQIVNVVNICHFMGVMHRDLKPENFLLSSKDEKALIKATDFGLSVFIEEGRVYKDIVGSAYYVAPEVLKRRYGKEIDIWSAGIILYILLSGVPPFWAETEKGIFDAILEGEIDFESQPWPSISNSAKDLVRRMLTQDPKRRISAAEVLKHPWLREGGEASDKPIDSAVLSRMKQFRAMNKLKKLALKVIAENIDTEEIQGLKAMFANIDTDNSGTITYEELKEGLAKLGSRLTEAEVKQLMDAADVDGNGSIDYIEFITATMHRHRLESNENVYKAFQHFDKDGSGYITTDELEAALKEYGMGDDATIKEILSDVDADNDGRINYDEFCAMMRSGNPQQPRLF

SEQ ID NO: 79783 - protein, 404 aa, Arabidopsis thaliana
  peptide (1)..(404): Ceres Seq. ID no. 12653177
  misc_feature (1)..(214): Pfam Name: Protein kinase domain Pfam Description: Protein kinase domain
  misc_feature (1)..(404): Homolog of NCBI NO: 15223629 NR Description: calcium-dependent protein kinase; protein id:
  misc_feature (1)..(404): Homolog of NCBI NO: 15231140 NR Description: calmodulin-domain protein kinase CDPK isoform 9; id: At3g20410.1, supported by cDNA: gi_1399264 [Arabidopsis
  misc_feature (1)..(401): Homolog of NCBI NO: 4336426 NR Description: Ca2+-dependent protein kinase [Mesembryanthemum
  misc_feature (1)..(404): Homolog of NCBI NO: 7434369 NR Description: calcium-dependent protein kinase (EC 2.7.1.-) - potato >gi|1552214|dbj|BAA13440.1| calcium dependent protein
  misc_feature (1)..(404): Homolog of NCBI NO: 13561063 NR Description: protein kinase [Medicago sativa]
MRREIQIMQHLSGQPNIVEFKGAYEDEKAVNLVMELCAGGELFDRILAKGHYSERAAASVCRQIVNVVNICHFMGVMHRDLKPENFLLSSKDEKALIKATDFGLSVFIEEGRVYKDIVGSAYYVAPEVLKRRYGKEIDIWSAGIILYILLSGVPPFWAETEKGIFDAILEGEIDFESQPWPSISNSAKDLVRRMLTQDPKRRISAAEVLKHPWLREGGEASDKPIDSAVLSRMKQFRAMNKLKKLALKVIAENIDTEEIQGLKAMFANIDTDNSGTITYEELKEGLAKLGSRLTEAEVKQLMDAADVDGNGSIDYIEFITATMHRHRLESNENVYKAFQHFDKDGSGYITTDELEAALKEYGMGDDATIKEILSDVDADNDGRINYDEFCAMMRSGNPQQPRLF

SEQ ID NO: 79784 - DNA, 2307 bp, Arabidopsis thaliana
  misc_feature (1)..(2307): Ceres Seq. ID no. 12653190
  misc_feature: MA Experiment ID: 20000440 Result: Up-regulated in Transcription
  misc_feature: MA Experiment 20000440 PARAMETER Experiment Name: At_Closed-Flower__Sub_P Parameter: Tissue Value: Closed Flower vs. Whole Plant
atggagaacgcatcgtcatcgtcgagtcttctcattgaagagagagaagaagtaatggtaactgataaaggtcgttgcttgagaaaaaaccatttcttaaaaccctttgttacctccatcaatggaggctctgtggctgagcttccccgccgtgatgaacgtctctctgtttcctcttcgcagctactaaagctcttctctttgcggagaactttctctgggttttgggttgtagatgctcctttcgtatcttggcttgcaaaaatggaagctttacacgcacaaacatggagaaaagctgggatttttgaagcaattaaagtatctacttacagtatcaccaaaaacccatctctgattctctctgtttctgaaaaatggtgccctgaaaccaaatcgtttgtcttcccttggggtgaagcaaccataactttagaggatgtaatggtgcttctagggttttccgttttgggctctccggtctttgcccctttagaaacctcggagacgagagattcggtaaagaaactggagaatgtaagaatccagcatatgaatagcagcacagacaggcgtgtgagccaaaaatcatgggtttcgaccttcttgggtagaggtggggacatggagcatgtagcgtttctggtattgtggctttcgcttttcgtatttccagttaaatctcgtcgtaatatctcgaatcatgttttcccaatagctgttcgtttagctagaggggaaaggatagctcttgcccctgctattctcgcaatcctctacagagatttggatcgaatccatgaggtatctagagaagattgtgttgacaaattccatctggaatctttgtttaagttagtacaagtttggacatgggaaagattcaggaacataagaccaaaagccagtgacattcccaaaggtgaacctagaatagctcagtggcatggtttgcatcgaagatctaaggatgcgtggttctgttttgatgattttgagtggcgtccttatactaaagcattgaacaattggaacccatttcggttttaccttgaggaagctatttgggtgactgttgatgaaagtattgatgatgagtttgcttcttttgctcggtgtgtgacagtttctcagattgttggagatggttttgtagaggattacttcccaaatagagtggcgagacagttcggtttggatcaagatcttcctggtttggctacttgtcaaagaaactccacagaaaaggaagcttggaatgattacaataagtctcttattggtttaaacctctacatgccttctcgcctcgatcaaggttctgtcactgcgagataccgagtctggtggctgaaatcagtttcaaagtttctgagtcctgaagagatgaaggaagaatcaactgaaacttttaacgcaaggaagacatttgatcattatgacgaagattatgatgatgatattgatgcatctcccaaggtactgcctttgagtcaggtgtttcagaaattggaagaaggttttcccgcaaaacgcagaaggtctgtgatacatagattggtaaagcaagataagataggtgggtgtgtgaacagtcgtgtatcatcaggttggaagatgaacaacacaagtgaggattttacaaacaatagaagcatttacaagccagtggtgctgaagcgagctcatgggggtaatgatggtatttctacgggtgaagaaaaggataacatgactattgctcaaaggatcagatctaaggagaagtatagcagtaatgcggagaatactctaggagatgcttctgaaacacttggaaaaagggctagaagatatatgacggtggatagcgatgacgactcagagccttgtcaaaagcttgcttcgacaaaaatagagcaaaggagtgaagaggatgatgaaactacaagcaaatcacacaagacaagggagattttcaatgattttgaggttgacgtgattggaaatactgcagggaagaagagtatgatcgatgatgagcagcaacataatggatcgactatgaaaagcattggaagcaatgggagcaagaaagcagagtttttggtccataaaaatagcgaaaagcatagatgcaatgagaaaatgtgcagtgaagttaaaaagcaagaagaaattgatgaaaggttgaaagagagaaagcttgcaataaaggagatggaactgaagcttgaggcacatatgattgagatggagaagactttgtccatgattagaaagtggaaaatcagaggaaaccagattaaaagtcgagtttctgcttag

SEQ ID NO: 79785 - protein, 768 aa, Arabidopsis thaliana
  peptide (1)..(768): Ceres Seq. ID no. 12653191
  misc_feature (18)..(526): Homolog of NCBI NO: 15238856 NR Description: putative protein; protein id: At5g18510.1
  misc_feature (498)..(768): Homolog of NCBI NO: 15238856 NR Description: putative protein; protein id: At5g18510.1
  misc_feature (11)..(524): Homolog of NCBI NO: 22328697 NR Description: hypothetical protein; protein id: At4g16050.1, by cDNA: gi_19699014 [Arabidopsis thaliana] unknown protein [Arabidopsis thaliana]
  misc_feature (587)..(757): Homolog of NCBI NO: 22328697 NR Description: hypothetical protein; protein id: At4g16050.1, by cDNA: gi_19699014 [Arabidopsis thaliana] unknown protein [Arabidopsis thaliana]
  misc_feature (89)..(657): Homolog of NCBI NO: 15217949 NR Description: unknown protein; protein id: At1g51540.1
  misc_feature (182)..(641): Homolog of NCBI NO: 7485155 NR Description: hypothetical protein d14065w - Arabidopsis >gi|2244963|emb|CAB10384.1| hypothetical protein [Arabidopsis >gi|7268354|emb|CAB78647.1| hypothetical protein [Arabidopsis
  misc_feature (81)..(227): Homolog of NCBI NO: 7485155 NR Description: hypothetical protein d14065w - Arabidopsis >gi|2244963|emb|CAB10384.1| hypothetical protein [Arabidopsis >gi|7268354|emb|CAB78647.1| hypothetical protein [Arabidopsis
  misc_feature (38)..(472): Homolog of NCBI NO: 12321432 NR Description: hypothetical protein, 5' partial [Arabidopsis
  misc_feature (28)..(443): Homolog of NCBI NO: 15223655 NR Description: hypothetical protein; protein id: At1g50820.1
  misc_feature (28)..(454): Homolog of NCBI NO: 15223653 NR Description: hypothetical protein; protein id: At1g50790.1
MENASSSSSLLIEEREEVMVTDKGRCLRKNHFLKPFVTSINGGSVAELPRRDERLSVSSSQLLKLFSLRRTFSGFWVVDAPFVSWLAKMEALHAQTWRKAGIFEAIKVSTYSITKNPSLILSVSEKWCPETKSFVFPWGEATITLEDVMVLLGFSVLGSPVFAPLETSETRDSVKKLENVRIQHMNSSTDRRVSQKSWVSTFLGRGGDMEHVAFLVLWLSLFVFPVKSRRNISNHVFPIAVRLARGERIALAPAILAILYRDLDRIHEVSREDCVDKFHLESLFKLVQVWTWERFRNIRPKASDIPKGEPRIAQWHGLHRRSKDAWFCFDDFEWRPYTKALNNWNPFRFYLEEAIWVTVDESIDDEFASFARCVTVSQIVGDGFVEDYFPNRVARQFGLDQDLPGLATCQRNSTEKEAWNDYNKSLIGLNLYMPSRLDQGSVTARYRVWWLKSVSKFLSPEEMKEESTETFNARKTFDHYDEDYDDDIDASPKVLPLSQVFQKLEEGFPAKRRRSVIHRLVKQDKIGGCVNSRVSSGWKMNNTSEDFTNNRSIYKPVVLKRAHGGNDGISTGEEKDNMTIAQRIRSKEKYSSNAENTLGDASETLGKRARRYMTVDSDDDSEPCQKLASTKIEQRSEEDDETTSKSHKTREIFNDFEVDVIGNTAGKKSMIDDEQQHNGSTMKSIGSNGSKKAEFLVHKNSEKHRCNEKMCSEVKKQEEIDERLKERKLAIKEMELKLEAHMIEMEKTLSMIRKWKIRGNQIKSRVSA

SEQ ID NO: 79786 - protein, 750 aa, Arabidopsis thaliana
  peptide (1)..(750): Ceres Seq. ID no. 12653192
  misc_feature (1)..(508): Homolog of NCBI NO: 15238856 NR Description: putative protein; protein id: At5g18510.1
  misc_feature (480)..(750): Homolog of NCBI NO: 15238856 NR Description: putative protein; protein id: At5g18510.1
  misc_feature (1)..(506): Homolog of NCBI NO: 22328697 NR Description: hypothetical protein; protein id: At4g16050.1, by cDNA: gi_19699014 [Arabidopsis thaliana] unknown protein [Arabidopsis thaliana]
  misc_feature (569)..(739): Homolog of NCBI NO: 22328697 NR Description: hypothetical protein; protein id: At4g16050.1, by cDNA: gi_19699014 [Arabidopsis thaliana] unknown protein [Arabidopsis thaliana]
  misc_feature (71)..(639): Homolog of NCBI NO: 15217949 NR Description: unknown protein; protein id: At1g51540.1
  misc_feature (164)..(623): Homolog of NCBI NO: 7485155 NR Description: hypothetical protein d14065w - Arabidopsis >gi|2244963|emb|CAB10384.1| hypothetical protein [Arabidopsis >gi|7268354|emb|CAB78647.1| hypothetical protein [Arabidopsis
  misc_feature (63)..(209): Homolog of NCBI NO: 7485155 NR Description: hypothetical protein d14065w - Arabidopsis >gi|2244963|emb|CAB10384.1| hypothetical protein [Arabidopsis >gi|7268354|emb|CAB78647.1| hypothetical protein [Arabidopsis
  misc_feature (20)..(454): Homolog of NCBI NO: 12321432 NR Description: hypothetical protein, 5' partial [Arabidopsis
  misc_feature (10)..(425): Homolog of NCBI NO: 15223655 NR Description: hypothetical protein; protein id: At1g50820.1
  misc_feature (10)..(436): Homolog of NCBI NO: 15223653 NR Description: hypothetical protein; protein id: At1g50790.1
MVTDKGRCLRKNHFLKPFVTSINGGSVAELPRRDERLSVSSSQLLKLFSLRRTFSGFWVVDAPFVSWLAKMEALHAQTWRKAGIFEAIKVSTYSITKNPSLILSVSEKWCPETKSFVFPWGEATITLEDVMVLLGFSVLGSPVFAPLETSETRDSVKKLENVRIQHMNSSTDRRVSQKSWVSTFLGRGGDMEHVAFLVLWLSLFVFPVKSRRNISNHVFPIAVRLARGERIALAPAILAILYRDLDRIHEVSREDCVDKFHLESLFKLVQVWTWERFRNIRPKASDIPKGEPRIAQWHGLHRRSKDAWFCFDDFEWRPYTKALNNWNPFRFYLEEAIWVTVDESIDDEFASFARCVTVSQIVGDGFVEDYFPNRVARQFGLDQDLPGLATCQRNSTEKEAWNDYNKSLIGLNLYMPSRLDQGSVTARYRVWWLKSVSKFLSPEEMKEESTETFNARKTFDHYDEDYDDDIDASPKVLPLSQVFQKLEEGFPAKRRRSVIHRLVKQDKIGGCVNSRVSSGWKMNNTSEDFTNNRSIYKPVVLKRAHGGNDGISTGEEKDNMTIAQRIRSKEKYSSNAENTLGDASETLGKRARRYMTVDSDDDSEPCQKLASTKIEQRSEEDDETTSKSHKTREIFNDFEVDVIGNTAGKKSMIDDEQQHNGSTMKSIGSNGSKKAEFLVHKNSEKHRCNEKMCSEVKKQEEIDERLKERKLAIKEMELKLEAHMIEMEKTLSMIRKWKIRGNQIKSRVSA

SEQ ID NO: 79787 - protein, 680 aa, Arabidopsis thaliana
  peptide (1)..(680): Ceres Seq. ID no. 12653193
  misc_feature (1)..(438): Homolog of NCBI NO: 15238856 NR Description: putative protein; protein id: At5g18510.1
  misc_feature (410)..(680): Homolog of NCBI NO: 15238856 NR Description: putative protein; protein id: At5g18510.1
  misc_feature (1)..(436): Homolog of NCBI NO: 22328697 NR Description: hypothetical protein; protein id: At4g16050.1, by cDNA: gi_19699014 [Arabidopsis thaliana] unknown protein [Arabidopsis thaliana]
  misc_feature (499)..(669): Homolog of NCBI NO: 22328697 NR Description: hypothetical protein; protein id: At4g16050.1, by cDNA: gi_19699014 [Arabidopsis thaliana] unknown protein [Arabidopsis thaliana]
  misc_feature (1)..(569): Homolog of NCBI NO: 15217949 NR Description: unknown protein; protein id: At1g51540.1
  misc_feature (94)..(553): Homolog of NCBI NO: 7485155 NR Description: hypothetical protein d14065w - Arabidopsis >gi|2244963|emb|CAB10384.1| hypothetical protein [Arabidopsis >gi|7268354|emb|CAB78647.1| hypothetical protein [Arabidopsis
  misc_feature (1)..(139): Homolog of NCBI NO: 7485155 NR Description: hypothetical protein d14065w - Arabidopsis >gi|2244963|emb|CAB10384.1| hypothetical protein [Arabidopsis >gi|7268354|emb|CAB78647.1| hypothetical protein [Arabidopsis
  misc_feature (1)..(384): Homolog of NCBI NO: 12321432 NR Description: hypothetical protein, 5' partial [Arabidopsis
  misc_feature (1)..(355): Homolog of NCBI NO: 15223655 NR Description: hypothetical protein; protein id: At1g50820.1
  misc_feature (1)..(366): Homolog of NCBI NO: 15223653 NR Description: hypothetical protein; protein id: At1g50790.1
MEALHAQTWRKAGIFEAIKVSTYSITKNPSLILSVSEKWCPETKSFVFPWGEATITLEDVMVLLGFSVLGSPVFAPLETSETRDSVKKLENVRIQHMNSSTDRRVSQKSWVSTFLGRGGDMEHVAFLVLWLSLFVFPVKSRRNISNHVFPIAVRLARGERIALAPAILAILYRDLDRIHEVSREDCVDKFHLESLFKLVQVWTWERFRNIRPKASDIPKGEPRIAQWHGLHRRSKDAWFCFDDFEWRPYTKALNNWNPFRFYLEEAIWVTVDESIDDEFASFARCVTVSQIVGDGFVEDYFPNRVARQFGLDQDLPGLATCQRNSTEKEAWNDYNKSLIGLNLYMPSRLDQGSVTARYRVWWLKSVSKFLSPEEMKEESTETFNARKTFDHYDEDYDDDIDASPKVLPLSQVFQKLEEGFPAKRRRSVIHRLVKQDKIGGCVNSRVSSGWKMNNTSEDFTNNRSIYKPVVLKRAHGGNDGISTGEEKDNMTIAQRIRSKEKYSSNAENTLGDASETLGKRARRYMTVDSDDDSEPCQKLASTKIEQRSEEDDETTSKSHKTREIFNDFEVDVIGNTAGKKSMIDDEQQHNGSTMKSIGSNGSKKAEFLVHKNSEKHRCNEKMCSEVKKQEEIDERLKERKLAIKEMELKLEAHMIEMEKTLSMIRKWKIRGNQIKSRVSA

SEQ ID NO: 79788 - DNA, 1104 bp, Arabidopsis thaliana
  misc_feature (1)..(1104): Ceres Seq. ID no. 12653214
  misc_feature: MA Experiment ID: 20000314 Result: Up-regulated in Transcription
  misc_feature: MA Experiment 20000314 PARAMETER Experiment Name: At_14day_Shoots-Roots_Sub_P Parameter: Age (day) Value: 14
  misc_feature: MA Experiment 20000314 PARAMETER Experiment Name: At_14day_Shoots-Roots_Sub_P Parameter: Organism Value: A. thaliana
  misc_feature: MA Experiment 20000314 PARAMETER Experiment Name: At_14day_Shoots-Roots_Sub_P Parameter: Plant Line Value: WS
  misc_feature: MA Experiment 20000314 PARAMETER Experiment Name: At_14day_Shoots-Roots_Sub_P Parameter: Tissue Value: Roots vs. Whole Plant
  misc_feature: MA Experiment ID: 20000352 Result: Down-regulated in Transcription
  misc_feature: MA Experiment 20000352 PARAMETER Experiment Name: At_Drought_Sub_P Parameter: Age (day) Value: 7
  misc_feature: MA Experiment 20000352 PARAMETER Experiment Name: At_Drought_Sub_P Parameter: Organism Value: A. thaliana
  misc_feature: MA Experiment 20000352 PARAMETER Experiment Name: At_Drought_Sub_P Parameter: Plant Line Value: WS
  misc_feature: MA Experiment 20000352 PARAMETER Experiment Name: At_Drought_Sub_P Parameter: Timepoint (hr) Value: 6
  misc_feature: MA Experiment 20000352 PARAMETER Experiment Name: At_Drought_Sub_P Parameter: Tissue Value: Whole Plant
  misc_feature: MA Experiment 20000352 PARAMETER Experiment Name: At_Drought_Sub_P Parameter: Treatment Value: Drought vs. No Drought
  misc_feature: MA Experiment ID: 20000440 Result: Down-regulated in Transcription
  misc_feature: MA Experiment 20000440 PARAMETER Experiment Name: At_Closed-Flower__Sub_P Parameter: Tissue Value: Closed Flower vs. Whole Plant
atggttcgattagttttgatcatcttcttcgtctacacaataatcttgtcgatcggctcaatcaactgcatagacaataataatctggtaacaaatcaagctgctttgttcgtgttcggagattctctttttgatgccggaaacaacaactacatcaatactgtctcaagtttccggtctaatatctggccgtacggtcaaaccaatttcaagtttcccaccggaagattatccgatggacccgaaaaggcatggttgccgtcgatcccgccaaatctacaaccaaacaacggtaacaatcaatttacctatggagtaagttttgcttctgctggcgccggagctttagccgaatcctttcttggaatggtgataaatttgggaacacagttaaacaacttcaaagatgttgaaaagagcttgagatctgaactaggagatgcagaaaccaaaagggttttctcaagagctgtttatctgtttcatatcggggccaacgactatttttatcctttctctgcaaactcctcaactttcaaatccaactccaaagagaaattcgtcgattttgttatcggtaacattacattcgttatcgaggaagtgtataaaatgggaggaagaaagtttggatttttgaacgtgggaccgtacgaatgttcaccaaattcattgataagagaccgaacaaagataggatcttgtttcaaacctgtcgctgagcttatcgacatgcacaacaagaagtttcccgatgttttaaggcggctacaacgccaattatcgggttttagatacgcccttcatgactatcacacttctctttccgaaagaatcaacagtccttcaaaatatgggttcaaggaagggaagaaggcatgttgtggaagcggaccactgagaggaatcaatacgtgtggaaacagaataggaccgtcgcaaggttacggcctatgcgaaaacgttaccgattatttgttctatgattcctctcatttgacggaaaaggctcatcgacaaatcgcagagctgatttggaacgggccgcctaatgtcactagaccttataatctcaaagctttatttgaacttaggcttacataa

SEQ ID NO: 79789 - protein, 367 aa, Arabidopsis thaliana
  peptide (1)..(367): Ceres Seq. ID no. 12653215
  misc_feature (82)..(345): Pfam Name: GDSL-like Lipase/Acylhydrolase Pfam Description: GDSL-like Lipase/Acylhydrolase
  misc_feature (1)..(367): Homolog of NCBI NO: 15221018 NR Description: lipase, putative; protein id: At1g53990.1
  misc_feature (82)..(367): Homolog of NCBI NO: 25405682 NR Description: hypothetical protein F15I1.7 [imported] - thaliana >gi|4587540|gb|AAD25771.1|AC006577_7 Belongs to the
  misc_feature (1)..(80): Homolog of NCBI NO: 25405682 NR Description: hypothetical protein F15I1.7 [imported] - thaliana >gi|4587540|gb|AAD25771.1|AC006577_7 Belongs to the
  misc_feature (3)..(364): Homolog of NCBI NO: 21358785 NR Description: lipase SIL1 [Brassica rapa subsp. pekinensis]
  misc_feature (3)..(364): Homolog of NCBI NO: 15237530 NR Description: GDSL-motif lipase/hydrolase-like protein; protein
  misc_feature (3)..(364): Homolog of NCBI NO: 25336255 NR Description: hypothetical protein F15I1.2 [imported] - thaliana >gi|4587535|gb|AAD25766.1|AC006577_2 Belongs to the
  misc_feature (3)..(354): Homolog of NCBI NO: 15220995 NR Description: lipase, putative; protein id: At1g53940.1
  misc_feature (5)..(364): Homolog of NCBI NO: 15231809 NR Description: unknown protein; protein id: At3g14225.1
  misc_feature (8)..(364): Homolog of NCBI NO: 25336254 NR Description: hypothetical protein T18A20.15 [imported] -
  misc_feature (8)..(364): Homolog of NCBI NO: 30695607 NR Description: GDSL-motif lipase/hydrolase protein [Arabidopsis
MVRLVLIIFFVYTIILSIGSINCIDNNNLVTNQAALFVFGDSLFDAGNNNYINTVSSFRSNIWPYGQTNFKFPTGRLSDGPEKAWLPSIPPNLQPNNGNNQFTYGVSFASAGAGALAESFLGMVINLGTQLNNFKDVEKSLRSELGDAETKRVFSRAVYLFHIGANDYFYPFSANSSTFKSNSKEKFVDFVIGNITFVIEEVYKMGGRKFGFLNVGPYECSPNSLIRDRTKIGSCFKPVAELIDMHNKKFPDVLRRLQRQLSGFRYALHDYHTSLSERINSPSKYGFKEGKKACCGSGPLRGINTCGNRIGPSQGYGLCENVTDYLFYDSSHLTEKAHRQIAELIWNGPPNVTRPYNLKALFELRLT

SEQ ID NO: 79790 - protein, 245 aa, Arabidopsis thaliana
  peptide (1)..(245): Ceres Seq. ID no. 12653216
  misc_feature (1)..(223): Pfam Name: GDSL-like Lipase/Acylhydrolase Pfam Description: GDSL-like Lipase/Acylhydrolase
  misc_feature (1)..(245): Homolog of NCBI NO: 15221018 NR Description: lipase, putative; protein id: At1g53990.1
  misc_feature (1)..(245): Homolog of NCBI NO: 25405682 NR Description: hypothetical protein F15I1.7 [imported] - thaliana >gi|4587540|gb|AAD25771.1|AC006577_7 Belongs to the
  misc_feature (1)..(242): Homolog of NCBI NO: 21358785 NR Description: lipase SIL1 [Brassica rapa subsp. pekinensis]
  misc_feature (1)..(242): Homolog of NCBI NO: 15237530 NR Description: GDSL-motif lipase/hydrolase-like protein; protein
  misc_feature (1)..(242): Homolog of NCBI NO: 25336255 NR Description: hypothetical protein F15I1.2 [imported] - thaliana >gi|4587535|gb|AAD25766.1|AC006577_2 Belongs to the
  misc_feature (1)..(232): Homolog of NCBI NO: 15220995 NR Description: lipase, putative; protein id: At1g53940.1
  misc_feature (1)..(242): Homolog of NCBI NO: 15231809 NR Description: unknown protein; protein id: At3g14225.1
  misc_feature (1)..(242): Homolog of NCBI NO: 25336254 NR Description: hypothetical protein T18A20.15 [imported] -
  misc_feature (1)..(242): Homolog of NCBI NO: 30695607 NR Description: GDSL-motif lipase/hydrolase protein [Arabidopsis
  misc_feature (1)..(245): Homolog of NCBI NO: 15223959 NR Description: putative proline-rich APG protein; protein id:
MVINLGTQLNNFKDVEKSLRSELGDAETKRVFSRAVYLFHIGANDYFYPFSANSSTFKSNSKEKFVDFVIGNITFVIEEVYKMGGRKFGFLNVGPYECSPNSLIRDRTKIGSCFKPVAELIDMHNKKFPDVLRRLQRQLSGFRYALHDYHTSLSERINSPSKYGFKEGKKACCGSGPLRGINTCGNRIGPSQGYGLCENVTDYLFYDSSHLTEKAHRQIAELIWNGPPNVTRPYNLKALFELRLT

SEQ ID NO: 79791 - DNA, 372 bp, Arabidopsis thaliana
  misc_feature (1)..(372): Ceres Seq. ID no. 12653217
  misc_feature: MA Experiment ID: 20000184 Result: Down-regulated in Transcription
  misc_feature: MA Experiment 20000184 PARAMETER Experiment Name: At_Shoots__P Parameter: Age (day) Value: 7
  misc_feature: MA Experiment 20000184 PARAMETER Experiment Name: At_Shoots__P Parameter: Tissue Value: Shoots vs. Whole Plant
  misc_feature: MA Experiment ID: 20000185 Result: Down-regulated in Transcription
  misc_feature: MA Experiment 20000185 PARAMETER Experiment Name: At_Roots__P Parameter: Age (day) Value: 7 vs. 21
  misc_feature: MA Experiment 20000185 PARAMETER Experiment Name: At_Roots__P Parameter: Organism Value: A. thaliana
  misc_feature: MA Experiment 20000185 PARAMETER Experiment Name: At_Roots__P Parameter: Tissue Value: Roots vs. Whole Plant
  misc_feature: MA Experiment ID: 20000264 Result: Up-regulated in Transcription
  misc_feature: MA Experiment 20000264 PARAMETER Experiment Name: At_Open_Flower_P Parameter: Age (day) Value: 21
  misc_feature: MA Experiment 20000264 PARAMETER Experiment Name: At_Open_Flower_P Parameter: Plant Line Value: WS
  misc_feature: MA Experiment 20000264 PARAMETER Experiment Name: At_Open_Flower_P Parameter: Tissue Value: Open Flower vs. Whole Plant
  misc_feature: MA Experiment ID: 20000265 Result: Up-regulated in Transcription
  misc_feature: MA Experiment 20000265 PARAMETER Experiment Name: At_Open_Flower_P Parameter: Age (day) Value: 21
  misc_feature: MA Experiment 20000265 PARAMETER Experiment Name: At_Open_Flower_P Parameter: Plant Line Value: WS
  misc_feature: MA Experiment 20000265 PARAMETER Experiment Name: At_Open_Flower_P Parameter: Tissue Value: Closed Flower vs. Whole Plant
  misc_feature: MA Experiment ID: 20000286 Result: Up-regulated in Transcription
  misc_feature: MA Experiment 20000286 PARAMETER Experiment Name: At_Open_Flower_P Parameter: Age (day) Value: 21
  misc_feature: MA Experiment 20000286 PARAMETER Experiment Name: At_Open_Flower_P Parameter: Plant Line Value: WS
  misc_feature: MA Experiment 20000286 PARAMETER Experiment Name: At_Open_Flower_P Parameter: Tissue Value: Half Open vs. Whole Plant
  misc_feature: MA Experiment ID: 20000438 Result: Down-regulated in Transcription
  misc_feature: MA Experiment 20000438 PARAMETER Experiment Name: At_Shoots__P Parameter: Age (day) Value: 14
  misc_feature: MA Experiment 20000438 PARAMETER Experiment Name: At_Shoots__P Parameter: Tissue Value: Shoots vs. Whole Plant
  misc_feature: MA Experiment ID: 20000439 Result: Down-regulated in Transcription
  misc_feature: MA Experiment 20000439 PARAMETER Experiment Name: At_Roots__P Parameter: Age (day) Value: 14 vs. 21
  misc_feature: MA Experiment 20000439 PARAMETER Experiment Name: At_Roots__P Parameter: Organism Value: A. thaliana
  misc_feature: MA Experiment 20000439 PARAMETER Experiment Name: At_Roots__P Parameter: Tissue Value: Roots vs. Whole Plant
  misc_feature: MA Experiment ID: 20000794 Result: Up-regulated in Transcription
  misc_feature: MA Experiment 20000794 PARAMETER Experiment Name: At_Petals_P Parameter: Age (day) Value: 23-25 days
  misc_feature: MA Experiment 20000794 PARAMETER Experiment Name: At_Petals_P Parameter: Plant Line Value: WS
  misc_feature: MA Experiment 20000794 PARAMETER Experiment Name: At_Petals_P Parameter: Tissue Value: Petals vs. Whole plant
  misc_feature: MA Experiment ID: 20001910 Result: Up-regulated in Transcription
  misc_feature: MA Experiment 20001910 PARAMETER Experiment Name: At_Drought_Reproduction_P Parameter: Age (day) Value: 37
  misc_feature: MA Experiment 20001910 PARAMETER Experiment Name: At_Drought_Reproduction_P Parameter: Organism Value: A. thaliana
  misc_feature: MA Experiment 20001910 PARAMETER Experiment Name: At_Drought_Reproduction_P Parameter: Plant Line Value: WS
  misc_feature: MA Experiment 20001910 PARAMETER Experiment Name: At_Drought_Reproduction_P Parameter: Timepoint (day) Value: 7
  misc_feature: MA Experiment 20001910 PARAMETER Experiment Name: At_Drought_Reproduction_P Parameter: Tissue Value: Flowers
  misc_feature: MA Experiment 20001910 PARAMETER Experiment Name: At_Drought_Reproduction_P Parameter: Treatment Value: Drought vs. No Drought
atggggttcctacacaagctgtgggatgaaacggtggccggaccgacgccggacaatggtctcgggaaattgagaaagcacgattcattatccaccgtccgatcttctcctccttctctctcaagcgaccaagtcaccagaagcatcatggttaccaaggggaataacaatgttcgtggtctccgtaaattgaaaatggatccggattctccaacctgttcaagcagcaaccctgggacacctttaacccctgggacaccatgctatgctttgggaccattcactgccggcaaaatcccttcctctggcgaagacgatgcagcaagtctaactacttatgaatggattgtgataaacgcgttggaccgttga

SEQ ID NO: 79792 - protein, 123 aa, Arabidopsis thaliana
  peptide (1)..(123): Ceres Seq. ID no. 12653218
  misc_feature (1)..(123): Homolog of NCBI NO: 15221029 NR Description: unknown protein; protein id: At1g54070.1
  misc_feature (1)..(116): Homolog of NCBI NO: 25405689 NR Description: hypothetical protein F15I1.15 [imported] - thaliana >gi|4587548|gb|AAD25779.1|AC006577_15 Contains
  misc_feature (1)..(123): Homolog of NCBI NO: 27802109 NR Description: auxin-repressed protein-like protein [Nicotiana
  misc_feature (1)..(100): Homolog of NCBI NO: 18405730 NR Description: expressed protein; protein id: At1g56220.1,
  misc_feature (1)..(97): Homolog of NCBI NO: 2688824 NR Description: putative auxin-repressed protein [Prunus
  misc_feature (1)..(95): Homolog of NCBI NO: 21552998 NR Description: Drm3 [Pisum sativum]
  misc_feature (1)..(104): Homolog of NCBI NO: 30696084 NR Description: expressed protein [Arabidopsis thaliana]
  misc_feature (1)..(100): Homolog of NCBI NO: 30696086 NR Description: expressed protein [Arabidopsis thaliana]
  misc_feature (1)..(29): Homolog of NCBI NO: 9294646 NR Description: gene_id:MAG2.17~unknown protein [Arabidopsis
  misc_feature (1)..(95): Homolog of NCBI NO: 25082799 NR Description: expressed protein [Arabidopsis thaliana]
MGFLHKLWDETVAGPTPDNGLGKLRKHDSLSTVRSSPPSLSSDQVTRSIMVTKGNNNVRGLRKLKMDPDSPTCSSSNPGTPLTPGTPCYALGPFTAGKIPSSGEDDAASLTTYEWIVINALDR

SEQ ID NO: 79793 - protein, 74 aa, Arabidopsis thaliana
  peptide (1)..(74): Ceres Seq. ID no. 12653219
  misc_feature (1)..(74): Homolog of NCBI NO: 15221029 NR Description: unknown protein; protein id: At1g54070.1
  misc_feature (1)..(67): Homolog of NCBI NO: 25405689 NR Description: hypothetical protein F15I1.15 [imported] - thaliana >gi|4587548|gb|AAD25779.1|AC006577_15 Contains
  misc_feature (1)..(74): Homolog of NCBI NO: 27802109 NR Description: auxin-repressed protein-like protein [Nicotiana
  misc_feature (1)..(51): Homolog of NCBI NO: 18405730 NR Description: expressed protein; protein id: At1g56220.1,
  misc_feature (1)..(48): Homolog of NCBI NO: 2688824 NR Description: putative auxin-repressed protein [Prunus
  misc_feature (1)..(46): Homolog of NCBI NO: 21552998 NR Description: Drm3 [Pisum sativum]
  misc_feature (1)..(55): Homolog of NCBI NO: 30696084 NR Description: expressed protein [Arabidopsis thaliana]
  misc_feature (1)..(51): Homolog of NCBI NO: 30696086 NR Description: expressed protein [Arabidopsis thaliana]
  misc_feature (1)..(46): Homolog of NCBI NO: 25082799 NR Description: expressed protein [Arabidopsis thaliana]
  misc_feature (1)..(51): Homolog of NCBI NO: 21553000 NR Description: Drm4 [Pisum sativum]
MVTKGNNNVRGLRKLKMDPDSPTCSSSNPGTPLTPGTPCYALGPFTAGKIPSSGEDDAASLTTYEWIVINALDR

SEQ ID NO: 79794 - DNA, 2334 bp, Arabidopsis thaliana
  misc_feature (1)..(2334): Ceres Seq. ID no. 12653220
  misc_feature: MA Experiment ID: 20000327 Result: Down-regulated in Transcription
  misc_feature: MA Experiment 20000327 PARAMETER Experiment Name: At_42deg_Heat_Sub_P Parameter: Age (day) Value: 14
  misc_feature: MA Experiment 20000327 PARAMETER Experiment Name: At_42deg_Heat_Sub_P Parameter: Organism Value: A. thaliana
  misc_feature: MA Experiment 20000327 PARAMETER Experiment Name: At_42deg_Heat_Sub_P Parameter: Plant Line Value: WS
  misc_feature: MA Experiment 20000327 PARAMETER Experiment Name: At_42deg_Heat_Sub_P Parameter: Temperature (deg C) Value: 42 vs. 22
  misc_feature: MA Experiment 20000327 PARAMETER Experiment Name: At_42deg_Heat_Sub_P Parameter: Timepoint (hr) Value: 1
  misc_feature: MA Experiment 20000327 PARAMETER Experiment Name: At_42deg_Heat_Sub_P Parameter: Tissue Value: Aerial
  misc_feature: MA Experiment ID: 20000328 Result: Down-regulated in Transcription
  misc_feature: MA Experiment 20000328 PARAMETER Experiment Name: At_42deg_Heat_Sub_P Parameter: Age (day) Value: 14
  misc_feature: MA Experiment 20000328 PARAMETER Experiment Name: At_42deg_Heat_Sub_P Parameter: Organism Value: A. thaliana
  misc_feature: MA Experiment 20000328 PARAMETER Experiment Name: At_42deg_Heat_Sub_P Parameter: Plant Line Value: WS
  misc_feature: MA Experiment 20000328 PARAMETER Experiment Name: At_42deg_Heat_Sub_P Parameter: Temperature (deg C) Value: 42 vs. 22
  misc_feature: MA Experiment 20000328 PARAMETER Experiment Name: At_42deg_Heat_Sub_P Parameter: Timepoint (hr) Value: 6
  misc_feature: MA Experiment 20000328 PARAMETER Experiment Name: At_42deg_Heat_Sub_P Parameter: Tissue Value: Aerial
  misc_feature: MA Experiment ID: 20000347 Result: Up-regulated in Transcription
  misc_feature: MA Experiment 20000347 PARAMETER Experiment Name: At_2mM_SA_Sub_P Parameter: Age (day) Value: 14
  misc_feature: MA Experiment 20000347 PARAMETER Experiment Name: At_2mM_SA_Sub_P Parameter: Organism Value: A. thaliana
  misc_feature: MA Experiment 20000347 PARAMETER Experiment Name: At_2mM_SA_Sub_P Parameter: Plant Line Value: WS
  misc_feature: MA Experiment 20000347 PARAMETER Experiment Name: At_2mM_SA_Sub_P Parameter: Timepoint (hr) Value: 6
  misc_feature: MA Experiment 20000347 PARAMETER Experiment Name: At_2mM_SA_Sub_P Parameter: Tissue Value: Aerial
  misc_feature: MA Experiment 20000347 PARAMETER Experiment Name: At_2mM_SA_Sub_P Parameter: Treatment Value: 2mM SA vs. No Treatment
aaaaaaaaagaaggcgaattttgatttcttcattaaaaaattggcaaagcagacttcagagttctctcagtataatcttcacctaaatctcatttcaaaggaacaaacaaaaagaaaacacctaaatcgatctgtgaagtcaaaacactttccagtttcagattctgattatggcaacaccggagactcgtggcgttgattccgatttagagacagcggagaagataatactccggtgggattcaacaacatctgaagaagctaaagagaatctgattttccaaagcggtggtgatcgagaagaagtagatcggtacttgaaagctgtagatgaagttcaaagacacatctcttcaatctcaatctccgatgaagtcaaagcaacgattcaaatcgccatggctagactcgaggacgagctaagaaatatcttaatctctcagacttctactttcgaacctgattctcttcttctcgattcatcgttatcttcttcctctttcgcttcttcttctcgtacggagcttgaagatgacacttgcgatgacggtaacgaagaagaagagcaacaacaagtggatctggttttaccagatggttccggttcagattccggttcgagacggttatcgaggagtaggagaagcaatagcaaatccacaagcagtatacgagagatcgatcttgtaacaccggaagctgtttctgatctgagatcgatagctcagaggatgatcggagctggttactctcgtgaatgtgttcaggtatacggaaacgtgagaaaatccgccatggaaatgatttttaagcagctagggattgtgaaactagggattggtgatgtgcagagacttgactgggaagctgtagaagtgaagatcagaagatggatccgtgctgcgaaggtttgcgttagagttgttttcgctagcgagaagagactctgtgagcagatatttgaaggaaccatggaagagacttgtttcatggagattgttaaaacctctgctttgcagctttttaatttccctgaagctataagcattagtagaagatcacctgagaaactattcaagattcttgatttacatgatgctataacagatttgttacctgatatggaagagattttcgattcgagttcatcggagtcgattcttgttcaagctacagagattcaatcaagattagctgaagcagcaagagggatacttaccgagtttgagaatgcggtgtttcgcgaaccttcggttgttcctgtccctggaggaactatacatccattgacaaggtatgtgatgaattacctcaacttgatctctgactatagggaaacgttgattgatctcgtcatgacgaaaccatgtcggggtttgaaatgtaccaatgatcgaaacgatccggatatggatatctctgagcttgaaggaatatctccgttagctttgcatatgatatggacaatggtgatgctacaattcaatctagaagagaagtctttgcattacagggacgaacctttatctcacatcttcgtcatgaacaatgtccattacatagttcagaaggtcaaaagctctccggagctaatggagttgataggagacaagtatttaaggaagcttaccgggatatttagacaagcagctaccaagtatcagagagctacatgggtcagggtgttgaatagcttgagagatgaaggattacatgtgagcggaagcttctcttccggtgtatcgaagagtgctttaagagagaggtttaaagctttcaatacaatgtttgaagaggttcacaggattcaatcgacatggtcggttccggatactcagcttagagaagaactcaggatatctctatcggagcatcttatcccggcttatagatcctttcttggaagattcaggggacatatagagagcggaagacatcccgaaaactacttgaaatactctgttgaaaatcttgaaaccgcagtgttggatttcttcgaaggatataccacagccccacatttgagacggtctcagtgaaagaagaagattgaaaaccccataaaactttccttttcggtttgcccacattagaattaaccatttatatcattctttgaattcattccattttcatgtggtggcagtgttgagattgttttccaggcttctggtgaatagtctctcactcttttgtacttgtaagcatatttgttgtgtgttgtttgtttgttaccaaatttcattactccattgttgatataaatgtttgtattttgtgacttttgttgtactagttccttcataaacccatctaaatgcaatttgatttttt

SEQ ID NO: 79795 - protein, 622 aa, Arabidopsis thaliana
  peptide (1)..(622): Ceres Seq. ID no. 12653221
  misc_feature (1)..(620): Homolog of NCBI NO: 30682979 NR Description: exocyst subunit EXO70 family [Arabidopsis >gi|9294634|dbj|BAB02973.1| gb|AAD25781.1~gene_id:MAG2.5~strong
  misc_feature (11)..(620): Homolog of NCBI NO: 15218495 NR Description: unknown protein; protein id: At1g72470.1
  misc_feature (110)..(620): Homolog of NCBI NO: 23270388 NR Description: unknown protein [Arabidopsis thaliana]
  misc_feature (13)..(617): Homolog of NCBI NO: 9758920 NR Description: gb|AAD25781.1~gene_id:MXI22.10~strong similarity
  misc_feature (13)..(617): Homolog of NCBI NO: 30695880 NR Description: exocyst subunit EXO70 family [Arabidopsis
  misc_feature (70)..(611): Homolog of NCBI NO: 19386798 NR Description: putative leucine zipper protein [Oryza sativa
  misc_feature (170)..(469): Homolog of NCBI NO: 15237198 NR Description: leucine zipper-containing protein; protein id: supported by cDNA: gi_20453215 [Arabidopsis thaliana] leucine zipper protein [Arabidopsis thaliana]
  misc_feature (425)..(614): Homolog of NCBI NO: 15237198 NR Description: leucine zipper-containing protein; protein id: supported by cDNA: gi_20453215 [Arabidopsis thaliana] leucine zipper protein [Arabidopsis thaliana]
  misc_feature (29)..(620): Homolog of NCBI NO: 38346639 NR Description: OSJNBa0072D21.9 [Oryza sativa (japonica
  misc_feature (130)..(611): Homolog of NCBI NO: 100226 NR Description: tomato leucine zipper-containing protein - tomato protein of unknown function [Lycopersicon esculentum]
MATPETRGVDSDLETAEKIILRWDSTTSEEAKENLIFQSGGDREEVDRYLKAVDEVQRHISSISISDEVKATIQIAMARLEDELRNILISQTSTFEPDSLLLDSSLSSSSFASSSRTELEDDTCDDGNEEEEQQQVDLVLPDGSGSDSGSRRLSRSRRSNSKSTSSIREIDLVTPEAVSDLRSIAQRMIGAGYSRECVQVYGNVRKSAMEMIFKQLGIVKLGIGDVQRLDWEAVEVKIRRWIRAAKVCVRVVFASEKRLCEQIFEGTMEETCFMEIVKTSALQLFNFPEAISISRRSPEKLFKILDLHDAITDLLPDMEEIFDSSSSESILVQATEIQSRLAEAARGILTEFENAVFREPSVVPVPGGTIHPLTRYVMNYLNLISDYRETLIDLVMTKPCRGLKCTNDRNDPDMDISELEGISPLALHMIWTMVMLQFNLEEKSLHYRDEPLSHIFVMNNVHYIVQKVKSSPELMELIGDKYLRKLTGIFRQAATKYQRATWVRVLNSLRDEGLHVSGSFSSGVSKSALRERFKAFNTMFEEVHRIQSTWSVPDTQLREELRISLSEHLIPAYRSFLGRFRGHIESGRHPENYLKYSVENLETAVLDFFEGYTTAPHLRRSQ

SEQ ID NO: 79796 - protein, 546 aa, Arabidopsis thaliana
  peptide (1)..(546): Ceres Seq. ID no. 12653222
  misc_feature (1)..(544): Homolog of NCBI NO: 30682979 NR Description: exocyst subunit EXO70 family [Arabidopsis >gi|9294634|dbj|BAB02973.1| gb|AAD25781.1~gene_id:MAG2.5~strong
  misc_feature (1)..(544): Homolog of NCBI NO: 15218495 NR Description: unknown protein; protein id: At1g72470.1
  misc_feature (34)..(544): Homolog of NCBI NO: 23270388 NR Description: unknown protein [Arabidopsis thaliana]
  misc_feature (1)..(541): Homolog of NCBI NO: 9758920 NR Description: gb|AAD25781.1~gene_id:MXI22.10~strong similarity
  misc_feature (1)..(541): Homolog of NCBI NO: 30695880 NR Description: exocyst subunit EXO70 family [Arabidopsis
  misc_feature (1)..(535): Homolog of NCBI NO: 19386798 NR Description: putative leucine zipper protein [Oryza sativa
  misc_feature (94)..(393): Homolog of NCBI NO: 15237198 NR Description: leucine zipper-containing protein; protein id: supported by cDNA: gi_20453215 [Arabidopsis thaliana] leucine zipper protein [Arabidopsis thaliana]
  misc_feature (349)..(538): Homolog of NCBI NO: 15237198 NR Description: leucine zipper-containing protein; protein id: supported by cDNA: gi_20453215 [Arabidopsis thaliana] leucine zipper protein [Arabidopsis thaliana]
  misc_feature (1)..(544): Homolog of NCBI NO: 38346639 NR Description: OSJNBa0072D21.9 [Oryza sativa (japonica
  misc_feature (54)..(535): Homolog of NCBI NO: 100226 NR Description: tomato leucine zipper-containing protein - tomato protein of unknown function [Lycopersicon esculentum]
MARLEDELRNILISQTSTFEPDSLLLDSSLSSSSFASSSRTELEDDTCDDGNEEEEQQQVDLVLPDGSGSDSGSRRLSRSRRSNSKSTSSIREIDLVTPEAVSDLRSIAQRMIGAGYSRECVQVYGNVRKSAMEMIFKQLGIVKLGIGDVQRLDWEAVEVKIRRWIRAAKVCVRVVFASEKRLCEQIFEGTMEETCFMEIVKTSALQLFNFPEAISISRRSPEKLFKILDLHDAITDLLPDMEEIFDSSSSESILVQATEIQSRLAEAARGILTEFENAVFREPSVVPVPGGTIHPLTRYVMNYLNLISDYRETLIDLVMTKPCRGLKCTNDRNDPDMDISELEGISPLALHMIWTMVMLQFNLEEKSLHYRDEPLSHIFVMNNVHYIVQKVKSSPELMELIGDKYLRKLTGIFRQAATKYQRATWVRVLNSLRDEGLHVSGSFSSGVSKSALRERFKAFNTMFEEVHRIQSTWSVPDTQLREELRISLSEHLIPAYRSFLGRFRGHIESGRHPENYLKYSVENLETAVLDFFEGYTTAPHLRRSQ

SEQ ID NO: 79797 - protein, 435 aa, Arabidopsis thaliana
  peptide (1)..(435): Ceres Seq. ID no. 12653223
  misc_feature (1)..(433): Homolog of NCBI NO: 30682979 NR Description: exocyst subunit EXO70 family [Arabidopsis >gi|9294634|dbj|BAB02973.1| gb|AAD25781.1~gene_id:MAG2.5~strong
  misc_feature (1)..(433): Homolog of NCBI NO: 15218495 NR Description: unknown protein; protein id: At1g72470.1
  misc_feature (1)..(433): Homolog of NCBI NO: 23270388 NR Description: unknown protein [Arabidopsis thaliana]
  misc_feature (1)..(430): Homolog of NCBI NO: 9758920 NR Description: gb|AAD25781.1~gene_id:MXI22.10~strong similarity
  misc_feature (1)..(430): Homolog of NCBI NO: 30695880 NR Description: exocyst subunit EXO70 family [Arabidopsis
  misc_feature (1)..(424): Homolog of NCBI NO: 19386798 NR Description: putative leucine zipper protein [Oryza sativa
  misc_feature (1)..(282): Homolog of NCBI NO: 15237198 NR Description: leucine zipper-containing protein; protein id: supported by cDNA: gi_20453215 [Arabidopsis thaliana] leucine zipper protein [Arabidopsis thaliana]
  misc_feature (238)..(427): Homolog of NCBI NO: 15237198 NR Description: leucine zipper-containing protein; protein id: supported by cDNA: gi_20453215 [Arabidopsis thaliana] leucine zipper protein [Arabidopsis thaliana]
  misc_feature (1)..(433): Homolog of NCBI NO: 38346639 NR Description: OSJNBa0072D21.9 [Oryza sativa (japonica
  misc_feature (1)..(424): Homolog of NCBI NO: 100226 NR Description: tomato leucine zipper-containing protein - tomato protein of unknown function [Lycopersicon esculentum]
MIGAGYSRECVQVYGNVRKSAMEMIFKQLGIVKLGIGDVQRLDWEAVEVKIRRWIRAAKVCVRVVFASEKRLCEQIFEGTMEETCFMEIVKTSALQLFNFPEAISISRRSPEKLFKILDLHDAITDLLPDMEEIFDSSSSESILVQATEIQSRLAEAARGILTEFENAVFREPSVVPVPGGTIHPLTRYVMNYLNLISDYRETLIDLVMTKPCRGLKCTNDRNDPDMDISELEGISPLALHMIWTMVMLQFNLEEKSLHYRDEPLSHIFVMNNVHYIVQKVKSSPELMELIGDKYLRKLTGIFRQAATKYQRATWVRVLNSLRDEGLHVSGSFSSGVSKSALRERFKAFNTMFEEVHRIQSTWSVPDTQLREELRISLSEHLIPAYRSFLGRFRGHIESGRHPENYLKYSVENLETAVLDFFEGYTTAPHLRRSQ

SEQ ID NO: 79798 - DNA, 720 bp, Arabidopsis thaliana
  misc_feature (1)..(720): Ceres Seq. ID no. 12653279
  misc_feature: MA Experiment ID: 20000227 Result: Down-regulated in Transcription
  misc_feature: MA Experiment 20000227 PARAMETER Experiment Name: At_Root-Tips-vs-Tops_P Parameter: Tissue Value: Root Tips vs. Root Tops
  misc_feature: MA Experiment ID: 20000267 Result: Up-regulated in Transcription
  misc_feature: MA Experiment 20000267 PARAMETER Experiment Name: At_Drought_P Parameter: Age (day) Value: 7
  misc_feature: MA Experiment 20000267 PARAMETER Experiment Name: At_Drought_P Parameter: Organism Value: A. thaliana
  misc_feature: MA Experiment 20000267 PARAMETER Experiment Name: At_Drought_P Parameter: Plant Line Value: WS
  misc_feature: MA Experiment 20000267 PARAMETER Experiment Name: At_Drought_P Parameter: Timepoint (hr) Value: 6
  misc_feature: MA Experiment 20000267 PARAMETER Experiment Name: At_Drought_P Parameter: Tissue Value: Whole Plant
  misc_feature: MA Experiment 20000267 PARAMETER Experiment Name: At_Drought_P Parameter: Treatment Value: Drought vs. No Drought
  misc_feature: MA Experiment ID: 20000436 Result: Up-regulated in Transcription
  misc_feature: MA Experiment 20000436 PARAMETER Experiment Name: At_Drought_P Parameter: Age (day) Value: 7
  misc_feature: MA Experiment 20000436 PARAMETER Experiment Name: At_Drought_P Parameter: Organism Value: A. thaliana
  misc_feature: MA Experiment 20000436 PARAMETER Experiment Name: At_Drought_P Parameter: Plant Line Value: WS
  misc_feature: MA Experiment 20000436 PARAMETER Experiment Name: At_Drought_P Parameter: Timepoint (hr) Value: 12
  misc_feature: MA Experiment 20000436 PARAMETER Experiment Name: At_Drought_P Parameter: Tissue Value: Whole Plant
  misc_feature: MA Experiment 20000436 PARAMETER Experiment Name: At_Drought_P Parameter: Treatment Value: Drought vs. No Drought
  misc_feature: MA Experiment ID: 20001556 Result: Up-regulated in Transcription
  misc_feature: MA Experiment 20001556 PARAMETER Experiment Name: At_Drought_Soil_Dry_P Parameter: Age (day) Value: 26
  misc_feature: MA Experiment 20001556 PARAMETER Experiment Name: At_Drought_Soil_Dry_P Parameter: Organism Value: A. thaliana
  misc_feature: MA Experiment 20001556 PARAMETER Experiment Name: At_Drought_Soil_Dry_P Parameter: Plant Line Value: WS
  misc_feature: MA Experiment 20001556 PARAMETER Experiment Name: At_Drought_Soil_Dry_P Parameter: Post Timepoint (hr) Value: None
  misc_feature: MA Experiment 20001556 PARAMETER Experiment Name: At_Drought_Soil_Dry_P Parameter: Post-Treatment Value: None
  misc_feature: MA Experiment 20001556 PARAMETER Experiment Name: At_Drought_Soil_Dry_P Parameter: Timepoint (day) Value: 12
  misc_feature: MA Experiment 20001556 PARAMETER Experiment Name: At_Drought_Soil_Dry_P Parameter: Treatment Value: Drought vs. No Drought
atgggagatcaacaaaaaattcacccggttcttcaaatggaagccaacaagacgaagacaacaacaccagctcccggaaagacagtcttgcttccggttcaacggccgattccgcctcctgttattcctagtaagaatcgaaatatgtgctgcaaaatcttttgttgggtgttaagccttctagtcattgcattgatcgcgttagcaattgcggttgcggttgtatactttgttttccaccctaaactcccgagttacgaagtcaacagtttacgagttaccaaccttggaatcaatctagacctctctctttccgcggagtttaaagtcgagatcacagctcgtaatcccaacgaaaagattgggatttattacgagaaaggaggtcatatcggtgtgtggtacgacaagacaaagctatgtgaaggccctataccgaggttttatcaaggacatcgcaatgtaactaaactaaatgtggctctaacgggaagagcgcaatatgggaacactgtcttggcggcattgcagcagcaacaacaaacaggacgtgtaccgttagatcttaaagtgaatgcacctgtcgccatcaaactcggaaatctgaagatgaagaagattcggatattggggagttgtaagcttgttgttgatagtttatcaacgaacaataatatcaacatcaaagctagtgattgcagttttaaggccaaactctga

SEQ ID NO: 79799 - protein, 239 aa, Arabidopsis thaliana
  peptide (1)..(239): Ceres Seq. ID no. 12653280
  misc_feature (1)..(239): Homolog of NCBI NO: 15221846 NR Description: hypothetical protein; protein id: At1g54540.1
  misc_feature (1)..(239): Homolog of NCBI NO: 18408342 NR Description: expressed protein; protein id: At1g65690.1, by cDNA: 21639. [Arabidopsis thaliana]
  misc_feature (1)..(239): Homolog of NCBI NO: 6686408 NR Description: F1E22.7 [Arabidopsis thaliana]
  misc_feature (1)..(239): Homolog of NCBI NO: 15239459 NR Description: putative protein; protein id: At5g36970.1
  misc_feature (1)..(239): Homolog of NCBI NO: 10178216 NR Description: gb|AAF23842.1~gene_id:MLF18.15~similar to unknown
  misc_feature (14)..(239): Homolog of NCBI NO: 38344198 NR Description: OSJNBa0064G10.14 [Oryza sativa (japonica
  misc_feature (55)..(232): Homolog of NCBI NO: 38636986 NR Description: unknown protein [Oryza sativa (japonica
  misc_feature (47)..(238): Homolog of NCBI NO: 34909192 NR Description: P0425G02.19 [Oryza sativa (japonica
  misc_feature (46)..(226): Homolog of NCBI NO: 18401317 NR Description: expressed protein; protein id: At2g27080.1, by cDNA: gi_13877664, supported by cDNA: gi_15450380, supported cDNA: gi_16974488 [Arabidopsis thaliana] >gi|25407856|pir||E84668
  misc_feature (23)..(233): Homolog of NCBI NO: 15242167 NR Description: putative protein; protein id: At5g21130.1 thaliana] >gi|29294053|gb|AAO73890.1| hypothetical protein
MGDQQKIHPVLQMEANKTKTTTPAPGKTVLLPVQRPIPPPVIPSKNRNMCCKIFCWVLSLLVIALIALAIAVAVVYFVFHPKLPSYEVNSLRVTNLGINLDLSLSAEFKVEITARNPNEKIGIYYEKGGHIGVWYDKTKLCEGPIPRFYQGHRNVTKLNVALTGRAQYGNTVLAALQQQQQTGRVPLDLKVNAPVAIKLGNLKMKKIRILGSCKLVVDSLSTNNNINIKASDCSFKAKL

SEQ ID NO: 79800 - protein, 227 aa, Arabidopsis thaliana
  peptide (1)..(227): Ceres Seq. ID no. 12653281
  misc_feature (1)..(227): Homolog of NCBI NO: 15221846 NR Description: hypothetical protein; protein id: At1g54540.1
  misc_feature (1)..(227): Homolog of NCBI NO: 18408342 NR Description: expressed protein; protein id: At1g65690.1, by cDNA: 21639. [Arabidopsis thaliana]
  misc_feature (1)..(227): Homolog of NCBI NO: 6686408 NR Description: F1E22.7 [Arabidopsis thaliana]
  misc_feature (1)..(227): Homolog of NCBI NO: 15239459 NR Description: putative protein; protein id: At5g36970.1
  misc_feature (1)..(227): Homolog of NCBI NO: 10178216 NR Description: gb|AAF23842.1~gene_id:MLF18.15~similar to unknown
  misc_feature (2)..(227): Homolog of NCBI NO: 38344198 NR Description: OSJNBa0064G10.14 [Oryza sativa (japonica
  misc_feature (43)..(220): Homolog of NCBI NO: 38636986 NR Description: unknown protein [Oryza sativa (japonica
  misc_feature (35)..(226): Homolog of NCBI NO: 34909192 NR Description: P0425G02.19 [Oryza sativa (japonica
  misc_feature (34)..(214): Homolog of NCBI NO: 18401317 NR Description: expressed protein; protein id: At2g27080.1, by cDNA: gi_13877664, supported by cDNA: gi_15450380, supported cDNA: gi_16974488 [Arabidopsis thaliana] >gi|25407856|pir||E84668
  misc_feature (11)..(221): Homolog of NCBI NO: 15242167 NR Description: putative protein; protein id: At5g21130.1 thaliana] >gi|29294053|gb|AAO73890.1| hypothetical protein
MEANKTKTTTPAPGKTVLLPVQRPIPPPVIPSKNRNMCCKIFCWVLSLLVIALIALAIAVAVVYFVFHPKLPSYEVNSLRVTNLGINLDLSLSAEFKVEITARNPNEKIGIYYEKGGHIGVWYDKTKLCEGPIPRFYQGHRNVTKLNVALTGRAQYGNTVLAALQQQQQTGRVPLDLKVNAPVAIKLGNLKMKKIRILGSCKLVVDSLSTNNNINIKASDCSFKAKL

SEQ ID NO: 79801 - protein, 191 aa, Arabidopsis thaliana
  peptide (1)..(191): Ceres Seq. ID no. 12653282
  misc_feature (1)..(191): Homolog of NCBI NO: 15221846 NR Description: hypothetical protein; protein id: At1g54540.1
  misc_feature (1)..(191): Homolog of NCBI NO: 18408342 NR Description: expressed protein; protein id: At1g65690.1, by cDNA: 21639. [Arabidopsis thaliana]
  misc_feature (1)..(191): Homolog of NCBI NO: 6686408 NR Description: F1E22.7 [Arabidopsis thaliana]
  misc_feature (1)..(191): Homolog of NCBI NO: 15239459 NR Description: putative protein; protein id: At5g36970.1
  misc_feature (1)..(191): Homolog of NCBI NO: 10178216 NR Description: gb|AAF23842.1~gene_id:MLF18.15~similar to unknown
  misc_feature (1)..(191): Homolog of NCBI NO: 38344198 NR Description: OSJNBa0064G10.14 [Oryza sativa (japonica
  misc_feature (7)..(184): Homolog of NCBI NO: 38636986 NR Description: unknown protein [Oryza sativa (japonica
  misc_feature (1)..(190): Homolog of NCBI NO: 34909192 NR Description: P0425G02.19 [Oryza sativa (japonica
  misc_feature (1)..(178): Homolog of NCBI NO: 18401317 NR Description: expressed protein; protein id: At2g27080.1, by cDNA: gi_13877664, supported by cDNA: gi_15450380, supported cDNA: gi_16974488 [Arabidopsis thaliana] >gi|25407856|pir||E84668
  misc_feature (1)..(185): Homolog of NCBI NO: 15242167 NR Description: putative protein; protein id: At5g21130.1 thaliana] >gi|29294053|gb|AAO73890.1| hypothetical protein
MCCKIFCWVLSLLVIALIALAIAVAVVYFVFHPKLPSYEVNSLRVTNLGINLDLSLSAEFKVEITARNPNEKIGIYYEKGGHIGVWYDKTKLCEGPIPRFYQGHRNVTKLNVALTGRAQYGNTVLAALQQQQQTGRVPLDLKVNAPVAIKLGNLKMKKIRILGSCKLVVDSLSTNNNINIKASDCSFKAKL

SEQ ID NO: 79802 - DNA, 549 bp, Arabidopsis thaliana
  misc_feature (1)..(549): Ceres Seq. ID no. 12653291
atgaagttcttgatttacctcgttgtgtttgttcttcttttcaatggtttgacggccaacagagtggaaaactctctggttcagaaatattgcaatcaaagttcaaagtacgcggaacgatatttctataagttttgcattgcatctctcgaagagaatgcggaaagtcagaaagcaaggaatagcaatgatttaacattggtaggaacgaataacgctttatcaaacctaacaaacgtgaaaagaattgtggagaagattttcaacgagagaaaatataagggcaggctgagtaagaagttgttgcaaaagtgccttaagctttattctgaaggctatgacgcgttaacctcagctttgaagtacattaaagtgagagatctgtttaaagtttcggttcatttgcagaaagcaaaagaagcaccaagcatttgcgaaatgggattcaacggcgacaataaacaaatatctccgatgaagaaagaaaacgatgttcttttcgacgtgatcaatattccttacagttttaatatgaatcgacatggttag

SEQ ID NO: 79803 - protein, 182 aa, Arabidopsis thaliana; identical to SEQ ID NO: 20602
  peptide (1)..(182): Ceres Seq. ID no. 12653292
  misc_feature (1)..(182): Homolog of NCBI NO: 15221869 NR Description: hypothetical protein; protein id: At1g54620.1
  misc_feature (1)..(181): Homolog of NCBI NO: 15237983 NR Description: unknown protein; protein id: At5g46980.1 thaliana] >gi|9759440|dbj|BAB10237.1| gene_id:MQD22.12~unknown
  misc_feature (1)..(181): Homolog of NCBI NO: 15237994 NR Description: unknown protein; protein id: At5g46990.1 thaliana] >gi|9759441|dbj|BAB10238.1| gene_id:MQD22.13~unknown
  misc_feature (1)..(167): Homolog of NCBI NO: 15237982 NR Description: unknown protein; protein id: At5g46970.1 thaliana] >gi|9759439|dbj|BAB10236.1| gene_id:MQD22.11~unknown
  misc_feature (1)..(176): Homolog of NCBI NO: 15237978 NR Description: unknown protein; protein id: At5g46930.1 thaliana] >gi|9759435|dbj|BAB10232.1| gene_id:MQD22.7~unknown
  misc_feature (1)..(178): Homolog of NCBI NO: 21536868 NR Description: unknown [Arabidopsis thaliana]
  misc_feature (1)..(178): Homolog of NCBI NO: 15237979 NR Description: putative protein; protein id: At5g46940.1, by cDNA: 11386. [Arabidopsis thaliana] contains similarity to invertase inhibitor~gene_id:MQD22.8
  misc_feature (1)..(178): Homolog of NCBI NO: 18422737 NR Description: expressed protein; protein id: At5g46960.1 thaliana] >gi|9759438|dbj|BAB10235.1| gene_id:MQD22.10~unknown
  misc_feature (25)..(178): Homolog of NCBI NO: 32395573 NR Description: seed specific protein Bn15D12A [Brassica napus]
  misc_feature (1)..(176): Homolog of NCBI NO: 18422735 NR Description: expressed protein; protein id: At5g46950.1, by cDNA: 218. [Arabidopsis thaliana] >gi|9759437|dbj|BAB10234.1|

SEQ ID NO: 79804 - DNA, 1044 bp, Arabidopsis thaliana
  misc_feature (1)..(1044): Ceres Seq. ID no. 12653305
  misc_feature: MA Experiment ID: 20000439 Result: Up-regulated in Transcription
  misc_feature: MA Experiment 20000439 PARAMETER Experiment Name: At_Roots__P Parameter: Age (day) Value: 14 vs. 21
  misc_feature: MA Experiment 20000439 PARAMETER Experiment Name: At_Roots__P Parameter: Organism Value: A. thaliana
  misc_feature: MA Experiment 20000439 PARAMETER Experiment Name: At_Roots__P Parameter: Tissue Value: Roots vs. Whole Plant
  misc_feature: MA Experiment ID: 20001557 Result: Up-regulated in Transcription
  misc_feature: MA Experiment 20001557 PARAMETER Experiment Name: At_Drought_Soil_Dry_P Parameter: Age (day) Value: 27
  misc_feature: MA Experiment 20001557 PARAMETER Experiment Name: At_Drought_Soil_Dry_P Parameter: Organism Value: A. thaliana
  misc_feature: MA Experiment 20001557 PARAMETER Experiment Name: At_Drought_Soil_Dry_P Parameter: Plant Line Value: WS
  misc_feature: MA Experiment 20001557 PARAMETER Experiment Name: At_Drought_Soil_Dry_P Parameter: Post Timepoint (hr) Value: 3
  misc_feature: MA Experiment 20001557 PARAMETER Experiment Name: At_Drought_Soil_Dry_P Parameter: Post-Treatment Value: Re-Water vs. No Drought
  misc_feature: MA Experiment 20001557 PARAMETER Experiment Name: At_Drought_Soil_Dry_P Parameter: Timepoint (day) Value: 13
  misc_feature: MA Experiment 20001557 PARAMETER Experiment Name: At_Drought_Soil_Dry_P Parameter: Treatment Value: Drought vs. No Drought
  misc_feature: MA Experiment ID: 20001558 Result: Up-regulated in Transcription
  misc_feature: MA Experiment 20001558 PARAMETER Experiment Name: At_Drought_Soil_Dry_P Parameter: Age (day) Value: 27
  misc_feature: MA Experiment 20001558 PARAMETER Experiment Name: At_Drought_Soil_Dry_P Parameter: Organism Value: A. thaliana
  misc_feature: MA Experiment 20001558 PARAMETER Experiment Name: At_Drought_Soil_Dry_P Parameter: Plant Line Value: WS
  misc_feature: MA Experiment 20001558 PARAMETER Experiment Name: At_Drought_Soil_Dry_P Parameter: Post Timepoint (hr) Value: 6
  misc_feature: MA Experiment 20001558 PARAMETER Experiment Name: At_Drought_Soil_Dry_P Parameter: Post-Treatment Value: Re-Water vs. No Drought
  misc_feature: MA Experiment 20001558 PARAMETER Experiment Name: At_Drought_Soil_Dry_P Parameter: Timepoint (day) Value: 13
  misc_feature: MA Experiment 20001558 PARAMETER Experiment Name: At_Drought_Soil_Dry_P Parameter: Treatment Value: Drought vs. No Drought
atgaagggagatctgagaaatggggtttacgttggattggtggtgatgctctatgcgtgtattgtcgttgtacaactcgaagcagcgttggaaacaaagacatgtttccaaaggaagagtccatgtttcctaaagaagcaaacttgcccaaagcaatgtccttcgttttcccctcccaatggcagtaccaaggcatgcgtcatcgattgctttaaccctatttgcaaagccacttgccgaaataggaagcctaattgcaacggcaaaggatcagcatgcttagatccacgtttcatcggcggagatggcatcgtcttctactttcatggaaaacgcgacgagcattttgcactaatctctgacgttgacttccaagtcaacgcacgtttcattggtcttagacctaatggtcgggccagagattttacgtggatacaatccttaggtctaatcttcggccccaacagcaaaaccttctcactcgaggctacaaaagccgagaaatgggatcaccaagttgaccacctccgtctttcctacgaaggaaaagagatctctttaccaaaaggagatacatcagtgtggagtcctcctctaggagactatataaagatcgagagaacttctgacataaactccgtgttggtcacgttacaagacattgccgagatttggatcaacgtggttccggtgacaaaagaagacgacataatccataaatacgggataccggaggatgactgttttgctcatcttgaggttcagttccggttcttgaagttgtcatcaaacgtggaaggtgttttaggaagaacgtataaagaagatttcaagaatccggcgaaacctggcgttgctatgccggttgttggtggcgaagataaatacagaacagcgtcacttcttgaaacaagttgtaatgcatgtgtttactctggtggctcaagaagtttggacaagattgagccattgttgctgaatcaaaacactgttgattgcaccggtggatccagcagtggtgttggaatcttttgcagaaaataa

SEQ ID NO: 79805 - protein, 347 aa, Arabidopsis thaliana
  peptide (1)..(347): Ceres Seq. ID no. 12653306
  misc_feature (1)..(347): Homolog of NCBI NO: 15221921 NR Description: late embryogenesis protein, putative; protein id: [Arabidopsis thaliana] >gi|25354493|pir||D96590 hypothetical
  misc_feature (13)..(347): Homolog of NCBI NO: 15239629 NR Description: root cap protein 2-like protein; protein id:
  misc_feature (13)..(347): Homolog of NCBI NO: 15234120 NR Description: putative protein; protein id: At4g27400.1
  misc_feature (22)..(313): Homolog of NCBI NO: 15239359 NR Description: late embryonic abundant protein - like; protein At5g60520.1 [Arabidopsis thaliana] >gi|9757754|dbj|BAB08235.1| similarity to root cap protein~gene_id:MUF9.15 [Arabidopsis
  misc_feature (22)..(318): Homolog of NCBI NO: 15239360 NR Description: late embryonic abundant protein - like; protein At5g60530.1, supported by cDNA: gi_15809989 [Arabidopsis >gi|9757755|dbj|BAB08236.1| contains similarity to root cap
  misc_feature (22)..(318): Homolog of NCBI NO: 15809990 NR Description: AT5g60530/muf9_180 [Arabidopsis thaliana]
  misc_feature (35)..(347): Homolog of NCBI NO: 11994465 NR Description: contains similarity to late embryogenesis
  misc_feature (35)..(347): Homolog of NCBI NO: 30685319 NR Description: late embryogenesis abundant protein -related
  misc_feature (14)..(347): Homolog of NCBI NO: 7484468 NR Description: late embryonic abundant protein EMB7 - white >gi|1350543|gb|AAB01570.1| late embryogenesis abundant protein
  misc_feature (37)..(347): Homolog of NCBI NO: 4514637 NR Description: root cap protein 2 [Zea mays]
MKGDLRNGVYVGLVVMLYACIVVVQLEAALETKTCFQRKSPCFLKKQTCPKQCPSFSPPNGSTKACVIDCFNPICKATCRNRKPNCNGKGSACLDPRFIGGDGIVFYFHGKRDEHFALISDVDFQVNARFIGLRPNGRARDFTWIQSLGLIFGPNSKTFSLEATKAEKWDHQVDHLRLSYEGKEISLPKGDTSVWSPPLGDYIKIERTSDINSVLVTLQDIAEIWINVVPVTKEDDIIHKYGIPEDDCFAHLEVQFRFLKLSSNVEGVLGRTYKEDFKNPAKPGVAMPVVGGEDKYRTASLLETSCNACVYSGGSRSLDKIEPLLLNQNTVDCTGGSSSGVGIFCRK

SEQ ID NO: 79806 - protein, 332 aa, Arabidopsis thaliana
  peptide (1)..(332): Ceres Seq. ID no. 12653307
  misc_feature (1)..(332): Homolog of NCBI NO: 15221921 NR Description: late embryogenesis protein, putative; protein id: [Arabidopsis thaliana] >gi|25354493|pir||D96590 hypothetical
  misc_feature (1)..(332): Homolog of NCBI NO: 15239629 NR Description: root cap protein 2-like protein; protein id:
  misc_feature (1)..(332): Homolog of NCBI NO: 15234120 NR Description: putative protein; protein id: At4g27400.1
  misc_feature (7)..(298): Homolog of NCBI NO: 15239359 NR Description: late embryonic abundant protein - like; protein At5g60520.1 [Arabidopsis thaliana] >gi|9757754|dbj|BAB08235.1| similarity to root cap protein~gene_id:MUF9.15 [Arabidopsis
  misc_feature (7)..(303): Homolog of NCBI NO: 15239360 NR Description: late embryonic abundant protein - like; protein At5g60530.1, supported by cDNA: gi_15809989 [Arabidopsis >gi|9757755|dbj|BAB08236.1| contains similarity to root cap
  misc_feature (7)..(303): Homolog of NCBI NO: 15809990 NR Description: AT5g60530/muf9_180 [Arabidopsis thaliana]
  misc_feature (20)..(332): Homolog of NCBI NO: 11994465 NR Description: contains similarity to late embryogenesis
  misc_feature (20)..(332): Homolog of NCBI NO: 30685319 NR Description: late embryogenesis abundant protein -related
  misc_feature (1)..(332): Homolog of NCBI NO: 7484468 NR Description: late embryonic abundant protein EMB7 - white >gi|1350543|gb|AAB01570.1| late embryogenesis abundant protein
  misc_feature (22)..(332): Homolog of NCBI NO: 4514637 NR Description: root cap protein 2 [Zea mays]
MLYACIVVVQLEAALETKTCFQRKSPCFLKKQTCPKQCPSFSPPNGSTKACVIDCFNPICKATCRNRKPNCNGKGSACLDPRFIGGDGIVFYFHGKRDEHFALISDVDFQVNARFIGLRPNGRARDFTWIQSLGLIFGPNSKTFSLEATKAEKWDHQVDHLRLSYEGKEISLPKGDTSVWSPPLGDYIKIERTSDINSVLVTLQDIAEIWINVVPVTKEDDIIHKYGIPEDDCFAHLEVQFRFLKLSSNVEGVLGRTYKEDFKNPAKPGVAMPVVGGEDKYRTASLLETSCNACVYSGGSRSLDKIEPLLLNQNTVDCTGGSSSGVGIFCRK

SEQ ID NO: 79807 - DNA, 2797 bp, Arabidopsis thaliana
  misc_feature (1)..(2797): Ceres Seq. ID no. 12653317
  misc_feature: MA Experiment ID: 20000169 Result: Up-regulated in Transcription
  misc_feature: MA Experiment 20000169 PARAMETER Experiment Name: At_100uM_ABA_P Parameter: Age (day) Value: 14
  misc_feature: MA Experiment 20000169 PARAMETER Experiment Name: At_100uM_ABA_P Parameter: Organism Value: A. thaliana
  misc_feature: MA Experiment 20000169 PARAMETER Experiment Name: At_100uM_ABA_P Parameter: Plant Line Value: WS
  misc_feature: MA Experiment 20000169 PARAMETER Experiment Name: At_100uM_ABA_P Parameter: Timepoint (hr) Value: 6
  misc_feature: MA Experiment 20000169 PARAMETER Experiment Name: At_100uM_ABA_P Parameter: Tissue Value: Aerial
  misc_feature: MA Experiment 20000169 PARAMETER Experiment Name: At_100uM_ABA_P Parameter: Treatment Value: 100uM ABA vs. No Treatment
  misc_feature: MA Experiment ID: 20000179 Result: Up-regulated in Transcription
  misc_feature: MA Experiment 20000179 PARAMETER Experiment Name: At_Germinating_Seeds_P Parameter: Age (hr) Value: 6 vs. 0
  misc_feature: MA Experiment 20000179 PARAMETER Experiment Name: At_Germinating_Seeds_P Parameter: Tissue Value: Germinating Seeds
  misc_feature: MA Experiment ID: 20000180 Result: Up-regulated in Transcription
  misc_feature: MA Experiment 20000180 PARAMETER Experiment Name: At_Germinating_Seeds_P Parameter: Age (hr) Value: 24 vs. 0
  misc_feature: MA Experiment 20000180 PARAMETER Experiment Name: At_Germinating_Seeds_P Parameter: Tissue Value: Germinating Seeds
  misc_feature: MA Experiment ID: 20000184 Result: Down-regulated in Transcription
  misc_feature: MA Experiment 20000184 PARAMETER Experiment Name: At_Shoots__P Parameter: Age (day) Value: 7
  misc_feature: MA Experiment 20000184 PARAMETER Experiment Name: At_Shoots__P Parameter: Tissue Value: Shoots vs. Whole Plant
  misc_feature: MA Experiment ID: 20000185 Result: Up-regulated in Transcription
  misc_feature: MA Experiment 20000185 PARAMETER Experiment Name: At_Roots__P Parameter: Age (day) Value: 7 vs. 21
  misc_feature: MA Experiment 20000185 PARAMETER Experiment Name: At_Roots__P Parameter: Organism Value: A. thaliana
  misc_feature: MA Experiment 20000185 PARAMETER Experiment Name: At_Roots__P Parameter: Tissue Value: Roots vs. Whole Plant
  misc_feature: MA Experiment ID: 20000227 Result: Down-regulated in Transcription
  misc_feature: MA Experiment 20000227 PARAMETER Experiment Name: At_Root-Tips-vs-Tops_P Parameter: Tissue Value: Root Tips vs. Root Tops
  misc_feature: MA Experiment ID: 20000264 Result: Up-regulated in Transcription
  misc_feature: MA Experiment 20000264 PARAMETER Experiment Name: At_Open_Flower_P Parameter: Age (day) Value: 21
  misc_feature: MA Experiment 20000264 PARAMETER Experiment Name: At_Open_Flower_P Parameter: Plant Line Value: WS
  misc_feature: MA Experiment 20000264 PARAMETER Experiment Name: At_Open_Flower_P Parameter: Tissue Value: Open Flower vs. Whole Plant
  misc_feature: MA Experiment ID: 20000438 Result: Down-regulated in Transcription
  misc_feature: MA Experiment 20000438 PARAMETER Experiment Name: At_Shoots__P Parameter: Age (day) Value: 14
  misc_feature: MA Experiment 20000438 PARAMETER Experiment Name: At_Shoots__P Parameter: Tissue Value: Shoots vs. Whole Plant
  misc_feature: MA Experiment ID: 20000439 Result: Up-regulated in Transcription
  misc_feature: MA Experiment 20000439 PARAMETER Experiment Name: At_Roots__P Parameter: Age (day) Value: 14 vs. 21
  misc_feature: MA Experiment 20000439 PARAMETER Experiment Name: At_Roots__P Parameter: Organism Value: A. thaliana
  misc_feature: MA Experiment 20000439 PARAMETER Experiment Name: At_Roots__P Parameter: Tissue Value: Roots vs. Whole Plant
  misc_feature: MA Experiment ID: 20000453 Result: Up-regulated in Transcription
  misc_feature: MA Experiment 20000453 PARAMETER Experiment Name: At_100uM_ABA_P Parameter: Age (day) Value: 15
  misc_feature: MA Experiment 20000453 PARAMETER Experiment Name: At_100uM_ABA_P Parameter: Organism Value: A. thaliana
  misc_feature: MA Experiment 20000453 PARAMETER Experiment Name: At_100uM_ABA_P Parameter: Plant Line Value: WS
  misc_feature: MA Experiment 20000453 PARAMETER Experiment Name: At_100uM_ABA_P Parameter: Timepoint (hr) Value: 24
  misc_feature: MA Experiment 20000453 PARAMETER Experiment Name: At_100uM_ABA_P Parameter: Tissue Value: Aerial
  misc_feature: MA Experiment 20000453 PARAMETER Experiment Name: At_100uM_ABA_P Parameter: Treatment Value: 100uM ABA vs. No Treatment
  misc_feature: MA Experiment ID: 20000527 Result: Down-regulated in Transcription
  misc_feature: MA Experiment 20000527 PARAMETER Experiment Name: At_10percent_PEG_P Parameter: Age (day) Value: 20
  misc_feature: MA Experiment 20000527 PARAMETER Experiment Name: At_10percent_PEG_P Parameter: Organism Value: A. thaliana
  misc_feature: MA Experiment 20000527 PARAMETER Experiment Name: At_10percent_PEG_P Parameter: Plant Line Value: WS
  misc_feature: MA Experiment 20000527 PARAMETER Experiment Name: At_10percent_PEG_P Parameter: Timepoint (day) Value: 20
  misc_feature: MA Experiment 20000527 PARAMETER Experiment Name: At_10percent_PEG_P Parameter: Tissue Value: Whole Plant
  misc_feature: MA Experiment 20000527 PARAMETER Experiment Name: At_10percent_PEG_P Parameter: Treatment Value: 10percent PEG vs. No Treatment
  misc_feature: MA Experiment ID: 20000576 Result: Down-regulated in Transcription
  misc_feature: MA Experiment 20000576 PARAMETER Experiment Name: At_100uM_ABA_Mutants__P Parameter: Organism Value: A. thaliana
  misc_feature: MA Experiment 20000576 PARAMETER Experiment Name: At_100uM_ABA_Mutants__P Parameter: Plant Line Value: CS23
  misc_feature: MA Experiment 20000576 PARAMETER Experiment Name: At_100uM_ABA_Mutants__P Parameter: Timepoint (hr) Value: 6
  misc_feature: MA Experiment 20000576 PARAMETER Experiment Name: At_100uM_ABA_Mutants__P Parameter: Tissue Value: Whole Plant
  misc_feature: MA Experiment 20000576 PARAMETER Experiment Name: At_100uM_ABA_Mutants__P Parameter: Treatment Value: 1uM ABA vs. No Treatment
  misc_feature: MA Experiment ID: 20000794 Result: Up-regulated in Transcription
  misc_feature: MA Experiment 20000794 PARAMETER Experiment Name: At_Petals_P Parameter: Age (day) Value: 23-25 days
  misc_feature: MA Experiment 20000794 PARAMETER Experiment Name: At_Petals_P Parameter: Plant Line Value: WS
  misc_feature: MA Experiment 20000794 PARAMETER Experiment Name: At_Petals_P Parameter: Tissue Value: Petals vs. Whole plant
  misc_feature: MA Experiment ID: 20001248 Result: Down-regulated in Transcription
  misc_feature: MA Experiment 20001248 PARAMETER Experiment Name: At_Far-red-induction_P Parameter: Age (day) Value: 7
  misc_feature: MA Experiment 20001248 PARAMETER Experiment Name: At_Far-red-induction_P Parameter: Light Value: Far-red vs. White
  misc_feature: MA Experiment 20001248 PARAMETER Experiment Name: At_Far-red-induction_P Parameter: Organism Value: A. thaliana
  misc_feature: MA Experiment 20001248 PARAMETER Experiment Name: At_Far-red-induction_P Parameter: Plant Line Value: Columbia
  misc_feature: MA Experiment 20001248 PARAMETER Experiment Name: At_Far-red-induction_P Parameter: Timepoint (hr) Value: 4
  misc_feature: MA Experiment 20001248 PARAMETER Experiment Name: At_Far-red-induction_P Parameter: Tissue Value: Whole Plant
  misc_feature: MA Experiment ID: 20001450 Result: Down-regulated in Transcription
  misc_feature: MA Experiment 20001450 PARAMETER Experiment Name: At_Far-red-induction_P Parameter: Age (day) Value: 7
  misc_feature: MA Experiment 20001450 PARAMETER Experiment Name: At_Far-red-induction_P Parameter: Light Value: Far-red vs. White
  misc_feature: MA Experiment 20001450 PARAMETER Experiment Name: At_Far-red-induction_P Parameter: Organism Value: A. thaliana
  misc_feature: MA Experiment 20001450 PARAMETER Experiment Name: At_Far-red-induction_P Parameter: Plant Line Value: Columbia
  misc_feature: MA Experiment 20001450 PARAMETER Experiment Name: At_Far-red-induction_P Parameter: Timepoint (hr) Value: 8
  misc_feature: MA Experiment 20001450 PARAMETER Experiment Name: At_Far-red-induction_P Parameter: Tissue Value: Whole Plant
  misc_feature: MA Experiment ID: 20001554 Result: Up-regulated in Transcription
  misc_feature: MA Experiment 20001554 PARAMETER Experiment Name: At_Drought_Soil_Dry_P Parameter: Age (day) Value: 21
  misc_feature: MA Experiment 20001554 PARAMETER Experiment Name: At_Drought_Soil_Dry_P Parameter: Organism Value: A. thaliana
  misc_feature: MA Experiment 20001554 PARAMETER Experiment Name: At_Drought_Soil_Dry_P Parameter: Plant Line Value: WS
  misc_feature: MA Experiment 20001554 PARAMETER Experiment Name: At_Drought_Soil_Dry_P Parameter: Post Timepoint (hr) Value: None
  misc_feature: MA Experiment 20001554 PARAMETER Experiment Name: At_Drought_Soil_Dry_P Parameter: Post-Treatment Value: None
  misc_feature: MA Experiment 20001554 PARAMETER Experiment Name: At_Drought_Soil_Dry_P Parameter: Timepoint (day) Value: 7
  misc_feature: MA Experiment 20001554 PARAMETER Experiment Name: At_Drought_Soil_Dry_P Parameter: Treatment Value: Drought vs. No Drought
  misc_feature: MA Experiment ID: 20001555 Result: Up-regulated in Transcription
  misc_feature: MA Experiment 20001555 PARAMETER Experiment Name: At_Drought_Soil_Dry_P Parameter: Age (day) Value: 24
  misc_feature: MA Experiment 20001555 PARAMETER Experiment Name: At_Drought_Soil_Dry_P Parameter: Organism Value: A. thaliana
  misc_feature: MA Experiment 20001555 PARAMETER Experiment Name: At_Drought_Soil_Dry_P Parameter: Plant Line Value: WS
  misc_feature: MA Experiment 20001555 PARAMETER Experiment Name: At_Drought_Soil_Dry_P Parameter: Post Timepoint (hr) Value: None
  misc_feature: MA Experiment 20001555 PARAMETER Experiment Name: At_Drought_Soil_Dry_P Parameter: Post-Treatment Value: None
  misc_feature: MA Experiment 20001555 PARAMETER Experiment Name: At_Drought_Soil_Dry_P Parameter: Timepoint (day) Value: 10
  misc_feature: MA Experiment 20001555 PARAMETER Experiment Name: At_Drought_Soil_Dry_P Parameter: Treatment Value: Drought vs. No Drought
  misc_feature: MA Experiment ID: 20001556 Result: Up-regulated in Transcription
  misc_feature: MA Experiment 20001556 PARAMETER Experiment Name: At_Drought_Soil_Dry_P Parameter: Age (day) Value: 26
  misc_feature: MA Experiment 20001556 PARAMETER Experiment Name: At_Drought_Soil_Dry_P Parameter: Organism Value: A. thaliana
  misc_feature: MA Experiment 20001556 PARAMETER Experiment Name: At_Drought_Soil_Dry_P Parameter: Plant Line Value: WS
  misc_feature: MA Experiment 20001556 PARAMETER Experiment Name: At_Drought_Soil_Dry_P Parameter: Post Timepoint (hr) Value: None
  misc_feature: MA Experiment 20001556 PARAMETER Experiment Name: At_Drought_Soil_Dry_P Parameter: Post-Treatment Value: None
  misc_feature: MA Experiment 20001556 PARAMETER Experiment Name: At_Drought_Soil_Dry_P Parameter: Timepoint (day) Value: 12
  misc_feature: MA Experiment 20001556 PARAMETER Experiment Name: At_Drought_Soil_Dry_P Parameter: Treatment Value: Drought vs. No Drought
  misc_feature: MA Experiment ID: 20001558 Result: Up-regulated in Transcription
  misc_feature: MA Experiment 20001558 PARAMETER Experiment Name: At_Drought_Soil_Dry_P Parameter: Age (day) Value: 27
  misc_feature: MA Experiment 20001558 PARAMETER Experiment Name: At_Drought_Soil_Dry_P Parameter: Organism Value: A. thaliana
  misc_feature: MA Experiment 20001558 PARAMETER Experiment Name: At_Drought_Soil_Dry_P Parameter: Plant Line Value: WS
  misc_feature: MA Experiment 20001558 PARAMETER Experiment Name: At_Drought_Soil_Dry_P Parameter: Post Timepoint (hr) Value: 6
  misc_feature: MA Experiment 20001558 PARAMETER Experiment Name: At_Drought_Soil_Dry_P Parameter: Post-Treatment Value: Re-Water vs. No Drought
  misc_feature: MA Experiment 20001558 PARAMETER Experiment Name: At_Drought_Soil_Dry_P Parameter: Timepoint (day) Value: 13
  misc_feature: MA Experiment 20001558 PARAMETER Experiment Name: At_Drought_Soil_Dry_P Parameter: Treatment Value: Drought vs. No Drought
  misc_feature: MA Experiment ID: 20001559 Result: Up-regulated in Transcription
  misc_feature: MA Experiment 20001559 PARAMETER Experiment Name: At_Drought_Soil_Dry_P Parameter: Age (day) Value: 28
  misc_feature: MA Experiment 20001559 PARAMETER Experiment Name: At_Drought_Soil_Dry_P Parameter: Organism Value: A. thaliana
  misc_feature: MA Experiment 20001559 PARAMETER Experiment Name: At_Drought_Soil_Dry_P Parameter: Plant Line Value: WS
  misc_feature: MA Experiment 20001559 PARAMETER Experiment Name: At_Drought_Soil_Dry_P Parameter: Post Timepoint (hr) Value: 29
  misc_feature: MA Experiment 20001559 PARAMETER Experiment Name: At_Drought_Soil_Dry_P Parameter: Post-Treatment Value: Re-Water vs. No Drought
  misc_feature: MA Experiment 20001559 PARAMETER Experiment Name: At_Drought_Soil_Dry_P Parameter: Timepoint (day) Value: 14
  misc_feature: MA Experiment 20001559 PARAMETER Experiment Name: At_Drought_Soil_Dry_P Parameter: Treatment Value: Drought vs. No Drought
  misc_feature: MA Experiment ID: 20001757 Result: Down-regulated in Transcription
  misc_feature: MA Experiment 20001757 PARAMETER Experiment Name: At_50mM_NH4NO3_L-to-H_P Parameter: Timepoint (hr) Value: 6
  misc_feature: MA Experiment 20001757 PARAMETER Experiment Name: At_50mM_NH4NO3_L-to-H_P Parameter: Tissue Value: Leaf
  misc_feature: MA Experiment 20001757 PARAMETER Experiment Name: At_50mM_NH4NO3_L-to-H_P Parameter: Treatment Value: 50mM NH4NO3 vs 100mM Mannitol
  misc_feature: MA Experiment ID: 20001769 Result: Down-regulated in Transcription
  misc_feature: MA Experiment 20001769 PARAMETER Experiment Name: At_Far-red-enriched-adult_P Parameter: Age (day) Value: 28
  misc_feature: MA Experiment 20001769 PARAMETER Experiment Name: At_Far-red-enriched-adult_P Parameter: Light Value: Far-red enriched vs. White
  misc_feature: MA Experiment 20001769 PARAMETER Experiment Name: At_Far-red-enriched-adult_P Parameter: Organism Value: A. thaliana
  misc_feature: MA Experiment 20001769 PARAMETER Experiment Name: At_Far-red-enriched-adult_P Parameter: Plant Line Value: Columbia
  misc_feature: MA Experiment 20001769 PARAMETER Experiment Name: At_Far-red-enriched-adult_P Parameter: Timepoint (hr) Value: 4
  misc_feature: MA Experiment 20001769 PARAMETER Experiment Name: At_Far-red-enriched-adult_P Parameter: Tissue Value: Aerial
  misc_feature: MA Experiment ID: 20001904 Result: Up-regulated in Transcription
  misc_feature: MA Experiment 20001904 PARAMETER Experiment Name: At_Drought_Reproduction_P Parameter: Age (day) Value: 37
  misc_feature: MA Experiment 20001904 PARAMETER Experiment Name: At_Drought_Reproduction_P Parameter: Organism Value: A. thaliana
  misc_feature: MA Experiment 20001904 PARAMETER Experiment Name: At_Drought_Reproduction_P Parameter: Plant Line Value: WS
  misc_feature: MA Experiment 20001904 PARAMETER Experiment Name: At_Drought_Reproduction_P Parameter: Timepoint (day) Value: 7
  misc_feature: MA Experiment 20001904 PARAMETER Experiment Name: At_Drought_Reproduction_P Parameter: Tissue Value: Rosettes
  misc_feature: MA Experiment 20001904 PARAMETER Experiment Name: At_Drought_Reproduction_P Parameter: Treatment Value: Drought vs. No Drought
  misc_feature: MA Experiment ID: 20001905 Result: Up-regulated in Transcription
  misc_feature: MA Experiment 20001905 PARAMETER Experiment Name: At_Drought_Reproduction_P Parameter: Age (day) Value: 40
  misc_feature: MA Experiment 20001905 PARAMETER Experiment Name: At_Drought_Reproduction_P Parameter: Organism Value: A. thaliana
  misc_feature: MA Experiment 20001905 PARAMETER Experiment Name: At_Drought_Reproduction_P Parameter: Plant Line Value: WS
  misc_feature: MA Experiment 20001905 PARAMETER Experiment Name: At_Drought_Reproduction_P Parameter: Timepoint (day) Value: 10
  misc_feature: MA Experiment 20001905 PARAMETER Experiment Name: At_Drought_Reproduction_P Parameter: Tissue Value: Rosettes
  misc_feature: MA Experiment 20001905 PARAMETER Experiment Name: At_Drought_Reproduction_P Parameter: Treatment Value: Drought vs. No Drought
accattcataaacacacaccgagagaaaatcagaaattaaattagagagagagcagagtgaatcaaaacttcaacttcacccaaaaagatgttcggagaacttagggatctgctcaccggcggcggaaatgagacgacgacgaagaaggtgaaaggaacggtggttctgatgaagaagaacgtcctcgatttcaacgatttcaatgcttcgtttctcgatcgtcttcatgaatttctcggaaacaaaatcactcttcgtcttgtaagctctgatgttactgattcagaaaacggttctaaaggcaaactagggaaggctgctcacttggaggattggatcacaacaatcacgtcgttaaccgcaggcgaatccgctttcaaggtcacgttcgattacgaaaccgatttcggttaccctggagcattcttgatcagaaacagccatttcagtgagtttcttctcaaaagtctcacacttgaagacgttccaggccatggcagagtccattacatctgtaattcttggatttaccctgctaaacactacactacagaccgagtcttcttctccaacaagacttatcttccacatgaaacaccagcgacgctgctcaagtatagagaagaagagctagtgagtttgagaggaaccggcgaaggagagcttaaggaatgggacagagtatatgactatgcttactacaatgatttaggcgtcccaccaaagaacccacggcctgtacttggagggacacaggagtatccttacccaagaagaggaagaaccgggcggaaaccaactaaagaagatcctcaaaccgagagcaggctaccgatcacatcgagcctagacatatatgttccacgagatgagagatttggacacttgaagatgtctgatttccttgcttatgctctaaaagcgattgctcagttcatccaacctgcacttgaggctgtattcgacgatactcctaaagagtttgattcttttgaagatgttcttaagatctatgaagaaggaatcgatctaccaaaccaagctttgattgatagtatcgttaagaatataccgcttgagatgttaaaggagatattcagaacagatggccagaaattccttaagtttccagtgcctcaggtcatcaaagaggacaaaactgcatggagaacagatgaggaatttgctagagaaatgttggctggactaaaccctgttgttattcaacttcttaaggagtttcctccaaagagtaagcttgacagtgaatcatacggtaaccagaacagtacaatcactaaaagccacatagaacacaatttggatggactcactgttgaagaggctctggagaaggagaggttgtttatattagaccaccatgacacactgatgccatacttgggacgcgtaaacaccaccacgaccaagacttatgcaagcaggacacttctgttcttgaaagatgatgggaccttgaagccgttggtgatagagctgagcttgcctcatcctaatggagacaaatttggagcagtgagtgaagtatatacgcctggtgaaggtgtctacgactcgctatggcagttggctaaggcttttgtcggtgtaaatgactccggaaatcatcagcttattagccactggatgcaaacacacgcatcgattgaaccgtttgtgattgccacaaacagacagctgagtgttcttcacccggtctttaagctccttgaacctcacttccgtgatacgatgaatatcaatgcacttgctaggcaaatcttgatcaatggtggtggtatatttgaaatcactgtgtttccttctaaatacgccatggagatgtcatctttcatttacaaaaaccactggaccttccctgaccaagcattaccagcagaacttaaaaagagagggatggccgttgaggatccagaagcaccacacggattacgtctgaggataaaagactatccttacgcagtggatgggcttgaggtttggtatgctattgaatcatgggtccgagactacattttcttgttctacaagatagaggaggatatccaaaccgacacagagctccaagcctggtggaaggaggtgcgcgaggaaggtcatggagacaaaaagtcagaaccatggtggcctaaaatgcaaacccgtgaagaacttgttgagtcttgcaccatcattatttgggtggcttctgctcttcatgcagctgttaacttcggacagtatccagttgctgggtacctcccaaacagaccgactataagccgtcagtacatgccaaaggaaaacactccagagtttgaagaacttgagaagaatcctgataaagtgtttttgaagaccatcacagctcagcttcagacacttctagggatatctctgattgagattctctctactcattctagcgacgaggtctatttgggacagagagattctaaagaatgggcggctgagaaagaagcgttggaggcgttcgagaagtttggagagaaagtaaaggagattgagaagaacattgatgagaggaacgacgacgagactctcaagaacaggactggtttggttaagatgccatacactttattgtttccgagcagtgaaggcggagtcaccggcaggggaattccaaatagcgtctctatctgaaacaactctcgcttcagaattgtgtcagagtcacgtgttgttctatatcccatggtttacttgttctacaagttataaactttgattattgttataataaacatcagaataaagcaagtctatacatat

SEQ ID NO: 79808 - protein, 859 aa, Arabidopsis thaliana [sequence omitted]

SEQ ID NO: 79809 - protein, 832 aa, Arabidopsis thaliana
  peptide (1)..(832): Ceres Seq. ID no. 12653319
  misc_feature (27)..(132): Pfam Name: PLAT/LH2 domain Pfam Description: PLAT/LH2 domain
  misc_feature (1)..(832): Homolog of NCBI NO: 30686619 NR Description: lipoxygenase (LOX), putative [Arabidopsis
  misc_feature (1)..(832): Homolog of NCBI NO: 31126788 NR Description: lipoxygenase L-2; lipoxygenase [Oryza sativa
  misc_feature (1)..(831): Homolog of NCBI NO: 14589309 NR Description: lipoxygenase [Sesbania rostrata]
  misc_feature (1)..(832): Homolog of NCBI NO: 7433167 NR Description: probable lipoxygenase (EC 1.13.11.12) (clone H3)
  misc_feature (1)..(832): Homolog of NCBI NO: 7433165 NR Description: lipoxygenase (EC 1.13.11.12) loxD - tomato
  misc_feature (1)..(832): Homolog of NCBI NO: 15218506 NR Description: putative lipoxygenase; protein id: At1g72520.1, by cDNA: gi_15810254, supported by cDNA: gi_20259578 [Arabidopsis >gi|25285677|pir||E96749 probable lipoxygenase T10D10.1
  misc_feature (1)..(832): Homolog of NCBI NO: 6002055 NR Description: lipoxygenase [Arabidopsis thaliana]
  misc_feature (1)..(832): Homolog of NCBI NO: 9665131 NR Description: lipoxygenase [Arabidopsis thaliana]
  misc_feature (1)..(832): Homolog of NCBI NO: 18394479 NR Description: lipoxygenase; protein id: At1g17420.1, supported cDNA: gi_19715629 [Arabidopsis thaliana] F1L3.11 [Arabidopsis thaliana] >gi|19715630|gb|AAL91636.1|
  misc_feature (1)..(832): Homolog of NCBI NO: 7433160 NR Description: probable lipoxygenase (EC 1.13.11.12) CPRD46,
MKKNVLDFNDFNASFLDRLHEFLGNKITLRLVSSDVTDSENGSKGKLGKAAHLEDWITTITSLTAGESAFKVTFDYETDFGYPGAFLIRNSHFSEFLLKSLTLEDVPGHGRVHYICNSWIYPAKHYTTDRVFFSNKTYLPHETPATLLKYREEELVSLRGTGEGELKEWDRVYDYAYYNDLGVPPKNPRPVLGGTQEYPYPRRGRTGRKPTKEDPQTESRLPITSSLDIYVPRDERFGHLKMSDFLAYALKAIAQFIQPALEAVFDDTPKEFDSFEDVLKIYEEGIDLPNQALIDSIVKNIPLEMLKEIFRTDGQKFLKFPVPQVIKEDKTAWRTDEEFAREMLAGLNPVVIQLLKEFPPKSKLDSESYGNQNSTITKSHIEHNLDGLTVEEALEKERLFILDHHDTLMPYLGRVNTTTTKTYASRTLLFLKDDGTLKPLVIELSLPHPNGDKFGAVSEVYTPGEGVYDSLWQLAKAFVGVNDSGNHQLISHWMQTHASIEPFVIATNRQLSVLHPVFKLLEPHFRDTMNINALARQILINGGGIFEITVFPSKYAMEMSSFIYKNHWTFPDQALPAELKKRGMAVEDPEAPHGLRLRIKDYPYAVDGLEVWYAIESWVRDYIFLFYKIEEDIQTDTELQAWWKEVREEGHGDKKSEPWWPKMQTREELVESCTIIIWVASALHAAVNFGQYPVAGYLPNRPTISRQYMPKENTPEFEELEKNPDKVFLKTITAQLQTLLGISLIEILSTHSSDEVYLGQRDSKEWAAEKEALEAFEKFGEKVKEIEKNIDERNDDETLKNRTGLVKMPYTLLFPSSEGGVTGRGIPNSVSI

SEQ ID NO: 79810 - protein, 591 aa, Arabidopsis thaliana
  peptide (1)..(591): Ceres Seq. ID no. 12653320
  misc_feature (1)..(591): Homolog of NCBI NO: 30686619 NR Description: lipoxygenase (LOX), putative [Arabidopsis
  misc_feature (1)..(591): Homolog of NCBI NO: 31126788 NR Description: lipoxygenase L-2; lipoxygenase [Oryza sativa
  misc_feature (1)..(590): Homolog of NCBI NO: 14589309 NR Description: lipoxygenase [Sesbania rostrata]
  misc_feature (1)..(591): Homolog of NCBI NO: 7433167 NR Description: probable lipoxygenase (EC 1.13.11.12) (clone H3)
  misc_feature (1)..(591): Homolog of NCBI NO: 7433165 NR Description: lipoxygenase (EC 1.13.11.12) loxD - tomato
  misc_feature (1)..(591): Homolog of NCBI NO: 15218506 NR Description: putative lipoxygenase; protein id: At1g72520.1, by cDNA: gi_15810254, supported by cDNA: gi_20259578 [Arabidopsis >gi|25285677|pir||E96749 probable lipoxygenase T10D10.1
  misc_feature (1)..(591): Homolog of NCBI NO: 6002055 NR Description: lipoxygenase [Arabidopsis thaliana]
  misc_feature (1)..(591): Homolog of NCBI NO: 9665131 NR Description: lipoxygenase [Arabidopsis thaliana]
  misc_feature (1)..(591): Homolog of NCBI NO: 18394479 NR Description: lipoxygenase; protein id: At1g17420.1, supported cDNA: gi_19715629 [Arabidopsis thaliana] F1L3.11 [Arabidopsis thaliana] >gi|19715630|gb|AAL91636.1|
  misc_feature (1)..(591): Homolog of NCBI NO: 7433160 NR Description: probable lipoxygenase (EC 1.13.11.12) CPRD46,
MSDFLAYALKAIAQFIQPALEAVFDDTPKEFDSFEDVLKIYEEGIDLPNQALIDSIVKNIPLEMLKEIFRTDGQKFLKFPVPQVIKEDKTAWRTDEEFAREMLAGLNPVVIQLLKEFPPKSKLDSESYGNQNSTITKSHIEHNLDGLTVEEALEKERLFILDHHDTLMPYLGRVNTTTTKTYASRTLLFLKDDGTLKPLVIELSLPHPNGDKFGAVSEVYTPGEGVYDSLWQLAKAFVGVNDSGNHQLISHWMQTHASIEPFVIATNRQLSVLHPVFKLLEPHFRDTMNINALARQILINGGGIFEITVFPSKYAMEMSSFIYKNHWTFPDQALPAELKKRGMAVEDPEAPHGLRLRIKDYPYAVDGLEVWYAIESWVRDYIFLFYKIEEDIQTDTELQAWWKEVREEGHGDKKSEPWWPKMQTREELVESCTIIIWVASALHAAVNFGQYPVAGYLPNRPTISRQYMPKENTPEFEELEKNPDKVFLKTITAQLQTLLGISLIEILSTHSSDEVYLGQRDSKEWAAEKEALEAFEKFGEKVKEIEKNIDERNDDETLKNRTGLVKMPYTLLFPSSEGGVTGRGIPNSVSI

SEQ ID NO: 79811 - DNA, 2779 bp, Arabidopsis thaliana
  misc_feature (1)..(2779): Ceres Seq. ID no. 12653325
  misc_feature: MA Experiment ID: 20000179 Result: Down-regulated in Transcription
  misc_feature: MA Experiment 20000179 PARAMETER Experiment Name: At_Germinating_Seeds_P Parameter: Age (hr) Value: 6 vs. 0
  misc_feature: MA Experiment 20000179 PARAMETER Experiment Name: At_Germinating_Seeds_P Parameter: Tissue Value: Germinating Seeds
  misc_feature: MA Experiment ID: 20000180 Result: Down-regulated in Transcription
  misc_feature: MA Experiment 20000180 PARAMETER Experiment Name: At_Germinating_Seeds_P Parameter: Age (hr) Value: 24 vs. 0
  misc_feature: MA Experiment 20000180 PARAMETER Experiment Name: At_Germinating_Seeds_P Parameter: Tissue Value: Germinating Seeds
  misc_feature: MA Experiment ID: 20000227 Result: Up-regulated in Transcription
  misc_feature: MA Experiment 20000227 PARAMETER Experiment Name: At_Root-Tips-vs-Tops_P Parameter: Tissue Value: Root Tips vs. Root Tops
  misc_feature: MA Experiment ID: 20001556 Result: Up-regulated in Transcription
  misc_feature: MA Experiment 20001556 PARAMETER Experiment Name: At_Drought_Soil_Dry_P Parameter: Age (day) Value: 26
  misc_feature: MA Experiment 20001556 PARAMETER Experiment Name: At_Drought_Soil_Dry_P Parameter: Organism Value: A. thaliana
  misc_feature: MA Experiment 20001556 PARAMETER Experiment Name: At_Drought_Soil_Dry_P Parameter: Plant Line Value: WS
  misc_feature: MA Experiment 20001556 PARAMETER Experiment Name: At_Drought_Soil_Dry_P Parameter: Post Timepoint (hr) Value: None
  misc_feature: MA Experiment 20001556 PARAMETER Experiment Name: At_Drought_Soil_Dry_P Parameter: Post-Treatment Value: None
  misc_feature: MA Experiment 20001556 PARAMETER Experiment Name: At_Drought_Soil_Dry_P Parameter: Timepoint (day) Value: 12
  misc_feature: MA Experiment 20001556 PARAMETER Experiment Name: At_Drought_Soil_Dry_P Parameter: Treatment Value: Drought vs. No Drought
  misc_feature: MA Experiment ID: 20001557 Result: Up-regulated in Transcription
  misc_feature: MA Experiment 20001557 PARAMETER Experiment Name: At_Drought_Soil_Dry_P Parameter: Age (day) Value: 27
  misc_feature: MA Experiment 20001557 PARAMETER Experiment Name: At_Drought_Soil_Dry_P Parameter: Organism Value: A. thaliana
  misc_feature: MA Experiment 20001557 PARAMETER Experiment Name: At_Drought_Soil_Dry_P Parameter: Plant Line Value: WS
  misc_feature: MA Experiment 20001557 PARAMETER Experiment Name: At_Drought_Soil_Dry_P Parameter: Post Timepoint (hr) Value: 3
  misc_feature: MA Experiment 20001557 PARAMETER Experiment Name: At_Drought_Soil_Dry_P Parameter: Post-Treatment Value: Re-Water vs. No Drought
  misc_feature: MA Experiment 20001557 PARAMETER Experiment Name: At_Drought_Soil_Dry_P Parameter: Timepoint (day) Value: 13
  misc_feature: MA Experiment 20001557 PARAMETER Experiment Name: At_Drought_Soil_Dry_P Parameter: Treatment Value: Drought vs. No Drought
ggctgcttctgcaacctaaaaatggctgcttcaatctctcttcttctcatcaaacgcatctctcacttgcacataaaccctaaaagccaccgactttttcaaccatttctcactaaatcactctctacttctccacaaagcaacactgaatcaacccatgaacctaatcacaaaccctcttctctatcttctcgtcttagcttcgttttcgatcaaatcgatgctattgagaaacgtcactctgagaaagacgaaacccttgagcgtattcgtgcttggcgtcaatctaaacagacgcatcagttaaaaactcctccttctgctccacaacaagatccggatcttagagaagtcgaatccgttgtgtctaatgataaattggattcttgtgttgtgcttgagccgattcagattgattctggtgagttgagtaaggagaaaggtgttattgagttggtccatccatggccggagtggatggagttgatggagagattggtgaagcagaattactttgatcataggagagaaagagatgatgatgatatggtgaatagtttggggattgatgtgtctagtgttggattaggtgaagatgagaatgttggagttgctttgtttcaggattttagagctgttcaaaatgcttgtagcaattttggtaaagaccgtttcgatattctaaggtcattgtcgagaaatgacattcaaatcctagtcggtcatggatgtccagcgactgatagaaaagtggttttctcaggaaaactactgaggaagcgtgttcatcttgatgaaggagatgtctgcagttcctgcagcttgaggaactcatgcgaaaaggcatttttgttgacaaacaaagaggatgaggctcgaaccattgaccttatgcgcattttgttcacctatggttttgacccattgaatggaacagtggccaacaaaagtctcctgaagaaaaagtctgttaagtctgtggtgcgtaaactgctgcatgagattgtcaagttaagcgctgtaccaatagatcctaatctcactccaccagttatcaaaagagcgccccctaaagtcaagcagccaccgccaactcctaaacgacgtgttggccgtgatgatgttgagatgaagaaaggagattggctatgcccaaagtgcgatttcatgaactttgcaaagaacacgatttgcttacagtgtgatgcaaagaggccaaagagacagctccttccaggagaatgggaatgccctgaatgcaacttcttaaactatagaagaaacatggcatgttttcattgtgattgcaagcgtccagctgatgctatcctagagaacaaaccacaagaaacttatcgcttcactgaagcacaaacagacagggttgtgaaacgggatgatgtttccaatgcatggaactttgattttgatgacgatgaatcagacggagcagaagttgctgcttttgaatatgcggattccagtaaaaagaatgaaaaccttctccgggagggtttgagagatcctgaagaagaatttggtaatcttcctccaggagcccgagaaagttctgagtttggcagaagcagaagacctggagttgggtttgatgattttgacgatgaagatgacattgatagctatgaaatagacgaatctaaagagagagatgtcccagtggaaggagctcgatcttcttttgcttctgacgagttctcagaggatgaaaagtttccagaatcaaagtctggttttaatgcacacagaggaggaagttcaaactttcacaacagtggaaagaagcatggaaacagtaagggaggtttctctagggatgatgagctcggttttagttcagatgatgaggtttccgccaatcccaggtggaagtcaagccatgtggcttcgacccagagaggtccaccttcgagaaaacttacttttgggtcagacgaagaatttgggctcgattctgatatggaggatgatagtcccaggtccggtttgaggcgtggacaaagaaacaacggtgcgagaggagggttcaagggaaaacgaagctcctattcagcttcagaatctgatgatgacatggatgatcaagagtacagagggtcaagtttctctggtaatagatcgagaggaagtagaggaagaatgagaggtggaggacgaggtggtttcaatgataattttgcctctgatagctacaggggatcaaatggctcctcggctaatagatcaagagggagaggaggaagaataggaagcagaaggagtagttttgatagtgacgatgaagattacagagggtcaagttcctcagctagtagatcaagaggtaacagagaagatagtggcggggttgggggaagaatgggaagcagaagaggcggttttgatgatgagtttgatagaaagagtagccgaggacgcggttcaggtagtttcaggggatctaacagaggaggaagaggaggaggaggaggaggaaaccggcatgggcatagtgatggtaaagacacagacgttggtgatttcagaaacagtcgaagagttatcgagagatagagatgtaaactggtctcatcagatatttactttatacttttatccagtatccaattggctatagtgcattagttcagtcataatatcaatttctgttattttactgtctcgtgcctagactcatgagagttttggaggtgtaaaacaaatttatggattcgtgagctcatatgcctcgaccaagctatctactatctagggaccgttt

SEQ ID NO: 79812 - protein, 856 aa, Arabidopsis thaliana
  peptide (1)..(856): Ceres Seq. ID no. 12653326
  misc_feature (411)..(440): Pfam Name: Zn-finger in Ran binding protein and others Pfam Description: Zn-finger in Ran binding protein and others
  misc_feature (150)..(752): Homolog of NCBI NO: 34393925 NR Description: unknown protein [Oryza sativa (japonica
  misc_feature (154)..(485): Homolog of NCBI NO: 13702809 NR Description: putative ARP protein [Oryza sativa]
  misc_feature (208)..(586): Homolog of NCBI NO: 13324787 NR Description: hypothetical protein [Oryza sativa]
  misc_feature (141)..(173): Homolog of NCBI NO: 13324787 NR Description: hypothetical protein [Oryza sativa]
  misc_feature (182)..(483): Homolog of NCBI NO: 25372841 NR Description: hypothetical protein F5A18.17 [imported] -
  misc_feature (154)..(173): Homolog of NCBI NO: 25372841 NR Description: hypothetical protein F5A18.17 [imported] -
  misc_feature (182)..(437): Homolog of NCBI NO: 18409643 NR Description: expressed protein; protein id: At1g70650.1,
  misc_feature (154)..(173): Homolog of NCBI NO: 18409643 NR Description: expressed protein; protein id: At1g70650.1,
  misc_feature (182)..(437): Homolog of NCBI NO: 21593408 NR Description: unknown [Arabidopsis thaliana]
  misc_feature (140)..(173): Homolog of NCBI NO: 21593408 NR Description: unknown [Arabidopsis thaliana]
GCFCNLKMAASISLLLIKRISHLHINPKSHRLFQPFLTKSLSTSPQSNTESTHEPNHKPSSLSSRLSFVFDQIDAIEKRHSEKDETLERIRAWRQSKQTHQLKTPPSAPQQDPDLREVESVVSNDKLDSCVVLEPIQIDSGELSKEKGVIELVHPWPEWMELMERLVKQNYFDHRRERDDDDMVNSLGIDVSSVGLGEDENVGVALFQDFRAVQNACSNFGKDRFDILRSLSRNDIQILVGHGCPATDRKVVFSGKLLRKRVHLDEGDVCSSCSLRNSCEKAFLLTNKEDEARTIDLMRILFTYGFDPLNGTVANKSLLKKKSVKSVVRKLLHEIVKLSAVPIDPNLTPPVIKRAPPKVKQPPPTPKRRVGRDDVEMKKGDWLCPKCDFMNFAKNTICLQCDAKRPKRQLLPGEWECPECNFLNYRRNMACFHCDCKRPADAILENKPQETYRFTEAQTDRVVKRDDVSNAWNFDFDDDESDGAEVAAFEYADSSKKNENLLREGLRDPEEEFGNLPPGARESSEFGRSRRPGVGFDDFDDEDDIDSYEIDESKERDVPVEGARSSFASDEFSEDEKFPESKSGFNAHRGGSSNFHNSGKKHGNSKGGFSRDDELGFSSDDEVSANPRWKSSHVASTQRGPPSRKLTFGSDEEFGLDSDMEDDSPRSGLRRGQRNNGARGGFKGKRSSYSASESDDDMDDQEYRGSSFSGNRSRGSRGRMRGGGRGGFNDNFASDSYRGSNGSSANRSRGRGGRIGSRRSSFDSDDEDYRGSSSSASRSRGNREDSGGVGGRMGSRRGGFDDEFDRKSSRGRGSGSFRGSNRGGRGGGGGGNRHGHSDGKDTDVGDFRNSRRVIER

SEQ ID NO: 79813 - protein, 849 aa, Arabidopsis thaliana
  peptide (1)..(849): Ceres Seq. ID no. 12653327
  misc_feature (404)..(433): Pfam Name: Zn-finger in Ran binding protein and others Pfam Description: Zn-finger in Ran binding protein and others
  misc_feature (143)..(745): Homolog of NCBI NO: 34393925 NR Description: unknown protein [Oryza sativa (japonica
  misc_feature (147)..(478): Homolog of NCBI NO: 13702809 NR Description: putative ARP protein [Oryza sativa]
  misc_feature (201)..(579): Homolog of NCBI NO: 13324787 NR Description: hypothetical protein [Oryza sativa]
  misc_feature (134)..(166): Homolog of NCBI NO: 13324787 NR Description: hypothetical protein [Oryza sativa]
  misc_feature (175)..(476): Homolog of NCBI NO: 25372841 NR Description: hypothetical protein F5A18.17 [imported] -
  misc_feature (147)..(166): Homolog of NCBI NO: 25372841 NR Description: hypothetical protein F5A18.17 [imported] -
  misc_feature (175)..(430): Homolog of NCBI NO: 18409643 NR Description: expressed protein; protein id: At1g70650.1,
  misc_feature (147)..(166): Homolog of NCBI NO: 18409643 NR Description: expressed protein; protein id: At1g70650.1,
  misc_feature (175)..(430): Homolog of NCBI NO: 21593408 NR Description: unknown [Arabidopsis thaliana]
  misc_feature (133)..(166): Homolog of NCBI NO: 21593408 NR Description: unknown [Arabidopsis thaliana]
MAASISLLLIKRISHLHINPKSHRLFQPFLTKSLSTSPQSNTESTHEPNHKPSSLSSRLSFVFDQIDAIEKRHSEKDETLERIRAWRQSKQTHQLKTPPSAPQQDPDLREVESVVSNDKLDSCVVLEPIQIDSGELSKEKGVIELVHPWPEWMELMERLVKQNYFDHRRERDDDDMVNSLGIDVSSVGLGEDENVGVALFQDFRAVQNACSNFGKDRFDILRSLSRNDIQILVGHGCPATDRKVVFSGKLLRKRVHLDEGDVCSSCSLRNSCEKAFLLTNKEDEARTIDLMRILFTYGFDPLNGTVANKSLLKKKSVKSVVRKLLHEIVKLSAVPIDPNLTPPVIKRAPPKVKQPPPTPKRRVGRDDVEMKKGDWLCPKCDFMNFAKNTICLQCDAKRPKRQLLPGEWECPECNFLNYRRNMACFHCDCKRPADAILENKPQETYRFTEAQTDRVVKRDDVSNAWNFDFDDDESDGAEVAAFEYADSSKKNENLLREGLRDPEEEFGNLPPGARESSEFGRSRRPGVGFDDFDDEDDIDSYEIDESKERDVPVEGARSSFASDEFSEDEKFPESKSGFNAHRGGSSNFHNSGKKHGNSKGGFSRDDELGFSSDDEVSANPRWKSSHVASTQRGPPSRKLTFGSDEEFGLDSDMEDDSPRSGLRRGQRNNGARGGFKGKRSSYSASESDDDMDDQEYRGSSFSGNRSRGSRGRMRGGGRGGFNDNFASDSYRGSNGSSANRSRGRGGRIGSRRSSFDSDDEDYRGSSSSASRSRGNREDSGGVGGRMGSRRGGFDDEFDRKSSRGRGSGSFRGSNRGGRGGGGGGNRHGHSDGKDTDVGDFRNSRRVIER

SEQ ID NO: 79814 - protein, 697 aa, Arabidopsis thaliana
  peptide (1)..(697): Ceres Seq. ID no. 12653328
  misc_feature (252)..(281): Pfam Name: Zn-finger in Ran binding protein and others Pfam Description: Zn-finger in Ran binding protein and others
  misc_feature (1)..(593): Homolog of NCBI NO: 34393925 NR Description: unknown protein [Oryza sativa (japonica
  misc_feature (1)..(326): Homolog of NCBI NO: 13702809 NR Description: putative ARP protein [Oryza sativa]
  misc_feature (49)..(427): Homolog of NCBI NO: 13324787 NR Description: hypothetical protein [Oryza sativa]
  misc_feature (1)..(14): Homolog of NCBI NO: 13324787 NR Description: hypothetical protein [Oryza sativa]
  misc_feature (23)..(324): Homolog of NCBI NO: 25372841 NR Description: hypothetical protein F5A18.17 [imported] -
  misc_feature (1)..(14): Homolog of NCBI NO: 25372841 NR Description: hypothetical protein F5A18.17 [imported] -
  misc_feature (23)..(278): Homolog of NCBI NO: 18409643 NR Description: expressed protein; protein id: At1g70650.1,
  misc_feature (1)..(14): Homolog of NCBI NO: 18409643 NR Description: expressed protein; protein id: At1g70650.1,
  misc_feature (23)..(278): Homolog of NCBI NO: 21593408 NR Description: unknown [Arabidopsis thaliana]
  misc_feature (1)..(14): Homolog of NCBI NO: 21593408 NR Description: unknown [Arabidopsis thaliana]
MELMERLVKQNYFDHRRERDDDDMVNSLGIDVSSVGLGEDENVGVALFQDFRAVQNACSNFGKDRFDILRSLSRNDIQILVGHGCPATDRKVVFSGKLLRKRVHLDEGDVCSSCSLRNSCEKAFLLTNKEDEARTIDLMRILFTYGFDPLNGTVANKSLLKKKSVKSVVRKLLHEIVKLSAVPIDPNLTPPVIKRAPPKVKQPPPTPKRRVGRDDVEMKKGDWLCPKCDFMNFAKNTICLQCDAKRPKRQLLPGEWECPECNFLNYRRNMACFHCDCKRPADAILENKPQETYRFTEAQTDRVVKRDDVSNAWNFDFDDDESDGAEVAAFEYADSSKKNENLLREGLRDPEEEFGNLPPGARESSEFGRSRRPGVGFDDFDDEDDIDSYEIDESKERDVPVEGARSSFASDEFSEDEKFPESKSGFNAHRGGSSNFHNSGKKHGNSKGGFSRDDELGFSSDDEVSANPRWKSSHVASTQRGPPSRKLTFGSDEEFGLDSDMEDDSPRSGLRRGQRNNGARGGFKGKRSSYSASESDDDMDDQEYRGSSFSGNRSRGSRGRMRGGGRGGFNDNFASDSYRGSNGSSANRSRGRGGRIGSRRSSFDSDDEDYRGSSSSASRSRGNREDSGGVGGRMGSRRGGFDDEFDRKSSRGRGSGSFRGSNRGGRGGGGGGNRHGHSDGKDTDVGDFRNSRRVIER

SEQ ID NO: 79815 - DNA, 1825 bp, Arabidopsis thaliana
  misc_feature (1)..(1825): Ceres Seq. ID no. 12653344
  misc_feature: MA Experiment ID: 20000184 Result: Down-regulated in Transcription
  misc_feature: MA Experiment 20000184 PARAMETER Experiment Name: At_Shoots__P Parameter: Age (day) Value: 7
  misc_feature: MA Experiment 20000184 PARAMETER Experiment Name: At_Shoots__P Parameter: Tissue Value: Shoots vs. Whole Plant
acgagctttgtctcgtctctcttctggcactctcacctttcgtcgtcccaatttgtaaaaccctaacgactagatttcagtacctgcaactcctttttctcaactttccgatcatatttctcaatcggagaaactgattcgacgaacatcatgagtcgctacgatagccggaccggcgattccacctcgtaccgtgaccgtcgaagtgactcagggtttggtgggacttcatcatatggaagctcaggtagtcatacatctagcaaaaaggataacgatggcaatgaatctccaaggaagctagatttagatggtttgactccttttgagaagaatttttatgtcgagtctcccgctgtggcggctatgacagacacagaagtagaggaatatcgaaagctaagggaaattactgttgaaggcaaagatattccaaaacctgtcaagagttttcgtgatgttggctttcctgattatgttttggaagaggttaagaaggctggttttactgaacctacgcctatacaatctcaggggtggccaatggctatgaagggacgtgatcttatcggcattgctgaaactggttctggaaagactctttcttacttactacctgctattgtccatgttaatgcccaaccaatgttagctcatggtgacggcccaatcgtcttggttcttgctcccactcgtgaactggctgtgcagatacagcaagaggcatctaaatttggttcatcctcaaaaattaagaccacttgcatttatggtggggttccaaaagggcctcaagtgcgtgatctccagaaaggtgtggagatcgttatagctactcctgggaggttaatagacatgatggagtcgaacaacacaaacctacgaagggttacttatcttgttttggatgaggctgatcgaatgcttgatatggggtttgaccctcagatccggaaaattgtttcacatattcggccagaccgtcaaactttgtactggagtgccacttggcctaaggaggtggaacaactatcgaagaagtttctttataacccatacaaagtgataataggatcttctgatttgaaagctaaccgtgcaattcgtcaaattgttgatgtcatttccgaaagccaaaagtataacaagttggtgaaactgcttgaggacataatggatggaagcagaattcttgtcttcctcgatacaaaaaagggctgtgaccaaatcactcgtcagcttcgcatggatggttggcctgctttgtcaatacatggagataaaagtcaagcggaaagagattgggttctctcggagtttagatcaggcaaaagccctataatgactgctacagacgttgcagctcgtggattagacgtgaaagatgtgaagtatgtgataaactatgacttccctggatcactggaggattatgttcacaggattggacgaacaggtagagccggggctaaaggaacagcttacactttcttcacagttgcaaatgcgagattcgccaaggaacttaccaacatactacaagaagctggacagaaagtgagtcccgaattggcttcaatgggtcgcagtaccgctcctcctcctccagggcttggaggattcagagaccgtgggagcagaagagggtggagctgatcactgattttgtatcttgttatggctttagggctcagtgattttctttctccatttatatctcttgtttactattttgttcctcaaacatttgacatttacagcaaaacattaaacatgtaagataacatttgatctgaatccaaattaattagagtaagataaaccg

SEQ ID NO: 79816 - protein, 501 aa, Arabidopsis thaliana
  peptide (1)..(501): Ceres Seq. ID no. 12653345
  misc_feature (112)..(321): Pfam Name: DEAD/DEAH box helicase Pfam Description: DEAD/DEAH box helicase
  misc_feature (1)..(501): Homolog of NCBI NO: 15221998 NR Description: ethylene-responsive DEAD/DEAH box RNA helicase putative; protein id: At1g55150.1, supported by cDNA: gi_17065337
  misc_feature (1)..(501): Homolog of NCBI NO: 34903586 NR Description: putative ethylene-responsive RNA helicase [Oryza
  misc_feature (1)..(329): Homolog of NCBI NO: 5669638 NR Description: ethylene-responsive RNA helicase [Lycopersicon
  misc_feature (329)..(500): Homolog of NCBI NO: 5669638 NR Description: ethylene-responsive RNA helicase [Lycopersicon
  misc_feature (9)..(499): Homolog of NCBI NO: 10177293 NR Description: ATP-dependent RNA helicase-like protein
  misc_feature (1)..(499): Homolog of NCBI NO: 19113315 NR Description: p68-like protein. [Schizosaccharomyces pombe]
  misc_feature (1)..(499): Homolog of NCBI NO: 5270 NR Description: p68 protein [Schizosaccharomyces pombe]
  misc_feature (1)..(500): Homolog of NCBI NO: 6324217 NR Description: ATP-dependent RNA helicase of DEAD box family;
  misc_feature (14)..(500): Homolog of NCBI NO: 28838521 NR Description: Similar to DEAD/H (Asp-Glu-Ala-Asp/His) box
  misc_feature (15)..(500): Homolog of NCBI NO: 8163810 NR Description: p68 RNA helicase [Xenopus laevis]
MSRYDSRTGDSTSYRDRRSDSGFGGTSSYGSSGSHTSSKKDNDGNESPRKLDLDGLTPFEKNFYVESPAVAAMTDTEVEEYRKLREITVEGKDIPKPVKSFRDVGFPDYVLEEVKKAGFTEPTPIQSQGWPMAMKGRDLIGIAETGSGKTLSYLLPAIVHVNAQPMLAHGDGPIVLVLAPTRELAVQIQQEASKFGSSSKIKTTCIYGGVPKGPQVRDLQKGVEIVIATPGRLIDMMESNNTNLRRVTYLVLDEADRMLDMGFDPQIRKIVSHIRPDRQTLYWSATWPKEVEQLSKKFLYNPYKVIIGSSDLKANRAIRQIVDVISESQKYNKLVKLLEDIMDGSRILVFLDTKKGCDQITRQLRMDGWPALSIHGDKSQAERDWVLSEFRSGKSPIMTATDVAARGLDVKDVKYVINYDFPGSLEDYVHRIGRTGRAGAKGTAYTFFTVANARFAKELTNILQEAGQKVSPELASMGRSTAPPPPGLGGFRDRGSRRGWS

SEQ ID NO: 79817 - protein, 429 aa, Arabidopsis thaliana
  peptide (1)..(429): Ceres Seq. ID no. 12653346
  misc_feature (40)..(249): Pfam Name: DEAD/DEAH box helicase Pfam Description: DEAD/DEAH box helicase
  misc_feature (1)..(429): Homolog of NCBI NO: 15221998 NR Description: ethylene-responsive DEAD/DEAH box RNA helicase putative; protein id: At1g55150.1, supported by cDNA: gi_17065337
  misc_feature (1)..(429): Homolog of NCBI NO: 34903586 NR Description: putative ethylene-responsive RNA helicase [Oryza
  misc_feature (1)..(257): Homolog of NCBI NO: 5669638 NR Description: ethylene-responsive RNA helicase [Lycopersicon
  misc_feature (257)..(428): Homolog of NCBI NO: 5669638 NR Description: ethylene-responsive RNA helicase [Lycopersicon
  misc_feature (1)..(427): Homolog of NCBI NO: 10177293 NR Description: ATP-dependent RNA helicase-like protein
  misc_feature (1)..(427): Homolog of NCBI NO: 19113315 NR Description: p68-like protein. [Schizosaccharomyces pombe]
  misc_feature (1)..(427): Homolog of NCBI NO: 5270 NR Description: p68 protein [Schizosaccharomyces pombe]
  misc_feature (1)..(428): Homolog of NCBI NO: 6324217 NR Description: ATP-dependent RNA helicase of DEAD box family;
  misc_feature (1)..(428): Homolog of NCBI NO: 28838521 NR Description: Similar to DEAD/H (Asp-Glu-Ala-Asp/His) box
  misc_feature (1)..(428): Homolog of NCBI NO: 8163810 NR Description: p68 RNA helicase [Xenopus laevis]
MTDTEVEEYRKLREITVEGKDIPKPVKSFRDVGFPDYVLEEVKKAGFTEPTPIQSQGWPMAMKGRDLIGIAETGSGKTLSYLLPAIVHVNAQPMLAHGDGPIVLVLAPTRELAVQIQQEASKFGSSSKIKTTCIYGGVPKGPQVRDLQKGVEIVIATPGRLIDMMESNNTNLRRVTYLVLDEADRMLDMGFDPQIRKIVSHIRPDRQTLYWSATWPKEVEQLSKKFLYNPYKVIIGSSDLKANRAIRQIVDVISESQKYNKLVKLLEDIMDGSRILVFLDTKKGCDQITRQLRMDGWPALSIHGDKSQAERDWVLSEFRSGKSPIMTATDVAARGLDVKDVKYVINYDFPGSLEDYVHRIGRTGRAGAKGTAYTFFTVANARFAKELTNILQEAGQKVSPELASMGRSTAPPPPGLGGFRDRGSRRGWS

SEQ ID NO: 79818 - protein, 370 aa, Arabidopsis thaliana
  peptide (1)..(370): Ceres Seq. ID no. 12653347
  misc_feature (1)..(190): Pfam Name: DEAD/DEAH box helicase Pfam Description: DEAD/DEAH box helicase
  misc_feature (1)..(370): Homolog of NCBI NO: 15221998 NR Description: ethylene-responsive DEAD/DEAH box RNA helicase putative; protein id: At1g55150.1, supported by cDNA: gi_17065337
  misc_feature (1)..(370): Homolog of NCBI NO: 34903586 NR Description: putative ethylene-responsive RNA helicase [Oryza
  misc_feature (1)..(198): Homolog of NCBI NO: 5669638 NR Description: ethylene-responsive RNA helicase [Lycopersicon
  misc_feature (198)..(369): Homolog of NCBI NO: 5669638 NR Description: ethylene-responsive RNA helicase [Lycopersicon
  misc_feature (1)..(368): Homolog of NCBI NO: 10177293 NR Description: ATP-dependent RNA helicase-like protein
  misc_feature (1)..(368): Homolog of NCBI NO: 19113315 NR Description: p68-like protein. [Schizosaccharomyces pombe]
  misc_feature (1)..(368): Homolog of NCBI NO: 5270 NR Description: p68 protein [Schizosaccharomyces pombe]
  misc_feature (1)..(369): Homolog of NCBI NO: 6324217 NR Description: ATP-dependent RNA helicase of DEAD box family;
  misc_feature (1)..(369): Homolog of NCBI NO: 28838521 NR Description: Similar to DEAD/H (Asp-Glu-Ala-Asp/His) box
  misc_feature (1)..(369): Homolog of NCBI NO: 8163810 NR Description: p68 RNA helicase [Xenopus laevis]
MAMKGRDLIGIAETGSGKTLSYLLPAIVHVNAQPMLAHGDGPIVLVLAPTRELAVQIQQEASKFGSSSKIKTTCIYGGVPKGPQVRDLQKGVEIVIATPGRLIDMMESNNTNLRRVTYLVLDEADRMLDMGFDPQIRKIVSHIRPDRQTLYWSATWPKEVEQLSKKFLYNPYKVIIGSSDLKANRAIRQIVDVISESQKYNKLVKLLEDIMDGSRILVFLDTKKGCDQITRQLRMDGWPALSIHGDKSQAERDWVLSEFRSGKSPIMTATDVAARGLDVKDVKYVINYDFPGSLEDYVHRIGRTGRAGAKGTAYTFFTVANARFAKELTNILQEAGQKVSPELASMGRSTAPPPPGLGGFRDRGSRRGWS

SEQ ID NO: 79819 - DNA, 2027 bp, Arabidopsis thaliana
  misc_feature (1)..(2027): Ceres Seq. ID no. 12653400
  misc_feature: MA Experiment ID: 20000185 Result: Down-regulated in Transcription
  misc_feature: MA Experiment 20000185 PARAMETER Experiment Name: At_Roots__P Parameter: Age (day) Value: 7 vs. 21
  misc_feature: MA Experiment 20000185 PARAMETER Experiment Name: At_Roots__P Parameter: Organism Value: A. thaliana
  misc_feature: MA Experiment 20000185 PARAMETER Experiment Name: At_Roots__P Parameter: Tissue Value: Roots vs. Whole Plant
  misc_feature: MA Experiment ID: 20000211 Result: Up-regulated in Transcription
  misc_feature: MA Experiment 20000211 PARAMETER Experiment Name: At_0.001percent_MeJA__P Parameter: Age (day) Value: 14
  misc_feature: MA Experiment 20000211 PARAMETER Experiment Name: At_0.001percent_MeJA__P Parameter: Organism Value: A. thaliana
  misc_feature: MA Experiment 20000211 PARAMETER Experiment Name: At_0.001percent_MeJA__P Parameter: Plant Line Value: WS
  misc_feature: MA Experiment 20000211 PARAMETER Experiment Name: At_0.001percent_MeJA__P Parameter: Timepoint (hr) Value: 1
  misc_feature: MA Experiment 20000211 PARAMETER Experiment Name: At_0.001percent_MeJA__P Parameter: Tissue Value: Aerial
  misc_feature: MA Experiment 20000211 PARAMETER Experiment Name: At_0.001percent_MeJA__P Parameter: Treatment Value: 0.001percent MeJA vs. No Treatment
  misc_feature: MA Experiment ID: 20000234 Result: Down-regulated in Transcription
  misc_feature: MA Experiment 20000234 PARAMETER Experiment Name: At_Siliques_P Parameter: Age (day) Value: 21
  misc_feature: MA Experiment 20000234 PARAMETER Experiment Name: At_Siliques_P Parameter: Organism Value: A. thaliana
  misc_feature: MA Experiment 20000234 PARAMETER Experiment Name: At_Siliques_P Parameter: Plant Line Value: WS
  misc_feature: MA Experiment 20000234 PARAMETER Experiment Name: At_Siliques_P Parameter: Tissue Value: Less Than 5mm Siliques vs. Whole Plant
  misc_feature: MA Experiment ID: 20000235 Result: Down-regulated in Transcription
  misc_feature: MA Experiment 20000235 PARAMETER Experiment Name: At_Siliques_P Parameter: Age (day) Value: 21
  misc_feature: MA Experiment 20000235 PARAMETER Experiment Name: At_Siliques_P Parameter: Organism Value: A. thaliana
  misc_feature: MA Experiment 20000235 PARAMETER Experiment Name: At_Siliques_P Parameter: Plant Line Value: WS
  misc_feature: MA Experiment 20000235 PARAMETER Experiment Name: At_Siliques_P Parameter: Tissue Value: 5-10mm Siliques vs. Whole Plant
  misc_feature: MA Experiment ID: 20000264 Result: Down-regulated in Transcription
  misc_feature: MA Experiment 20000264 PARAMETER Experiment Name: At_Open_Flower_P Parameter: Age (day) Value: 21
  misc_feature: MA Experiment 20000264 PARAMETER Experiment Name: At_Open_Flower_P Parameter: Plant Line Value: WS
  misc_feature: MA Experiment 20000264 PARAMETER Experiment Name: At_Open_Flower_P Parameter: Tissue Value: Open Flower vs. Whole Plant
  misc_feature: MA Experiment ID: 20000265 Result: Down-regulated in Transcription
  misc_feature: MA Experiment 20000265 PARAMETER Experiment Name: At_Open_Flower_P Parameter: Age (day) Value: 21
  misc_feature: MA Experiment 20000265 PARAMETER Experiment Name: At_Open_Flower_P Parameter: Plant Line Value: WS
  misc_feature: MA Experiment 20000265 PARAMETER Experiment Name: At_Open_Flower_P Parameter: Tissue Value: Closed Flower vs. Whole Plant
  misc_feature: MA Experiment ID: 20000286 Result: Down-regulated in Transcription
  misc_feature: MA Experiment 20000286 PARAMETER Experiment Name: At_Open_Flower_P Parameter: Age (day) Value: 21
  misc_feature: MA Experiment 20000286 PARAMETER Experiment Name: At_Open_Flower_P Parameter: Plant Line Value: WS
  misc_feature: MA Experiment 20000286 PARAMETER Experiment Name: At_Open_Flower_P Parameter: Tissue Value: Half Open vs. Whole Plant
  misc_feature: MA Experiment ID: 20000437 Result: Down-regulated in Transcription
  misc_feature: MA Experiment 20000437 PARAMETER Experiment Name: At_Drought_P Parameter: Age (day) Value: 8
  misc_feature: MA Experiment 20000437 PARAMETER Experiment Name: At_Drought_P Parameter: Organism Value: A. thaliana
  misc_feature: MA Experiment 20000437 PARAMETER Experiment Name: At_Drought_P Parameter: Plant Line Value: WS
  misc_feature: MA Experiment 20000437 PARAMETER Experiment Name: At_Drought_P Parameter: Timepoint (hr) Value: 24
  misc_feature: MA Experiment 20000437 PARAMETER Experiment Name: At_Drought_P Parameter: Tissue Value: Whole Plant
  misc_feature: MA Experiment 20000437 PARAMETER Experiment Name: At_Drought_P Parameter: Treatment Value: Drought vs. No Drought
  misc_feature: MA Experiment ID: 20000438 Result: Down-regulated in Transcription
  misc_feature: MA Experiment 20000438 PARAMETER Experiment Name: At_Shoots__P Parameter: Age (day) Value: 14
  misc_feature: MA Experiment 20000438 PARAMETER Experiment Name: At_Shoots__P Parameter: Tissue Value: Shoots vs. Whole Plant
  misc_feature: MA Experiment ID: 20000439 Result: Down-regulated in Transcription
  misc_feature: MA Experiment 20000439 PARAMETER Experiment Name: At_Roots__P Parameter: Age (day) Value: 14 vs. 21
  misc_feature: MA Experiment 20000439 PARAMETER Experiment Name: At_Roots__P Parameter: Organism Value: A. thaliana
  misc_feature: MA Experiment 20000439 PARAMETER Experiment Name: At_Roots__P Parameter: Tissue Value: Roots vs. Whole Plant
  misc_feature: MA Experiment ID: 20000573 Result: Up-regulated in Transcription
  misc_feature: MA Experiment 20000573 PARAMETER Experiment Name: At_100uM_ABA_Mutants__P Parameter: Organism Value: A. thaliana
  misc_feature: MA Experiment 20000573 PARAMETER Experiment Name: At_100uM_ABA_Mutants__P Parameter: Plant Line Value: CS22 vs. Ler wt
  misc_feature: MA Experiment 20000573 PARAMETER Experiment Name: At_100uM_ABA_Mutants__P Parameter: Timepoint (hr) Value: N/A
  misc_feature: MA Experiment 20000573 PARAMETER Experiment Name: At_100uM_ABA_Mutants__P Parameter: Tissue Value: Whole Plant
  misc_feature: MA Experiment 20000573 PARAMETER Experiment Name: At_100uM_ABA_Mutants__P Parameter: Treatment Value: None
  misc_feature: MA Experiment ID: 20000574 Result: Up-regulated in Transcription
  misc_feature: MA Experiment 20000574 PARAMETER Experiment Name: At_100uM_ABA_Mutants__P Parameter: Organism Value: A. thaliana
  misc_feature: MA Experiment 20000574 PARAMETER Experiment Name: At_100uM_ABA_Mutants__P Parameter: Plant Line Value: CS23 vs. Ler wt
  misc_feature: MA Experiment 20000574 PARAMETER Experiment Name: At_100uM_ABA_Mutants__P Parameter: Timepoint (hr) Value: N/A
  misc_feature: MA Experiment 20000574 PARAMETER Experiment Name: At_100uM_ABA_Mutants__P Parameter: Tissue Value: Whole Plant
  misc_feature: MA Experiment 20000574 PARAMETER Experiment Name: At_100uM_ABA_Mutants__P Parameter: Treatment Value: None
  misc_feature: MA Experiment ID: 20001451 Result: Down-regulated in Transcription
  misc_feature: MA Experiment 20001451 PARAMETER Experiment Name: At_Far-red-induction_P Parameter: Age (day) Value: 7
  misc_feature: MA Experiment 20001451 PARAMETER Experiment Name: At_Far-red-induction_P Parameter: Light Value: Far-red vs. White
  misc_feature: MA Experiment 20001451 PARAMETER Experiment Name: At_Far-red-induction_P Parameter: Organism Value: A. thaliana
  misc_feature: MA Experiment 20001451 PARAMETER Experiment Name: At_Far-red-induction_P Parameter: Plant Line Value: Columbia
  misc_feature: MA Experiment 20001451 PARAMETER Experiment Name: At_Far-red-induction_P Parameter: Timepoint (hr) Value: 24
  misc_feature: MA Experiment 20001451 PARAMETER Experiment Name: At_Far-red-induction_P Parameter: Tissue Value: Whole Plant
actaatcaaatttactcatttagccgtcacctctgaatcttcttctccgatcttcaaacattccggccgccaccgagttcttagccgttacaatgtcttcctctatgaacgtagcgacgatgcaagcactgactttctctcgccggcttctcccttctgttgcttctcgttatctctcttcttcttctgtgaccgttactggatactccggtagaagctcggcttacgcgccttctttccgttcgattaaatgcgtctctgtttctccggaagcttcaatagtaagtgatacaaagaagttggcagatgcttctaagagtacaaaccttataccaatttaccgctgtatattctctgatcagcttactcctgttcttgcttaccgttgtttggtcaaagaagatgaccgtgaagctcctagctttcttttcgagtccgttgagcctggttctcagatgtctagcgttggtcgttatagcgttgttggggctcagcctgcgatggagatcgtggcaaaggagaataaagttattgtaatggatcacaacaatgaaaccatgactgaggaattcgtcgaagatccaatggagatcccaagaaaaatctctgagaaatggaaccctgatcctcaactagttcaggaccttccagatgcgttttgtggtgggtgggttggttttttctcgtacgacactgttcgttatgttgagaagaggaaattgccattttcaaaggcccctgaggatgataggaacttgccagacatgcatcttggtctgtacgacgatgtagttgtatttgatcacgtggaaaagaaagcatatgtcattcactggattagactagatgggagccttccttacgaaaaggcatacagtaatggaatgcaacatttggagaacttggtggccaagttacatgatattgagccgccaaaactggctgcaggtaacgtgaatcttcagacacgacaatttgggccatctttggataattcaaacgtgacatgcgaagagtacaaggaggctgtggtcaaggccaaagaacatatacttgcaggagacatatttcagatcgtgctgagtcaacgttttgagcggcgaacatttgcagacccctttgaagtttatagagcactaagagttgtgaatccaagtccgtatatgggttatttgcaggctagaggatgcattttggtagcatcaagtccagaaattctcaccaaagtaaagcagaacaagatagtgaatcggccattggcaggaaccagcaagagagggaagaatgaagttgaggataagagattagaaaaggaactgctagagaatgaaaagcaatgtgctgagcacatcatgttggttgatctcggtcgcaacgatgttggaaaggttacgaaatacggatcagtgaaagtagagaagcttatgaacatcgaacgttattcccatgttatgcatataagctccacggtgacaggagaattacaagatggtttgacttgctgggacgtactacgtgcggctttaccagtgggaacagttagtggtgcaccaaaggtcaaagctatggaactaatcgatgagctagagccaacgaggcgtggaccatacagtggcggttttggtggagtctccttcactggtgacatggacattgctttatcccttaggacaatcgtttttccgacagcatgtcaatacaatacaatgtactcttacaaggatgctaacaaacggcgtgagtgggtggcttatcttcaagctggagctggtgtagtagctgatagtgacccgcaagacgaacactgtgagtgccagaacaaagccgctggtcttgctcgagccatcgacttggctgaatctgcatttgtgaaaaaatgattgtgcccaagaacagaggctggctttctttgaactccgagttcatgtgtataaaacagttacaagcagaacaaagttttttctttttcttgattttgtgagaattgcaattagactccattaatgaagctctgaaaaatgttacaa

SEQ ID NO: 79820 - protein, 595 aa, Arabidopsis thaliana
  peptide (1)..(595): Ceres Seq. ID no. 12653401
  misc_feature (305)..(585): Pfam Name: chorismate binding enzyme Pfam Description: chorismate binding enzyme
  misc_feature (1)..(595): Homolog of NCBI NO: 960289 NR Description: anthranilate synthase alpha subunit
  misc_feature (64)..(595): Homolog of NCBI NO: 11268466 NR Description: anthranilate synthase (EC 4.1.3.27) alpha chain - Ruta graveolens >gi|960291|gb|AAA74901.1| anthranilate synthase
  misc_feature (53)..(595): Homolog of NCBI NO: 12830362 NR Description: anthranilate synthase alpha subunit [Catharanthus
  misc_feature (10)..(593): Homolog of NCBI NO: 34897346 NR Description: anthranilate synthase alpha 1 subunit [Oryza >gi|15042829|gb|AAK82452.1| anthranilate synthase alpha 1 subunit sativa] >gi|18855065|gb|AAL79757.1| anthranilate synthase alpha 1
  misc_feature (10)..(593): Homolog of NCBI NO: 5360657 NR Description: anthranilate synthase alpha 1 subunit [Oryza
  misc_feature (10)..(594): Homolog of NCBI NO: 7436743 NR Description: anthranilate synthase (EC 4.1.3.27) alpha-2 chain
  misc_feature (69)..(595): Homolog of NCBI NO: 11268468 NR Description: anthranilate synthase alpha-1 chain-like protein -
  misc_feature (51)..(594): Homolog of NCBI NO: 15227604 NR Description: anthranilate synthase, alpha subunit; protein id: [Arabidopsis thaliana] >gi|418134|sp|P32069|TRPX_ARATH
  misc_feature (51)..(594): Homolog of NCBI NO: 320553 NR Description: anthranilate synthase (EC 4.1.3.27) alpha-2 chain
  misc_feature (41)..(595): Homolog of NCBI NO: 34901980 NR Description: putative anthraniliate synthase alpha 2 subunit
MSSSMNVATMQALTFSRRLLPSVASRYLSSSSVTVTGYSGRSSAYAPSFRSIKCVSVSPEASIVSDTKKLADASKSTNLIPIYRCIFSDQLTPVLAYRCLVKEDDREAPSFLFESVEPGSQMSSVGRYSVVGAQPAMEIVAKENKVIVMDHNNETMTEEFVEDPMEIPRKISEKWNPDPQLVQDLPDAFCGGWVGFFSYDTVRYVEKRKLPFSKAPEDDRNLPDMHLGLYDDVVVFDHVEKKAYVIHWIRLDGSLPYEKAYSNGMQHLENLVAKLHDIEPPKLAAGNVNLQTRQFGPSLDNSNVTCEEYKEAVVKAKEHILAGDIFQIVLSQRFERRTFADPFEVYRALRVVNPSPYMGYLQARGCILVASSPEILTKVKQNKIVNRPLAGTSKRGKNEVEDKRLEKELLENEKQCAEHIMLVDLGRNDVGKVTKYGSVKVEKLMNIERYSHVMHISSTVTGELQDGLTCWDVLRAALPVGTVSGAPKVKAMELIDELEPTRRGPYSGGFGGVSFTGDMDIALSLRTIVFPTACQYNTMYSYKDANKRREWVAYLQAGAGVVADSDPQDEHCECQNKAAGLARAIDLAESAFVKK

SEQ ID NO: 79821 - protein, 591 aa, Arabidopsis thaliana
  peptide (1)..(591): Ceres Seq. ID no. 12653402
  misc_feature (301)..(581): Pfam Name: chorismate binding enzyme Pfam Description: chorismate binding enzyme
  misc_feature (1)..(591): Homolog of NCBI NO: 960289 NR Description: anthranilate synthase alpha subunit
  misc_feature (60)..(591): Homolog of NCBI NO: 11268466 NR Description: anthranilate synthase (EC 4.1.3.27) alpha chain - Ruta graveolens >gi|960291|gb|AAA74901.1| anthranilate synthase
  misc_feature (49)..(591): Homolog of NCBI NO: 12830362 NR Description: anthranilate synthase alpha subunit [Catharanthus
  misc_feature (6)..(589): Homolog of NCBI NO: 34897346 NR Description: anthranilate synthase alpha 1 subunit [Oryza >gi|15042829|gb|AAK82452.1| anthranilate synthase alpha 1 subunit sativa] >gi|18855065|gb|AAL79757.1| anthranilate synthase alpha 1
  misc_feature (6)..(589): Homolog of NCBI NO: 5360657 NR Description: anthranilate synthase alpha 1 subunit [Oryza
  misc_feature (6)..(590): Homolog of NCBI NO: 7436743 NR Description: anthranilate synthase (EC 4.1.3.27) alpha-2 chain
  misc_feature (65)..(591): Homolog of NCBI NO: 11268468 NR Description: anthranilate synthase alpha-1 chain-like protein -
  misc_feature (47)..(590): Homolog of NCBI NO: 15227604 NR Description: anthranilate synthase, alpha subunit; protein id: [Arabidopsis thaliana] >gi|418134|sp|P32069|TRPX_ARATH
  misc_feature (47)..(590): Homolog of NCBI NO: 320553 NR Description: anthranilate synthase (EC 4.1.3.27) alpha-2 chain
  misc_feature (37)..(591): Homolog of NCBI NO: 34901980 NR Description: putative anthraniliate synthase alpha 2 subunit
MNVATMQALTFSRRLLPSVASRYLSSSSVTVTGYSGRSSAYAPSFRSIKCVSVSPEASIVSDTKKLADASKSTNLIPIYRCIFSDQLTPVLAYRCLVKEDDREAPSFLFESVEPGSQMSSVGRYSVVGAQPAMEIVAKENKVIVMDHNNETMTEEFVEDPMEIPRKISEKWNPDPQLVQDLPDAFCGGWVGFFSYDTVRYVEKRKLPFSKAPEDDRNLPDMHLGLYDDVVVFDHVEKKAYVIHWIRLDGSLPYEKAYSNGMQHLENLVAKLHDIEPPKLAAGNVNLQTRQFGPSLDNSNVTCEEYKEAVVKAKEHILAGDIFQIVLSQRFERRTFADPFEVYRALRVVNPSPYMGYLQARGCILVASSPEILTKVKQNKIVNRPLAGTSKRGKNEVEDKRLEKELLENEKQCAEHIMLVDLGRNDVGKVTKYGSVKVEKLMNIERYSHVMHISSTVTGELQDGLTCWDVLRAALPVGTVSGAPKVKAMELIDELEPTRRGPYSGGFGGVSFTGDMDIALSLRTIVFPTACQYNTMYSYKDANKRREWVAYLQAGAGVVADSDPQDEHCECQNKAAGLARAIDLAESAFVKK

SEQ ID NO: 79822 - protein, 586 aa, Arabidopsis thaliana
  peptide (1)..(586): Ceres Seq. ID no. 12653403
  misc_feature (296)..(576): Pfam Name: chorismate binding enzyme Pfam Description: chorismate binding enzyme
  misc_feature (1)..(586): Homolog of NCBI NO: 960289 NR Description: anthranilate synthase alpha subunit
  misc_feature (55)..(586): Homolog of NCBI NO: 11268466 NR Description: anthranilate synthase (EC 4.1.3.27) alpha chain - Ruta graveolens >gi|960291|gb|AAA74901.1| anthranilate synthase
  misc_feature (44)..(586): Homolog of NCBI NO: 12830362 NR Description: anthranilate synthase alpha subunit [Catharanthus
  misc_feature (1)..(584): Homolog of NCBI NO: 34897346 NR Description: anthranilate synthase alpha 1 subunit [Oryza >gi|15042829|gb|AAK82452.1| anthranilate synthase alpha 1 subunit sativa] >gi|18855065|gb|AAL79757.1| anthranilate synthase alpha 1
  misc_feature (1)..(584): Homolog of NCBI NO: 5360657 NR Description: anthranilate synthase alpha 1 subunit [Oryza
  misc_feature (1)..(585): Homolog of NCBI NO: 7436743 NR Description: anthranilate synthase (EC 4.1.3.27) alpha-2 chain
  misc_feature (60)..(586): Homolog of NCBI NO: 11268468 NR Description: anthranilate synthase alpha-1 chain-like protein -
  misc_feature (42)..(585): Homolog of NCBI NO: 15227604 NR Description: anthranilate synthase, alpha subunit; protein id: [Arabidopsis thaliana] >gi|418134|sp|P32069|TRPX_ARATH
  misc_feature (42)..(585): Homolog of NCBI NO: 320553 NR Description: anthranilate synthase (EC 4.1.3.27) alpha-2 chain
  misc_feature (32)..(586): Homolog of NCBI NO: 34901980 NR Description: putative anthraniliate synthase alpha 2 subunit
MQALTFSRRLLPSVASRYLSSSSVTVTGYSGRSSAYAPSFRSIKCVSVSPEASIVSDTKKLADASKSTNLIPIYRCIFSDQLTPVLAYRCLVKEDDREAPSFLFESVEPGSQMSSVGRYSVVGAQPAMEIVAKENKVIVMDHNNETMTEEFVEDPMEIPRKISEKWNPDPQLVQDLPDAFCGGWVGFFSYDTVRYVEKRKLPFSKAPEDDRNLPDMHLGLYDDVVVFDHVEKKAYVIHWIRLDGSLPYEKAYSNGMQHLENLVAKLHDIEPPKLAAGNVNLQTRQFGPSLDNSNVTCEEYKEAVVKAKEHILAGDIFQIVLSQRFERRTFADPFEVYRALRVVNPSPYMGYLQARGCILVASSPEILTKVKQNKIVNRPLAGTSKRGKNEVEDKRLEKELLENEKQCAEHIMLVDLGRNDVGKVTKYGSVKVEKLMNIERYSHVMHISSTVTGELQDGLTCWDVLRAALPVGTVSGAPKVKAMELIDELEPTRRGPYSGGFGGVSFTGDMDIALSLRTIVFPTACQYNTMYSYKDANKRREWVAYLQAGAGVVADSDPQDEHCECQNKAAGLARAIDLAESAFVKK

SEQ ID NO: 79823 - DNA, 834 bp, Arabidopsis thaliana
  misc_feature (1)..(834): Ceres Seq. ID no. 12653408
  misc_feature: MA Experiment ID: 20000185 Result: Up-regulated in Transcription
  misc_feature: MA Experiment 20000185 PARAMETER Experiment Name: At_Roots__P Parameter: Age (day) Value: 7 vs. 21
  misc_feature: MA Experiment 20000185 PARAMETER Experiment Name: At_Roots__P Parameter: Organism Value: A. thaliana
  misc_feature: MA Experiment 20000185 PARAMETER Experiment Name: At_Roots__P Parameter: Tissue Value: Roots vs. Whole Plant
  misc_feature: MA Experiment ID: 20000439 Result: Up-regulated in Transcription
  misc_feature: MA Experiment 20000439 PARAMETER Experiment Name: At_Roots__P Parameter: Age (day) Value: 14 vs. 21
  misc_feature: MA Experiment 20000439 PARAMETER Experiment Name: At_Roots__P Parameter: Organism Value: A. thaliana
  misc_feature: MA Experiment 20000439 PARAMETER Experiment Name: At_Roots__P Parameter: Tissue Value: Roots vs. Whole Plant
  misc_feature: MA Experiment ID: 20000451 Result: Up-regulated in Transcription
  misc_feature: MA Experiment 20000451 PARAMETER Experiment Name: At_CS6879_Shoots-Roots_P Parameter: Age (day) Value: 14
  misc_feature: MA Experiment 20000451 PARAMETER Experiment Name: At_CS6879_Shoots-Roots_P Parameter: Organism Value: A. thaliana
  misc_feature: MA Experiment 20000451 PARAMETER Experiment Name: At_CS6879_Shoots-Roots_P Parameter: Plant Line Value: CS6879 vs. WS
  misc_feature: MA Experiment 20000451 PARAMETER Experiment Name: At_CS6879_Shoots-Roots_P Parameter: Tissue Value: Roots
  misc_feature: MA Experiment ID: 20001904 Result: Down-regulated in Transcription
  misc_feature: MA Experiment 20001904 PARAMETER Experiment Name: At_Drought_Reproduction_P Parameter: Age (day) Value: 37
  misc_feature: MA Experiment 20001904 PARAMETER Experiment Name: At_Drought_Reproduction_P Parameter: Organism Value: A. thaliana
  misc_feature: MA Experiment 20001904 PARAMETER Experiment Name: At_Drought_Reproduction_P Parameter: Plant Line Value: WS
  misc_feature: MA Experiment 20001904 PARAMETER Experiment Name: At_Drought_Reproduction_P Parameter: Timepoint (day) Value: 7
  misc_feature: MA Experiment 20001904 PARAMETER Experiment Name: At_Drought_Reproduction_P Parameter: Tissue Value: Rosettes
  misc_feature: MA Experiment 20001904 PARAMETER Experiment Name: At_Drought_Reproduction_P Parameter: Treatment Value: Drought vs. No Drought
atggagactctgcatccactactctcgcacgtgccaacttctgaccaccggtttgtagttcaagagatgatgtgcttgcaaagctcgagctggactaaagaagagaacaagaagtttgagcgagctcttgctgtctacgctgatgacacgcctgatcgctggttcaaagttgctgctatgatccctggaaagaccatatcagatgtcatgaggcaatactctaagcttgaagaagacctcttcgatatcgaagcaggacttgtcccgatcccgggttaccgttcagttactccttgtggatttgatcaggttgtgagtccacgtgactttgatgcgtatcgtaaacttcctaatggagccagaggatttgatcaagaccgtaggaaaggagttccatggacggaggaagaacacaggagattcttgttagggcttctcaagtatgggaaaggagattggagaaacatatcgaggaactttgtgggatcaaaaacaccaactcaggttgcaagtcatgcccaaaagtactaccaaagacagctttccggtgcgaaagacaaacgacggcctagcattcacgacatcaccaccgtcaatcttctcaatgccaatcttagccgtccatcgtctgatcacggttgcttagtctcaaaacaggccgagccgaaactagggttcaccgacagggataatgcagaggagggagttatgtttcttggtcagaatctatcctcggtcttctcttcctacgatcctgccattaagttttccggagcaaatgtttacggtgaaggaggttactgtatctcacaagatcttgaaacgagaaaatga

SEQ ID NO: 79824 - protein, 277 aa, Arabidopsis thaliana
  peptide (1)..(277): Ceres Seq. ID no. 12653409
  misc_feature (130)..(177): Pfam Name: Myb-like DNA-binding domain Pfam Description: Myb-like DNA-binding domain
  misc_feature (1)..(277): Homolog of NCBI NO: 15239231 NR Description: putative protein; protein id: At5g05790.1
  misc_feature (1)..(265): Homolog of NCBI NO: 15229712 NR Description: MYB-family transcription factor, putative; id: At3g11280.1, supported by cDNA: 109398., supported by cDNA: supported by cDNA: gi_20258976 [Arabidopsis thaliana]
  misc_feature (1)..(265): Homolog of NCBI NO: 21618234 NR Description: MYB-family transcription factor, putative
  misc_feature (27)..(223): Homolog of NCBI NO: 12005328 NR Description: unknown [Hevea brasiliensis]
  misc_feature (1)..(248): Homolog of NCBI NO: 30687381 NR Description: MYB family transcription factor -related thaliana] >gi|26451319|dbj|BAC42760.1| putative MYB family factor [Arabidopsis thaliana] >gi|29824293|gb|AAP04107.1|
  misc_feature (27)..(248): Homolog of NCBI NO: 7446171 NR Description: probable MYB family transcription factor - Arabidopsis thaliana >gi|3335378|gb|AAC27179.1| putative MYB
  misc_feature (1)..(267): Homolog of NCBI NO: 15237776 NR Description: I-box binding factor - like protein; protein id:
  misc_feature (28)..(268): Homolog of NCBI NO: 18874263 NR Description: MYB-like transcription factor DIVARICATA
  misc_feature (28)..(200): Homolog of NCBI NO: 18874265 NR Description: MYB-like transcription factor DVL1 [Antirrhinum
  misc_feature (28)..(225): Homolog of NCBI NO: 34908386 NR Description: P0529E05.19 [Oryza sativa (japonica
METLHPLLSHVPTSDHRFVVQEMMCLQSSSWTKEENKKFERALAVYADDTPDRWFKVAAMIPGKTISDVMRQYSKLEEDLFDIEAGLVPIPGYRSVTPCGFDQVVSPRDFDAYRKLPNGARGFDQDRRKGVPWTEEEHRRFLLGLLKYGKGDWRNISRNFVGSKTPTQVASHAQKYYQRQLSGAKDKRRPSIHDITTVNLLNANLSRPSSDHGCLVSKQAEPKLGFTDRDNAEEGVMFLGQNLSSVFSSYDPAIKFSGANVYGEGGYCISQDLETRK

SEQ ID NO: 79825 - protein, 255 aa, Arabidopsis thaliana
  peptide (1)..(255): Ceres Seq. ID no. 12653410
  misc_feature (108)..(155): Pfam Name: Myb-like DNA-binding domain Pfam Description: Myb-like DNA-binding domain
  misc_feature (1)..(255): Homolog of NCBI NO: 15239231 NR Description: putative protein; protein id: At5g05790.1
  misc_feature (1)..(243): Homolog of NCBI NO: 15229712 NR Description: MYB-family transcription factor, putative; id: At3g11280.1, supported by cDNA: 109398., supported by cDNA: supported by cDNA: gi_20258976 [Arabidopsis thaliana]
  misc_feature (1)..(243): Homolog of NCBI NO: 21618234 NR Description: MYB-family transcription factor, putative
  misc_feature (5)..(201): Homolog of NCBI NO: 12005328 NR Description: unknown [Hevea brasiliensis]
  misc_feature (1)..(226): Homolog of NCBI NO: 30687381 NR Description: MYB family transcription factor -related thaliana] >gi|26451319|dbj|BAC42760.1| putative MYB family factor [Arabidopsis thaliana] >gi|29824293|gb|AAP04107.1|
  misc_feature (5)..(226): Homolog of NCBI NO: 7446171 NR Description: probable MYB family transcription factor - Arabidopsis thaliana >gi|3335378|gb|AAC27179.1| putative MYB
  misc_feature (1)..(245): Homolog of NCBI NO: 15237776 NR Description: I-box binding factor - like protein; protein id:
  misc_feature (6)..(246): Homolog of NCBI NO: 18874263 NR Description: MYB-like transcription factor DIVARICATA
  misc_feature (6)..(178): Homolog of NCBI NO: 18874265 NR Description: MYB-like transcription factor DVL1 [Antirrhinum
  misc_feature (6)..(203): Homolog of NCBI NO: 34908386 NR Description: P0529E05.19 [Oryza sativa (japonica
MMCLQSSSWTKEENKKFERALAVYADDTPDRWFKVAAMIPGKTISDVMRQYSKLEEDLFDIEAGLVPIPGYRSVTPCGFDQVVSPRDFDAYRKLPNGARGFDQDRRKGVPWTEEEHRRFLLGLLKYGKGDWRNISRNFVGSKTPTQVASHAQKYYQRQLSGAKDKRRPSIHDITTVNLLNANLSRPSSDHGCLVSKQAEPKLGFTDRDNAEEGVMFLGQNLSSVFSSYDPAIKFSGANVYGEGGYCISQDLETRK

SEQ ID NO: 79826 - protein, 254 aa, Arabidopsis thaliana
  peptide (1)..(254): Ceres Seq. ID no. 12653411
  misc_feature (107)..(154): Pfam Name: Myb-like DNA-binding domain Pfam Description: Myb-like DNA-binding domain
  misc_feature (1)..(254): Homolog of NCBI NO: 15239231 NR Description: putative protein; protein id: At5g05790.1
  misc_feature (1)..(242): Homolog of NCBI NO: 15229712 NR Description: MYB-family transcription factor, putative; id: At3g11280.1, supported by cDNA: 109398., supported by cDNA: supported by cDNA: gi_20258976 [Arabidopsis thaliana]
  misc_feature (1)..(242): Homolog of NCBI NO: 21618234 NR Description: MYB-family transcription factor, putative
  misc_feature (4)..(200): Homolog of NCBI NO: 12005328 NR Description: unknown [Hevea brasiliensis]
  misc_feature (1)..(225): Homolog of NCBI NO: 30687381 NR Description: MYB family transcription factor -related thaliana] >gi|26451319|dbj|BAC42760.1| putative MYB family factor [Arabidopsis thaliana] >gi|29824293|gb|AAP04107.1|
  misc_feature (4)..(225): Homolog of NCBI NO: 7446171 NR Description: probable MYB family transcription factor - Arabidopsis thaliana >gi|3335378|gb|AAC27179.1| putative MYB
  misc_feature (1)..(244): Homolog of NCBI NO: 15237776 NR Description: I-box binding factor - like protein; protein id:
  misc_feature (5)..(245): Homolog of NCBI NO: 18874263 NR Description: MYB-like transcription factor DIVARICATA
  misc_feature (5)..(177): Homolog of NCBI NO: 18874265 NR Description: MYB-like transcription factor DVL1 [Antirrhinum
  misc_feature (5)..(202): Homolog of NCBI NO: 34908386 NR Description: P0529E05.19 [Oryza sativa (japonica
MCLQSSSWTKEENKKFERALAVYADDTPDRWFKVAAMIPGKTISDVMRQYSKLEEDLFDIEAGLVPIPGYRSVTPCGFDQVVSPRDFDAYRKLPNGARGFDQDRRKGVPWTEEEHRRFLLGLLKYGKGDWRNISRNFVGSKTPTQVASHAQKYYQRQLSGAKDKRRPSIHDITTVNLLNANLSRPSSDHGCLVSKQAEPKLGFTDRDNAEEGVMFLGQNLSSVFSSYDPAIKFSGANVYGEGGYCISQDLETRK

SEQ ID NO: 79827 - DNA, 1224 bp, Arabidopsis thaliana
  misc_feature (1)..(1224): Ceres Seq. ID no. 12653412
  misc_feature: MA Experiment ID: 20000184 Result: Up-regulated in Transcription
  misc_feature: MA Experiment 20000184 PARAMETER Experiment Name: At_Shoots__P Parameter: Age (day) Value: 7
  misc_feature: MA Experiment 20000184 PARAMETER Experiment Name: At_Shoots__P Parameter: Tissue Value: Shoots vs. Whole Plant
  misc_feature: MA Experiment ID: 20000286 Result: Up-regulated in Transcription
  misc_feature: MA Experiment 20000286 PARAMETER Experiment Name: At_Open_Flower_P Parameter: Age (day) Value: 21
  misc_feature: MA Experiment 20000286 PARAMETER Experiment Name: At_Open_Flower_P Parameter: Plant Line Value: WS
  misc_feature: MA Experiment 20000286 PARAMETER Experiment Name: At_Open_Flower_P Parameter: Tissue Value: Half Open vs. Whole Plant
  misc_feature: MA Experiment ID: 20000794 Result: Up-regulated in Transcription
  misc_feature: MA Experiment 20000794 PARAMETER Experiment Name: At_Petals_P Parameter: Age (day) Value: 23-25 days
  misc_feature: MA Experiment 20000794 PARAMETER Experiment Name: At_Petals_P Parameter: Plant Line Value: WS
  misc_feature: MA Experiment 20000794 PARAMETER Experiment Name: At_Petals_P Parameter: Tissue Value: Petals vs. Whole plant
  misc_feature: MA Experiment ID: 20001557 Result: Up-regulated in Transcription
  misc_feature: MA Experiment 20001557 PARAMETER Experiment Name: At_Drought_Soil_Dry_P Parameter: Age (day) Value: 27
  misc_feature: MA Experiment 20001557 PARAMETER Experiment Name: At_Drought_Soil_Dry_P Parameter: Organism Value: A. thaliana
  misc_feature: MA Experiment 20001557 PARAMETER Experiment Name: At_Drought_Soil_Dry_P Parameter: Plant Line Value: WS
  misc_feature: MA Experiment 20001557 PARAMETER Experiment Name: At_Drought_Soil_Dry_P Parameter: Post Timepoint (hr) Value: 3
  misc_feature: MA Experiment 20001557 PARAMETER Experiment Name: At_Drought_Soil_Dry_P Parameter: Post-Treatment Value: Re-Water vs. No Drought
  misc_feature: MA Experiment 20001557 PARAMETER Experiment Name: At_Drought_Soil_Dry_P Parameter: Timepoint (day) Value: 13
  misc_feature: MA Experiment 20001557 PARAMETER Experiment Name: At_Drought_Soil_Dry_P Parameter: Treatment Value: Drought vs. No Drought
atgtcttcttcttccttgatacttctcttctctactctctctctctttctcaatgtctcactcgcagacaatcacacggcggttgttataacaacctcagatactccaccgccacttcctccgccttctccaccgccacggcataacttcacttcctctctcatgcccggaatcgcagtcgttatcgccgtcctcactgcgtttttctctctcactttcttacttctcctctacgtcaaacactgtaaacgacgaaacggcagcgtttacgtaaaccacccgcagcgtttcgcaatcactagatacggaggaggatattacaacggtggaggagtagtaggaggaaggaaaaactccggtatagaccggtccgtgattgaatctttaccggttttccggtttggtgcattaagcggtcacaaggatggtttagagtgcgccgtgtgtctcgctcggttcgaaccgacggaagttctgaggttattgccgaaatgtaaacacgccttccacgtggaatgtgttgacacgtggcttgacgctcactccacttgcccgctttgccgttaccgggtcgacccggaagatatactcttgatcggtgattgtaactcctggttcgagctccagttctctaaagatgaatcaaacagtgttaataataatcctcccggtttaacccggtttattccggttagtcgaatttccggtcgtcattcctcggctggtgaacgagcgagtcgactcaacgagattagaacatcttcgtcgtataaatcgaatccgatgtcgtttcggagatcactcgatagctctctgaaagttaacgacgccggcgaggagaaatcggaatctgtcgccgttaattgcttggatcgtctacagagaaaagacggattgttgttgattccgaatcgggagagctttgaggggagatttgagcaccggataattatctccggcgggaatcgagacgatcagaggtggagcgaagtaaggccgtcggatcttttgtatttacgatcagagatgatactcagcgattgccggaaattagctgcggcggagggtggcagagatgtaattaacgggagaagtgtgtcggagttaacgggaattgagagacggaggagatggggaggagagccgagacaacgacaagccacggcggtgatttcgaggtggctcgcttggtcccaccgtgcctccgcttccagcattgtttaa

SEQ ID NO: 79828 - protein, 407 aa, Arabidopsis thaliana
  peptide (1)..(407): Ceres Seq. ID no. 12653413
  misc_feature (146)..(187): Pfam Name: Zinc finger, C3HC4 type (RING finger) Pfam Description: Zinc finger, C3HC4 type (RING finger)
  misc_feature (1)..(407): Homolog of NCBI NO: 15239252 NR Description: putative protein; protein id: At5g05810.1
  misc_feature (43)..(217): Homolog of NCBI NO: 15235482 NR Description: putative protein; protein id: At4g28890.1
  misc_feature (43)..(204): Homolog of NCBI NO: 15225285 NR Description: putative RING zinc finger protein; protein id: [Arabidopsis thaliana] >gi|25411956|pir||B84584 probable RING
  misc_feature (40)..(199): Homolog of NCBI NO: 20152976 NR Description: similar to A. thaliana C3HC4-type RING zinc
  misc_feature (25)..(188): Homolog of NCBI NO: 7487705 NR Description: hypothetical protein T5J17.240 - Arabidopsis
  misc_feature (25)..(188): Homolog of NCBI NO: 25407810 NR Description: hypothetical protein AT4g40070 [imported] - thaliana >gi|5918310|emb|CAB38920.2| putative protein thaliana] >gi|7271062|emb|CAB80670.1| putative protein
  misc_feature (37)..(188): Homolog of NCBI NO: 15237991 NR Description: RING-H2 zinc finger protein-like; protein id:
  misc_feature (26)..(188): Homolog of NCBI NO: 15224200 NR Description: putative RING zinc finger protein; protein id: [Arabidopsis thaliana] >gi|25411889|pir||H84566 probable RING
  misc_feature (40)..(188): Homolog of NCBI NO: 6017119 NR Description: unknown protein [Arabidopsis thaliana]
  misc_feature (40)..(188): Homolog of NCBI NO: 18396583 NR Description: expressed protein; protein id: At3g03550.1, by cDNA: 152633. [Arabidopsis thaliana]
MSSSSLILLFSTLSLFLNVSLADNHTAVVITTSDTPPPLPPPSPPPRHNFTSSLMPGIAVVIAVLTAFFSLTFLLLLYVKHCKRRNGSVYVNHPQRFAITRYGGGYYNGGGVVGGRKNSGIDRSVIESLPVFRFGALSGHKDGLECAVCLARFEPTEVLRLLPKCKHAFHVECVDTWLDAHSTCPLCRYRVDPEDILLIGDCNSWFELQFSKDESNSVNNNPPGLTRFIPVSRISGRHSSAGERASRLNEIRTSSSYKSNPMSFRRSLDSSLKVNDAGEEKSESVAVNCLDRLQRKDGLLLIPNRESFEGRFEHRIIISGGNRDDQRWSEVRPSDLLYLRSEMILSDCRKLAAAEGGRDVINGRSVSELTGIERRRRWGGEPRQRQATAVISRWLAWSHRASASSIV

SEQ ID NO: 79829 - protein, 353 aa, Arabidopsis thaliana
  peptide (1)..(353): Ceres Seq. ID no. 12653414
  misc_feature (92)..(133): Pfam Name: Zinc finger, C3HC4 type (RING finger) Pfam Description: Zinc finger, C3HC4 type (RING finger)
  misc_feature (1)..(353): Homolog of NCBI NO: 15239252 NR Description: putative protein; protein id: At5g05810.1
  misc_feature (1)..(163): Homolog of NCBI NO: 15235482 NR Description: putative protein; protein id: At4g28890.1
  misc_feature (1)..(150): Homolog of NCBI NO: 15225285 NR Description: putative RING zinc finger protein; protein id: [Arabidopsis thaliana] >gi|25411956|pir||B84584 probable RING
  misc_feature (1)..(145): Homolog of NCBI NO: 20152976 NR Description: similar to A. thaliana C3HC4-type RING zinc
  misc_feature (1)..(134): Homolog of NCBI NO: 7487705 NR Description: hypothetical protein T5J17.240 - Arabidopsis
  misc_feature (1)..(134): Homolog of NCBI NO: 25407810 NR Description: hypothetical protein AT4g40070 [imported] - thaliana >gi|5918310|emb|CAB38920.2| putative protein thaliana] >gi|7271062|emb|CAB80670.1| putative protein
  misc_feature (1)..(134): Homolog of NCBI NO: 15237991 NR Description: RING-H2 zinc finger protein-like; protein id:
  misc_feature (1)..(134): Homolog of NCBI NO: 15224200 NR Description: putative RING zinc finger protein; protein id: [Arabidopsis thaliana] >gi|25411889|pir||H84566 probable RING
  misc_feature (1)..(134): Homolog of NCBI NO: 6017119 NR Description: unknown protein [Arabidopsis thaliana]
  misc_feature (1)..(134): Homolog of NCBI NO: 18396583 NR Description: expressed protein; protein id: At3g03550.1, by cDNA: 152633. [Arabidopsis thaliana]
MPGIAVVIAVLTAFFSLTFLLLLYVKHCKRRNGSVYVNHPQRFAITRYGGGYYNGGGVVGGRKNSGIDRSVIESLPVFRFGALSGHKDGLECAVCLARFEPTEVLRLLPKCKHAFHVECVDTWLDAHSTCPLCRYRVDPEDILLIGDCNSWFELQFSKDESNSVNNNPPGLTRFIPVSRISGRHSSAGERASRLNEIRTSSSYKSNPMSFRRSLDSSLKVNDAGEEKSESVAVNCLDRLQRKDGLLLIPNRESFEGRFEHRIIISGGNRDDQRWSEVRPSDLLYLRSEMILSDCRKLAAAEGGRDVINGRSVSELTGIERRRRWGGEPRQRQATAVISRWLAWSHRASASSIV

SEQ ID NO: 79830 - DNA, 1521 bp, Arabidopsis thaliana
  misc_feature (1)..(1521): Ceres Seq. ID no. 12653418
  misc_feature: MA Experiment ID: 20000437 Result: Up-regulated in Transcription
  misc_feature: MA Experiment 20000437 PARAMETER Experiment Name: At_Drought_P Parameter: Age (day) Value: 8
  misc_feature: MA Experiment 20000437 PARAMETER Experiment Name: At_Drought_P Parameter: Organism Value: A. thaliana
  misc_feature: MA Experiment 20000437 PARAMETER Experiment Name: At_Drought_P Parameter: Plant Line Value: WS
  misc_feature: MA Experiment 20000437 PARAMETER Experiment Name: At_Drought_P Parameter: Timepoint (hr) Value: 24
  misc_feature: MA Experiment 20000437 PARAMETER Experiment Name: At_Drought_P Parameter: Tissue Value: Whole Plant
  misc_feature: MA Experiment 20000437 PARAMETER Experiment Name: At_Drought_P Parameter: Treatment Value: Drought vs. No Drought
  misc_feature: MA Experiment ID: 20000495 Result: Down-regulated in Transcription
  misc_feature: MA Experiment 20000495 PARAMETER Experiment Name: At_Guard_Cells_P Parameter: Harvest Date Value: 8/2/2002
  misc_feature: MA Experiment 20000495 PARAMETER Experiment Name: At_Guard_Cells_P Parameter: Organism Value: A. thaliana
  misc_feature: MA Experiment 20000495 PARAMETER Experiment Name: At_Guard_Cells_P Parameter: Tissue Value: Guard Cells vs. Leaves
  misc_feature: MA Experiment ID: 20000496 Result: Down-regulated in Transcription
  misc_feature: MA Experiment 20000496 PARAMETER Experiment Name: At_Guard_Cells_P Parameter: Harvest Date Value: 7/19/2002
  misc_feature: MA Experiment 20000496 PARAMETER Experiment Name: At_Guard_Cells_P Parameter: Organism Value: Canola
  misc_feature: MA Experiment 20000496 PARAMETER Experiment Name: At_Guard_Cells_P Parameter: Tissue Value: Guard Cells vs. Leaves
  misc_feature: MA Experiment ID: 20001905 Result: Up-regulated in Transcription
  misc_feature: MA Experiment 20001905 PARAMETER Experiment Name: At_Drought_Reproduction_P Parameter: Age (day) Value: 40
  misc_feature: MA Experiment 20001905 PARAMETER Experiment Name: At_Drought_Reproduction_P Parameter: Organism Value: A. thaliana
  misc_feature: MA Experiment 20001905 PARAMETER Experiment Name: At_Drought_Reproduction_P Parameter: Plant Line Value: WS
  misc_feature: MA Experiment 20001905 PARAMETER Experiment Name: At_Drought_Reproduction_P Parameter: Timepoint (day) Value: 10
  misc_feature: MA Experiment 20001905 PARAMETER Experiment Name: At_Drought_Reproduction_P Parameter: Tissue Value: Rosettes
  misc_feature: MA Experiment 20001905 PARAMETER Experiment Name: At_Drought_Reproduction_P Parameter: Treatment Value: Drought vs. No Drought
atggcgacggagcttaaccctaagaacttccctgttctctcttatgtcttggatcgtctcccttcattcaccgccaaatcctcttcctcttccgatgtcgagccaccaccatccaaatccgatccttcttcatcatcaaaccactctatcgagatagtgactcagatgcctcacttggctcatcctgatgttcttgcctccatgactaacgcaaccgccgacgtttctcagacccgatctgttcttcgaaccctaggaccaagacccgatcacgaaaccgtcgacagagctcgtgctaggctccgtgagatcgacgcgtctttgtcggaatctttcgaagagatcgctctctctcctaacgatattgacgtggcggagaaggaacagaagaggagagaagctgtggagcaagagaagatttggtataaatcgatccttaagcttaacgagcttcatgaatcttatgagaagcttttgaaagaagcagaggagaggctcgtgaggatctatgagtctgccgagaagaatgctgccgcggtggcggaggaggaagctgcggaggttgaagtcaatgaagaggttgtgagtatactgcaacaagctgcggagaatccattggaccgagttgatttgtctggtcggaaattgaagttgcttcctgaagcatttggaaagattcaaggtctccttgttcttaatctctataacaatcagcttcaggctattcctgattcgatagctggtttgcataaccttctcgaactcgatgtttccactaatttcctggagacattaccagattcgatcggtttattgtcaaagttgaagattttgaatgtctcttgtaacaaactcacaactttaccagattccatctgccattgtggatcgttggttgtcttggatgcgagctacaacaatctcacctacttaccaacaaacatcggattcgagctagtgaaactagagaagctcttgatccatctcaacaaaatcagatcattaccaacttccattggtgaaatgagatccttacgctacctcgatgcacacttcaacgaactcaatggtctcccaaattctttcgggctgctcacgaacctcgagtaccttaacctgagcagtaacttcagcgatctccaagatctccctgcttcattcggagatctcataagcctccaagaactcgacttgagcaacaaccagatccattctcttccagacgcttttggcacgctcgtgaacttgaccaaactgaacttggaccaaaacccgcttgttgtcccgcctgatgaagtcgtgaaacaaggtgtggatgcggttaaaatgtatatgggtaagagatgggtcagcatgttggaagaggaagagaagatggcgaatatgaaggatgagatggatcagacaaacaccgattggctcacccgaaccacctcgaagctgaaaacgtatgttactgaggtctcggagtatcttggctcgaatccgcctagagatccttaccttgaccagcagctatga

SEQ ID NO: 79831 - protein, 506 aa, Arabidopsis thaliana
  peptide (1)..(506): Ceres Seq. ID no. 12653419
  misc_feature (274)..(296): Pfam Name: Leucine Rich Repeat Pfam Description: Leucine Rich Repeat
  misc_feature (1)..(506): Homolog of NCBI NO: 15239256 NR Description: putative protein; protein id: At5g05850.1 thaliana] >gi|9759110|dbj|BAB09679.1|
  misc_feature (1)..(506): Homolog of NCBI NO: 22330985 NR Description: hypothetical protein; protein id: At3g11330.1, by cDNA: gi_18175637 [Arabidopsis thaliana] unknown protein [Arabidopsis thaliana]
  misc_feature (27)..(506): Homolog of NCBI NO: 12321872 NR Description: hypothetical protein; 91861-89496 [Arabidopsis
  misc_feature (1)..(431): Homolog of NCBI NO: 12321872 NR Description: hypothetical protein; 91861-89496 [Arabidopsis
  misc_feature (68)..(505): Homolog of NCBI NO: 38605760 NR Description: OSJNBa0044K18.1 [Oryza sativa (japonica
  misc_feature (6)..(475): Homolog of NCBI NO: 7489337 NR Description: leucine-rich protein - common sunflower
  misc_feature (47)..(506): Homolog of NCBI NO: 18391461 NR Description: expressed protein; protein id: At1g12970.1, by cDNA: gi_17063164 [Arabidopsis thaliana] At1g12970/F13K23_18 [Arabidopsis thaliana]
  misc_feature (107)..(493): Homolog of NCBI NO: 30688342 NR Description: leucine rich repeat protein family [Arabidopsis
  misc_feature (10)..(506): Homolog of NCBI NO: 25518616 NR Description: hypothetical protein F13K23.23 - Arabidopsis >gi|8698744|gb|AAF78502.1|AC012187_22 Contains similarity to CYR1 Candida albicans gb|AB034965 and contains multiple Leucine Rich
  misc_feature (209)..(463): Homolog of NCBI NO: 7485831 NR Description: hypothetical protein F20B18.160 - Arabidopsis
MATELNPKNFPVLSYVLDRLPSFTAKSSSSSDVEPPPSKSDPSSSSNHSIEIVTQMPHLAHPDVLASMTNATADVSQTRSVLRTLGPRPDHETVDRARARLREIDASLSESFEEIALSPNDIDVAEKEQKRREAVEQEKIWYKSILKLNELHESYEKLLKEAEERLVRIYESAEKNAAAVAEEEAAEVEVNEEVVSILQQAAENPLDRVDLSGRKLKLLPEAFGKIQGLLVLNLYNNQLQAIPDSIAGLHNLLELDVSTNFLETLPDSIGLLSKLKILNVSCNKLTTLPDSICHCGSLVVLDASYNNLTYLPTNIGFELVKLEKLLIHLNKIRSLPTSIGEMRSLRYLDAHFNELNGLPNSFGLLTNLEYLNLSSNFSDLQDLPASFGDLISLQELDLSNNQIHSLPDAFGTLVNLTKLNLDQNPLVVPPDEVVKQGVDAVKMYMGKRWVSMLEEEEKMANMKDEMDQTNTDWLTRTTSKLKTYVTEVSEYLGSNPPRDPYLDQQL

SEQ ID NO: 79832 - protein, 451 aa, Arabidopsis thaliana
  peptide (1)..(451): Ceres Seq. ID no. 12653420
  misc_feature (219)..(241): Pfam Name: Leucine Rich Repeat Pfam Description: Leucine Rich Repeat
  misc_feature (1)..(451): Homolog of NCBI NO: 15239256 NR Description: putative protein; protein id: At5g05850.1 thaliana] >gi|9759110|dbj|BAB09679.1|
  misc_feature (1)..(451): Homolog of NCBI NO: 22330985 NR Description: hypothetical protein; protein id: At3g11330.1, by cDNA: gi_18175637 [Arabidopsis thaliana] unknown protein [Arabidopsis thaliana]
  misc_feature (1)..(451): Homolog of NCBI NO: 12321872 NR Description: hypothetical protein; 91861-89496 [Arabidopsis
  misc_feature (1)..(376): Homolog of NCBI NO: 12321872 NR Description: hypothetical protein; 91861-89496 [Arabidopsis
  misc_feature (13)..(450): Homolog of NCBI NO: 38605760 NR Description: OSJNBa0044K18.1 [Oryza sativa (japonica
  misc_feature (1)..(420): Homolog of NCBI NO: 7489337 NR Description: leucine-rich protein - common sunflower
  misc_feature (1)..(451): Homolog of NCBI NO: 18391461 NR Description: expressed protein; protein id: At1g12970.1, by cDNA: gi_17063164 [Arabidopsis thaliana] At1g12970/F13K23_18 [Arabidopsis thaliana]
  misc_feature (52)..(438): Homolog of NCBI NO: 30688342 NR Description: leucine rich repeat protein family [Arabidopsis
  misc_feature (1)..(451): Homolog of NCBI NO: 25518616 NR Description: hypothetical protein F13K23.23 - Arabidopsis >gi|8698744|gb|AAF78502.1|AC012187_22 Contains similarity to CYR1 Candida albicans gb|AB034965 and contains multiple Leucine Rich
  misc_feature (154)..(408): Homolog of NCBI NO: 7485831 NR Description: hypothetical protein F20B18.160 - Arabidopsis
MPHLAHPDVLASMTNATADVSQTRSVLRTLGPRPDHETVDRARARLREIDASLSESFEEIALSPNDIDVAEKEQKRREAVEQEKIWYKSILKLNELHESYEKLLKEAEERLVRIYESAEKNAAAVAEEEAAEVEVNEEVVSILQQAAENPLDRVDLSGRKLKLLPEAFGKIQGLLVLNLYNNQLQAIPDSIAGLHNLLELDVSTNFLETLPDSIGLLSKLKILNVSCNKLTTLPDSICHCGSLVVLDASYNNLTYLPTNIGFELVKLEKLLIHLNKIRSLPTSIGEMRSLRYLDAHFNELNGLPNSFGLLTNLEYLNLSSNFSDLQDLPASFGDLISLQELDLSNNQIHSLPDAFGTLVNLTKLNLDQNPLVVPPDEVVKQGVDAVKMYMGKRWVSMLEEEEKMANMKDEMDQTNTDWLTRTTSKLKTYVTEVSEYLGSNPPRDPYLDQQL

SEQ ID NO: 79833 - protein, 439 aa, Arabidopsis thaliana
  peptide (1)..(439): Ceres Seq. ID no. 12653421
  misc_feature (207)..(229): Pfam Name: Leucine Rich Repeat Pfam Description: Leucine Rich Repeat
  misc_feature (1)..(439): Homolog of NCBI NO: 15239256 NR Description: putative protein; protein id: At5g05850.1 thaliana] >gi|9759110|dbj|BAB09679.1|
  misc_feature (1)..(439): Homolog of NCBI NO: 22330985 NR Description: hypothetical protein; protein id: At3g11330.1, by cDNA: gi_18175637 [Arabidopsis thaliana] unknown protein [Arabidopsis thaliana]
  misc_feature (1)..(439): Homolog of NCBI NO: 12321872 NR Description: hypothetical protein; 91861-89496 [Arabidopsis
  misc_feature (1)..(364): Homolog of NCBI NO: 12321872 NR Description: hypothetical protein; 91861-89496 [Arabidopsis
  misc_feature (1)..(438): Homolog of NCBI NO: 38605760 NR Description: OSJNBa0044K18.1 [Oryza sativa (japonica
  misc_feature (1)..(408): Homolog of NCBI NO: 7489337 NR Description: leucine-rich protein - common sunflower
  misc_feature (1)..(439): Homolog of NCBI NO: 18391461 NR Description: expressed protein; protein id: At1g12970.1, by cDNA: gi_17063164 [Arabidopsis thaliana] At1g12970/F13K23_18 [Arabidopsis thaliana]
  misc_feature (40)..(426): Homolog of NCBI NO: 30688342 NR Description: leucine rich repeat protein family [Arabidopsis
  misc_feature (1)..(439): Homolog of NCBI NO: 25518616 NR Description: hypothetical protein F13K23.23 - Arabidopsis >gi|8698744|gb|AAF78502.1|AC012187_22 Contains similarity to CYR1 Candida albicans gb|AB034965 and contains multiple Leucine Rich
  misc_feature (142)..(396): Homolog of NCBI NO: 7485831 NR Description: hypothetical protein F20B18.160 - Arabidopsis
MTNATADVSQTRSVLRTLGPRPDHETVDRARARLREIDASLSESFEEIALSPNDIDVAEKEQKRREAVEQEKIWYKSILKLNELHESYEKLLKEAEERLVRIYESAEKNAAAVAEEEAAEVEVNEEVVSILQQAAENPLDRVDLSGRKLKLLPEAFGKIQGLLVLNLYNNQLQAIPDSIAGLHNLLELDVSTNFLETLPDSIGLLSKLKILNVSCNKLTTLPDSICHCGSLVVLDASYNNLTYLPTNIGFELVKLEKLLIHLNKIRSLPTSIGEMRSLRYLDAHFNELNGLPNSFGLLTNLEYLNLSSNFSDLQDLPASFGDLISLQELDLSNNQIHSLPDAFGTLVNLTKLNLDQNPLVVPPDEVVKQGVDAVKMYMGKRWVSMLEEEEKMANMKDEMDQTNTDWLTRTTSKLKTYVTEVSEYLGSNPPRDPYLDQQL

SEQ ID NO: 79834 - DNA, 1415 bp, Arabidopsis thaliana
  misc_feature (1)..(1415): Ceres Seq. ID no. 12653422
  misc_feature: MA Experiment ID: 20000173 Result: Down-regulated in Transcription
  misc_feature: MA Experiment 20000173 PARAMETER Experiment Name: At_42deg_Heat_P Parameter: Age (day) Value: 14
  misc_feature: MA Experiment 20000173 PARAMETER Experiment Name: At_42deg_Heat_P Parameter: Organism Value: A. thaliana
  misc_feature: MA Experiment 20000173 PARAMETER Experiment Name: At_42deg_Heat_P Parameter: Plant Line Value: WS
  misc_feature: MA Experiment 20000173 PARAMETER Experiment Name: At_42deg_Heat_P Parameter: Temperature (deg C) Value: 42 vs. 22
  misc_feature: MA Experiment 20000173 PARAMETER Experiment Name: At_42deg_Heat_P Parameter: Timepoint (hr) Value: 6
  misc_feature: MA Experiment 20000173 PARAMETER Experiment Name: At_42deg_Heat_P Parameter: Tissue Value: Aerial
  misc_feature: MA Experiment ID: 20000184 Result: Up-regulated in Transcription
  misc_feature: MA Experiment 20000184 PARAMETER Experiment Name: At_Shoots__P Parameter: Age (day) Value: 7
  misc_feature: MA Experiment 20000184 PARAMETER Experiment Name: At_Shoots__P Parameter: Tissue Value: Shoots vs. Whole Plant
  misc_feature: MA Experiment ID: 20000185 Result: Up-regulated in Transcription
  misc_feature: MA Experiment 20000185 PARAMETER Experiment Name: At_Roots__P Parameter: Age (day) Value: 7 vs. 21
  misc_feature: MA Experiment 20000185 PARAMETER Experiment Name: At_Roots__P Parameter: Organism Value: A. thaliana
  misc_feature: MA Experiment 20000185 PARAMETER Experiment Name: At_Roots__P Parameter: Tissue Value: Roots vs. Whole Plant
  misc_feature: MA Experiment ID: 20000227 Result: Down-regulated in Transcription
  misc_feature: MA Experiment 20000227 PARAMETER Experiment Name: At_Root-Tips-vs-Tops_P Parameter: Tissue Value: Root Tips vs. Root Tops
  misc_feature: MA Experiment ID: 20000234 Result: Down-regulated in Transcription
  misc_feature: MA Experiment 20000234 PARAMETER Experiment Name: At_Siliques_P Parameter: Age (day) Value: 21
  misc_feature: MA Experiment 20000234 PARAMETER Experiment Name: At_Siliques_P Parameter: Organism Value: A. thaliana
  misc_feature: MA Experiment 20000234 PARAMETER Experiment Name: At_Siliques_P Parameter: Plant Line Value: WS
  misc_feature: MA Experiment 20000234 PARAMETER Experiment Name: At_Siliques_P Parameter: Tissue Value: Less Than 5mm Siliques vs. Whole Plant
  misc_feature: MA Experiment ID: 20000235 Result: Down-regulated in Transcription
  misc_feature: MA Experiment 20000235 PARAMETER Experiment Name: At_Siliques_P Parameter: Age (day) Value: 21
  misc_feature: MA Experiment 20000235 PARAMETER Experiment Name: At_Siliques_P Parameter: Organism Value: A. thaliana
  misc_feature: MA Experiment 20000235 PARAMETER Experiment Name: At_Siliques_P Parameter: Plant Line Value: WS
  misc_feature: MA Experiment 20000235 PARAMETER Experiment Name: At_Siliques_P Parameter: Tissue Value: 5-10mm Siliques vs. Whole Plant
  misc_feature: MA Experiment ID: 20000264 Result: Down-regulated in Transcription
  misc_feature: MA Experiment 20000264 PARAMETER Experiment Name: At_Open_Flower_P Parameter: Age (day) Value: 21
  misc_feature: MA Experiment 20000264 PARAMETER Experiment Name: At_Open_Flower_P Parameter: Plant Line Value: WS
  misc_feature: MA Experiment 20000264 PARAMETER Experiment Name: At_Open_Flower_P Parameter: Tissue Value: Open Flower vs. Whole Plant
  misc_feature: MA Experiment ID: 20000286 Result: Down-regulated in Transcription
  misc_feature: MA Experiment 20000286 PARAMETER Experiment Name: At_Open_Flower_P Parameter: Age (day) Value: 21
  misc_feature: MA Experiment 20000286 PARAMETER Experiment Name: At_Open_Flower_P Parameter: Plant Line Value: WS
  misc_feature: MA Experiment 20000286 PARAMETER Experiment Name: At_Open_Flower_P Parameter: Tissue Value: Half Open vs. Whole Plant
  misc_feature: MA Experiment ID: 20000436 Result: Down-regulated in Transcription
  misc_feature: MA Experiment 20000436 PARAMETER Experiment Name: At_Drought_P Parameter: Age (day) Value: 7
  misc_feature: MA Experiment 20000436 PARAMETER Experiment Name: At_Drought_P Parameter: Organism Value: A. thaliana
  misc_feature: MA Experiment 20000436 PARAMETER Experiment Name: At_Drought_P Parameter: Plant Line Value: WS
  misc_feature: MA Experiment 20000436 PARAMETER Experiment Name: At_Drought_P Parameter: Timepoint (hr) Value: 12
  misc_feature: MA Experiment 20000436 PARAMETER Experiment Name: At_Drought_P Parameter: Tissue Value: Whole Plant
  misc_feature: MA Experiment 20000436 PARAMETER Experiment Name: At_Drought_P Parameter: Treatment Value: Drought vs. No Drought
  misc_feature: MA Experiment ID: 20000437 Result: Down-regulated in Transcription
  misc_feature: MA Experiment 20000437 PARAMETER Experiment Name: At_Drought_P Parameter: Age (day) Value: 8
  misc_feature: MA Experiment 20000437 PARAMETER Experiment Name: At_Drought_P Parameter: Organism Value: A. thaliana
  misc_feature: MA Experiment 20000437 PARAMETER Experiment Name: At_Drought_P Parameter: Plant Line Value: WS
  misc_feature: MA Experiment 20000437 PARAMETER Experiment Name: At_Drought_P Parameter: Timepoint (hr) Value: 24
  misc_feature: MA Experiment 20000437 PARAMETER Experiment Name: At_Drought_P Parameter: Tissue Value: Whole Plant
  misc_feature: MA Experiment 20000437 PARAMETER Experiment Name: At_Drought_P Parameter: Treatment Value: Drought vs. No Drought
  misc_feature: MA Experiment ID: 20000439 Result: Up-regulated in Transcription
  misc_feature: MA Experiment 20000439 PARAMETER Experiment Name: At_Roots__P Parameter: Age (day) Value: 14 vs. 21
  misc_feature: MA Experiment 20000439 PARAMETER Experiment Name: At_Roots__P Parameter: Organism Value: A. thaliana
  misc_feature: MA Experiment 20000439 PARAMETER Experiment Name: At_Roots__P Parameter: Tissue Value: Roots vs. Whole Plant
  misc_feature: MA Experiment ID: 20000445 Result: Down-regulated in Transcription
  misc_feature: MA Experiment 20000445 PARAMETER Experiment Name: At_100uM_NAA__P Parameter: Age (day) Value: 14
  misc_feature: MA Experiment 20000445 PARAMETER Experiment Name: At_100uM_NAA__P Parameter: Organism Value: A. thaliana
  misc_feature: MA Experiment 20000445 PARAMETER Experiment Name: At_100uM_NAA__P Parameter: Plant Line Value: WS
  misc_feature: MA Experiment 20000445 PARAMETER Experiment Name: At_100uM_NAA__P Parameter: Timepoint (hr) Value: 6
  misc_feature: MA Experiment 20000445 PARAMETER Experiment Name: At_100uM_NAA__P Parameter: Tissue Value: Aerial
  misc_feature: MA Experiment 20000445 PARAMETER Experiment Name: At_100uM_NAA__P Parameter: Treatment Value: 100uM NAA vs. No Treatment
  misc_feature: MA Experiment ID: 20000453 Result: Down-regulated in Transcription
  misc_feature: MA Experiment 20000453 PARAMETER Experiment Name: At_100uM_ABA_P Parameter: Age (day) Value: 15
  misc_feature: MA Experiment 20000453 PARAMETER Experiment Name: At_100uM_ABA_P Parameter: Organism Value: A. thaliana
  misc_feature: MA Experiment 20000453 PARAMETER Experiment Name: At_100uM_ABA_P Parameter: Plant Line Value: WS
  misc_feature: MA Experiment 20000453 PARAMETER Experiment Name: At_100uM_ABA_P Parameter: Timepoint (hr) Value: 24
  misc_feature: MA Experiment 20000453 PARAMETER Experiment Name: At_100uM_ABA_P Parameter: Tissue Value: Aerial
  misc_feature: MA Experiment 20000453 PARAMETER Experiment Name: At_100uM_ABA_P Parameter: Treatment Value: 100uM ABA vs. No Treatment
  misc_feature: MA Experiment ID: 20000456 Result: Up-regulated in Transcription
  misc_feature: MA Experiment 20000456 PARAMETER Experiment Name: At_100uM_BA_P Parameter: Age (day) Value: 14
  misc_feature: MA Experiment 20000456 PARAMETER Experiment Name: At_100uM_BA_P Parameter: Organism Value: A. thaliana
  misc_feature: MA Experiment 20000456 PARAMETER Experiment Name: At_100uM_BA_P Parameter: Plant Line Value: WS
  misc_feature: MA Experiment 20000456 PARAMETER Experiment Name: At_100uM_BA_P Parameter: Timepoint (hr) Value: 6
  misc_feature: MA Experiment 20000456 PARAMETER Experiment Name: At_100uM_BA_P Parameter: Tissue Value: Aerial
  misc_feature: MA Experiment 20000456 PARAMETER Experiment Name: At_100uM_BA_P Parameter: Treatment Value: 100uM BA vs. No Treatment
  misc_feature: MA Experiment ID: 20000709 Result: Up-regulated in Transcription
  misc_feature: MA Experiment 20000709 PARAMETER Experiment Name: At_15mM_NH4NO3_L-to-H_P Parameter: Age (hr) Value: 14
  misc_feature: MA Experiment 20000709 PARAMETER Experiment Name: At_15mM_NH4NO3_L-to-H_P Parameter: Organism Value: A. thaliana
  misc_feature: MA Experiment 20000709 PARAMETER Experiment Name: At_15mM_NH4NO3_L-to-H_P Parameter: Plant Line Value: WS
  misc_feature: MA Experiment 20000709 PARAMETER Experiment Name: At_15mM_NH4NO3_L-to-H_P Parameter: Timepoint (hr) Value: 4
  misc_feature: MA Experiment 20000709 PARAMETER Experiment Name: At_15mM_NH4NO3_L-to-H_P Parameter: Tissue Value: Aerial
  misc_feature: MA Experiment 20000709 PARAMETER Experiment Name: At_15mM_NH4NO3_L-to-H_P Parameter: Treatment Value: 15mM NH4NO3 vs. 30mM Mannitol
  misc_feature: MA Experiment ID: 20000794 Result: Down-regulated in Transcription
  misc_feature: MA Experiment 20000794 PARAMETER Experiment Name: At_Petals_P Parameter: Age (day) Value: 23-25 days
  misc_feature: MA Experiment 20000794 PARAMETER Experiment Name: At_Petals_P Parameter: Plant Line Value: WS
  misc_feature: MA Experiment 20000794 PARAMETER Experiment Name: At_Petals_P Parameter: Tissue Value: Petals vs. Whole plant
  misc_feature: MA Experiment ID: 20001554 Result: Down-regulated in Transcription
  misc_feature: MA Experiment 20001554 PARAMETER Experiment Name: At_Drought_Soil_Dry_P Parameter: Age (day) Value: 21
  misc_feature: MA Experiment 20001554 PARAMETER Experiment Name: At_Drought_Soil_Dry_P Parameter: Organism Value: A. thaliana
  misc_feature: MA Experiment 20001554 PARAMETER Experiment Name: At_Drought_Soil_Dry_P Parameter: Plant Line Value: WS
  misc_feature: MA Experiment 20001554 PARAMETER Experiment Name: At_Drought_Soil_Dry_P Parameter: Post Timepoint (hr) Value: None
  misc_feature: MA Experiment 20001554 PARAMETER Experiment Name: At_Drought_Soil_Dry_P Parameter: Post-Treatment Value: None
  misc_feature: MA Experiment 20001554 PARAMETER Experiment Name: At_Drought_Soil_Dry_P Parameter: Timepoint (day) Value: 7
  misc_feature: MA Experiment 20001554 PARAMETER Experiment Name: At_Drought_Soil_Dry_P Parameter: Treatment Value: Drought vs. No Drought
  misc_feature: MA Experiment ID: 20001556 Result: Down-regulated in Transcription
  misc_feature: MA Experiment 20001556 PARAMETER Experiment Name: At_Drought_Soil_Dry_P Parameter: Age (day) Value: 26
  misc_feature: MA Experiment 20001556 PARAMETER Experiment Name: At_Drought_Soil_Dry_P Parameter: Organism Value: A. thaliana
  misc_feature: MA Experiment 20001556 PARAMETER Experiment Name: At_Drought_Soil_Dry_P Parameter: Plant Line Value: WS
  misc_feature: MA Experiment 20001556 PARAMETER Experiment Name: At_Drought_Soil_Dry_P Parameter: Post Timepoint (hr) Value: None
  misc_feature: MA Experiment 20001556 PARAMETER Experiment Name: At_Drought_Soil_Dry_P Parameter: Post-Treatment Value: None
  misc_feature: MA Experiment 20001556 PARAMETER Experiment Name: At_Drought_Soil_Dry_P Parameter: Timepoint (day) Value: 12
  misc_feature: MA Experiment 20001556 PARAMETER Experiment Name: At_Drought_Soil_Dry_P Parameter: Treatment Value: Drought vs. No Drought
  misc_feature: MA Experiment ID: 20001558 Result: Up-regulated in Transcription
  misc_feature: MA Experiment 20001558 PARAMETER Experiment Name: At_Drought_Soil_Dry_P Parameter: Age (day) Value: 27
  misc_feature: MA Experiment 20001558 PARAMETER Experiment Name: At_Drought_Soil_Dry_P Parameter: Organism Value: A. thaliana
  misc_feature: MA Experiment 20001558 PARAMETER Experiment Name: At_Drought_Soil_Dry_P Parameter: Plant Line Value: WS
  misc_feature: MA Experiment 20001558 PARAMETER Experiment Name: At_Drought_Soil_Dry_P Parameter: Post Timepoint (hr) Value: 6
  misc_feature: MA Experiment 20001558 PARAMETER Experiment Name: At_Drought_Soil_Dry_P Parameter: Post-Treatment Value: Re-Water vs. No Drought
  misc_feature: MA Experiment 20001558 PARAMETER Experiment Name: At_Drought_Soil_Dry_P Parameter: Timepoint (day) Value: 13
  misc_feature: MA Experiment 20001558 PARAMETER Experiment Name: At_Drought_Soil_Dry_P Parameter: Treatment Value: Drought vs. No Drought
  misc_feature: MA Experiment ID: 20001757 Result: Up-regulated in Transcription
  misc_feature: MA Experiment 20001757 PARAMETER Experiment Name: At_50mM_NH4NO3_L-to-H_P Parameter: Timepoint (hr) Value: 6
  misc_feature: MA Experiment 20001757 PARAMETER Experiment Name: At_50mM_NH4NO3_L-to-H_P Parameter: Tissue Value: Leaf
  misc_feature: MA Experiment 20001757 PARAMETER Experiment Name: At_50mM_NH4NO3_L-to-H_P Parameter: Treatment Value: 50mM NH4NO3 vs 100mM Mannitol
  misc_feature: MA Experiment ID: 20001770 Result: Down-regulated in Transcription
  misc_feature: MA Experiment 20001770 PARAMETER Experiment Name: At_Far-red-enriched-adult_P Parameter: Age (day) Value: 28
  misc_feature: MA Experiment 20001770 PARAMETER Experiment Name: At_Far-red-enriched-adult_P Parameter: Light Value: Far-red enriched vs. White
  misc_feature: MA Experiment 20001770 PARAMETER Experiment Name: At_Far-red-enriched-adult_P Parameter: Organism Value: A. thaliana
  misc_feature: MA Experiment 20001770 PARAMETER Experiment Name: At_Far-red-enriched-adult_P Parameter: Plant Line Value: Columbia
  misc_feature: MA Experiment 20001770 PARAMETER Experiment Name: At_Far-red-enriched-adult_P Parameter: Timepoint (hr) Value: 8
  misc_feature: MA Experiment 20001770 PARAMETER Experiment Name: At_Far-red-enriched-adult_P Parameter: Tissue Value: Aerial
agagcgtttcaattacaatggaggagaagagaaatggtctgcgtgtgattctcttccctcttccattacaaggttgcatcaaccctatgcttcagctcgccaacatccttcacgtaagaggcttctccattaccgtgatccacacgcgcttcaacgcgccaaaagcttcaagccatcctctcttcactttcttacagattcctgatggtttgtctgaaacggagattcaagatggtgttatgtctttgctcgcgcaaatcaaccttaacgctgagtctccgtttcgtgattgcttgcgtaaagtgttgctggaatcaaaagagtcagagagggttacttgtttgatcgatgactgtggatggctcttcacacaatctgtttcagagagtttgaagcttccgaggctcgttctctgtacttttaaagccactttcttcaatgcttatccgagtcttccacttatccgaaccaagggatatcttccagtttcagaatcggaagcagaggactctgttcctgagttcccgccgcttcaaaagagagatctttcaaaggttttcggggagttcggagagaaactcgatccgttcttacatgctgtagtcgaaacgacaataagatcttcagggttaatatacatgtcctgcgaagagcttgagaaagattcgttgactctttctaacgaaatttttaaagttccggtttttgcaattggtccgtttcacagctacttctctgcttcgtcaagcagcttgttcacacaagacgagacttgcattctgtggttagatgatcaagaagataaatctgtgatctacgttagtctaggaagcgttgtgaacataacggaaacagagttcttggagattgcgtgtggtttaagcaatagcaaacagcctttcttgtgggtagtacgacccggttcagtactcggcgcgaaatggatcgaaccgctctctgaagggctggttagtagccttgaagagaaaggaaagattgtgaaatgggcaccacaacaggaggttcttgcgcatcgtgccacaggagggtttttgacacacaatggttggaactcaacgctagagagtatatgcgaaggggttcctatgatctgcctaccaggaggttgggatcaaatgctgaattcaagatttgttagcgatatttggaagattggaattcacttggaaggtcggattgaaaaaaaggagattgagaaagctgtgagggtgttaatggaggaaagtgaaggaaataagattcgtgagagaatgaaagttctgaaagatgaggtcgagaaatcggtcaaacaaggaggctcatcttttcaatctattgagactctagctaatcatatactattgttgtaagttgggaatatttgctaaagatacctcaacgtttctataaattgc

SEQ ID NO: 79835 - protein, 455 aa, Arabidopsis thaliana
  peptide (1)..(455): Ceres Seq. ID no. 12653423
  misc_feature (14)..(450): Pfam Name: UDP-glucoronosyl and UDP-glucosyl transferase Pfam Description: UDP-glucoronosyl and UDP-glucosyl transferase
  misc_feature (6)..(455): Homolog of NCBI NO: 15239257 NR Description: glucuronosyl transferase-like protein; protein At5g05860.1, supported by cDNA: gi_15010631 [Arabidopsis >gi|15010632|gb|AAK73975.1| AT5g05860/MJJ3_28 [Arabidopsis
  misc_feature (8)..(452): Homolog of NCBI NO: 15239259 NR Description: glucuronosyl transferase-like protein; protein At5g05880.1 [Arabidopsis thaliana] >gi|10177561|dbj|BAB10793.1|
  misc_feature (8)..(455): Homolog of NCBI NO: 15239258 NR Description: glucuronosyl transferase-like protein; protein At5g05870.1 [Arabidopsis thaliana] >gi|10177560|dbj|BAB10792.1|
  misc_feature (8)..(452): Homolog of NCBI NO: 15239287 NR Description: glucuronosyl transferase-like protein; protein At5g05890.1 [Arabidopsis thaliana] >gi|10177562|dbj|BAB10794.1|
  misc_feature (8)..(452): Homolog of NCBI NO: 15239288 NR Description: glucuronosyl transferase-like protein; protein At5g05900.1 [Arabidopsis thaliana] >gi|10177563|dbj|BAB10795.1|
  misc_feature (6)..(453): Homolog of NCBI NO: 15229731 NR Description: glucosyl transferase, putative; protein id: [Arabidopsis thaliana] >gi|12321874|gb|AAG50970.1|AC073395_12
  misc_feature (6)..(453): Homolog of NCBI NO: 26452976 NR Description: unknown protein [Arabidopsis thaliana]
  misc_feature (8)..(453): Homolog of NCBI NO: 15228174 NR Description: glucuronosyl transferase - like protein; protein
  misc_feature (15)..(455): Homolog of NCBI NO: 34900682 NR Description: glucuronosyl transferase-like protein [Oryza
  misc_feature (17)..(453): Homolog of NCBI NO: 21593451 NR Description: glucuronosyl transferase-like protein
SVSITMEEKRNGLRVILFPLPLQGCINPMLQLANILHVRGFSITVIHTRFNAPKASSHPLFTFLQIPDGLSETEIQDGVMSLLAQINLNAESPFRDCLRKVLLESKESERVTCLIDDCGWLFTQSVSESLKLPRLVLCTFKATFFNAYPSLPLIRTKGYLPVSESEAEDSVPEFPPLQKRDLSKVFGEFGEKLDPFLHAVVETTIRSSGLIYMSCEELEKDSLTLSNEIFKVPVFAIGPFHSYFSASSSSLFTQDETCILWLDDQEDKSVIYVSLGSVVNITETEFLEIACGLSNSKQPFLWVVRPGSVLGAKWIEPLSEGLVSSLEEKGKIVKWAPQQEVLAHRATGGFLTHNGWNSTLESICEGVPMICLPGGWDQMLNSRFVSDIWKIGIHLEGRIEKKEIEKAVRVLMEESEGNKIRERMKVLKDEVEKSVKQGGSSFQSIETLANHILLL

SEQ ID NO: 79836 - protein, 450 aa, Arabidopsis thaliana
  peptide (1)..(450): Ceres Seq. ID no. 12653424
  misc_feature (9)..(445): Pfam Name: UDP-glucoronosyl and UDP-glucosyl transferase Pfam Description: UDP-glucoronosyl and UDP-glucosyl transferase
  misc_feature (1)..(450): Homolog of NCBI NO: 15239257 NR Description: glucuronosyl transferase-like protein; protein At5g05860.1, supported by cDNA: gi_15010631 [Arabidopsis >gi|15010632|gb|AAK73975.1| AT5g05860/MJJ3_28 [Arabidopsis
  misc_feature (3)..(447): Homolog of NCBI NO: 15239259 NR Description: glucuronosyl transferase-like protein; protein At5g05880.1 [Arabidopsis thaliana] >gi|10177561|dbj|BAB10793.1|
  misc_feature (3)..(450): Homolog of NCBI NO: 15239258 NR Description: glucuronosyl transferase-like protein; protein At5g05870.1 [Arabidopsis thaliana] >gi|10177560|dbj|BAB10792.1|
  misc_feature (3)..(447): Homolog of NCBI NO: 15239287 NR Description: glucuronosyl transferase-like protein; protein At5g05890.1 [Arabidopsis thaliana] >gi|10177562|dbj|BAB10794.1|
  misc_feature (3)..(447): Homolog of NCBI NO: 15239288 NR Description: glucuronosyl transferase-like protein; protein At5g05900.1 [Arabidopsis thaliana] >gi|10177563|dbj|BAB10795.1|
  misc_feature (1)..(448): Homolog of NCBI NO: 15229731 NR Description: glucosyl transferase, putative; protein id: [Arabidopsis thaliana] >gi|12321874|gb|AAG50970.1|AC073395_12
  misc_feature (1)..(448): Homolog of NCBI NO: 26452976 NR Description: unknown protein [Arabidopsis thaliana]
  misc_feature (3)..(448): Homolog of NCBI NO: 15228174 NR Description: glucuronosyl transferase - like protein; protein
  misc_feature (10)..(450): Homolog of NCBI NO: 34900682 NR Description: glucuronosyl transferase-like protein [Oryza
  misc_feature (12)..(448): Homolog of NCBI NO: 21593451 NR Description: glucuronosyl transferase-like protein
MEEKRNGLRVILFPLPLQGCINPMLQLANILHVRGFSITVIHTRFNAPKASSHPLFTFLQIPDGLSETEIQDGVMSLLAQINLNAESPFRDCLRKVLLESKESERVTCLIDDCGWLFTQSVSESLKLPRLVLCTFKATFFNAYPSLPLIRTKGYLPVSESEAEDSVPEFPPLQKRDLSKVFGEFGEKLDPFLHAVVETTIRSSGLIYMSCEELEKDSLTLSNEIFKVPVFAIGPFHSYFSASSSSLFTQDETCILWLDDQEDKSVIYVSLGSVVNITETEFLEIACGLSNSKQPFLWVVRPGSVLGAKWIEPLSEGLVSSLEEKGKIVKWAPQQEVLAHRATGGFLTHNGWNSTLESICEGVPMICLPGGWDQMLNSRFVSDIWKIGIHLEGRIEKKEIEKAVRVLMEESEGNKIRERMKVLKDEVEKSVKQGGSSFQSIETLANHILLL

SEQ ID NO: 79837 - protein, 427 aa, Arabidopsis thaliana
  peptide (1)..(427): Ceres Seq. ID no. 12653425
  misc_feature (1)..(422): Pfam Name: UDP-glucoronosyl and UDP-glucosyl transferase Pfam Description: UDP-glucoronosyl and UDP-glucosyl transferase
  misc_feature (1)..(427): Homolog of NCBI NO: 15239257 NR Description: glucuronosyl transferase-like protein; protein At5g05860.1, supported by cDNA: gi_15010631 [Arabidopsis >gi|15010632|gb|AAK73975.1| AT5g05860/MJJ3_28 [Arabidopsis
  misc_feature (1)..(424): Homolog of NCBI NO: 15239259 NR Description: glucuronosyl transferase-like protein; protein At5g05880.1 [Arabidopsis thaliana] >gi|10177561|dbj|BAB10793.1|
  misc_feature (1)..(427): Homolog of NCBI NO: 15239258 NR Description: glucuronosyl transferase-like protein; protein At5g05870.1 [Arabidopsis thaliana] >gi|10177560|dbj|BAB10792.1|
  misc_feature (1)..(424): Homolog of NCBI NO: 15239287 NR Description: glucuronosyl transferase-like protein; protein At5g05890.1 [Arabidopsis thaliana] >gi|10177562|dbj|BAB10794.1|
  misc_feature (1)..(424): Homolog of NCBI NO: 15239288 NR Description: glucuronosyl transferase-like protein; protein At5g05900.1 [Arabidopsis thaliana] >gi|10177563|dbj|BAB10795.1|
  misc_feature (1)..(425): Homolog of NCBI NO: 15229731 NR Description: glucosyl transferase, putative; protein id: [Arabidopsis thaliana] >gi|12321874|gb|AAG50970.1|AC073395_12
  misc_feature (1)..(425): Homolog of NCBI NO: 26452976 NR Description: unknown protein [Arabidopsis thaliana]
  misc_feature (1)..(425): Homolog of NCBI NO: 15228174 NR Description: glucuronosyl transferase - like protein; protein
  misc_feature (1)..(427): Homolog of NCBI NO: 34900682 NR Description: glucuronosyl transferase-like protein [Oryza
  misc_feature (1)..(425): Homolog of NCBI NO: 21593451 NR Description: glucuronosyl transferase-like protein
MLQLANILHVRGFSITVIHTRFNAPKASSHPLFTFLQIPDGLSETEIQDGVMSLLAQINLNAESPFRDCLRKVLLESKESERVTCLIDDCGWLFTQSVSESLKLPRLVLCTFKATFFNAYPSLPLIRTKGYLPVSESEAEDSVPEFPPLQKRDLSKVFGEFGEKLDPFLHAVVETTIRSSGLIYMSCEELEKDSLTLSNEIFKVPVFAIGPFHSYFSASSSSLFTQDETCILWLDDQEDKSVIYVSLGSVVNITETEFLEIACGLSNSKQPFLWVVRPGSVLGAKWIEPLSEGLVSSLEEKGKIVKWAPQQEVLAHRATGGFLTHNGWNSTLESICEGVPMICLPGGWDQMLNSRFVSDIWKIGIHLEGRIEKKEIEKAVRVLMEESEGNKIRERMKVLKDEVEKSVKQGGSSFQSIETLANHILLL

SEQ ID NO: 79838 - DNA, 1395 bp, Arabidopsis thaliana
  misc_feature (1)..(1395): Ceres Seq. ID no. 12653426
  misc_feature: MA Experiment ID: 20000307 Result: Up-regulated in Transcription
  misc_feature: MA Experiment 20000307 PARAMETER Experiment Name: At_Germinating_Seeds_Sub_P Parameter: Age (hr) Value: 24 vs. 0
  misc_feature: MA Experiment 20000307 PARAMETER Experiment Name: At_Germinating_Seeds_Sub_P Parameter: Organism Value: A. thaliana
  misc_feature: MA Experiment 20000307 PARAMETER Experiment Name: At_Germinating_Seeds_Sub_P Parameter: Plant Line Value: WS
  misc_feature: MA Experiment 20000307 PARAMETER Experiment Name: At_Germinating_Seeds_Sub_P Parameter: Tissue Value: Germinating Seeds
  misc_feature: MA Experiment ID: 20000328 Result: Down-regulated in Transcription
  misc_feature: MA Experiment 20000328 PARAMETER Experiment Name: At_42deg_Heat_Sub_P Parameter: Age (day) Value: 14
  misc_feature: MA Experiment 20000328 PARAMETER Experiment Name: At_42deg_Heat_Sub_P Parameter: Organism Value: A. thaliana
  misc_feature: MA Experiment 20000328 PARAMETER Experiment Name: At_42deg_Heat_Sub_P Parameter: Plant Line Value: WS
  misc_feature: MA Experiment 20000328 PARAMETER Experiment Name: At_42deg_Heat_Sub_P Parameter: Temperature (deg C) Value: 42 vs. 22
  misc_feature: MA Experiment 20000328 PARAMETER Experiment Name: At_42deg_Heat_Sub_P Parameter: Timepoint (hr) Value: 6
  misc_feature: MA Experiment 20000328 PARAMETER Experiment Name: At_42deg_Heat_Sub_P Parameter: Tissue Value: Aerial
  misc_feature: MA Experiment ID: 20000355 Result: Down-regulated in Transcription
  misc_feature: MA Experiment 20000355 PARAMETER Experiment Name: At_Siliques_Sub_P Parameter: Age (day) Value: 21
  misc_feature: MA Experiment 20000355 PARAMETER Experiment Name: At_Siliques_Sub_P Parameter: Organism Value: A. thaliana
  misc_feature: MA Experiment 20000355 PARAMETER Experiment Name: At_Siliques_Sub_P Parameter: Plant Line Value: WS
  misc_feature: MA Experiment 20000355 PARAMETER Experiment Name: At_Siliques_Sub_P Parameter: Tissue Value: Less Than 5mm Siliques vs. Whole Plant
  misc_feature: MA Experiment ID: 20000440 Result: Down-regulated in Transcription
  misc_feature: MA Experiment 20000440 PARAMETER Experiment Name: At_Closed-Flower__Sub_P Parameter: Tissue Value: Closed Flower vs. Whole Plant
atggagaagagaaacgagagacaagtgattctttttcctctaccattacaaggttgcataaaccctatgcttcagctagcaaagatcctttactcaagaggtttttcgatcaccatcatccacacgcgcttcaacgcgcccaaatcttcagaccatcctctcttcactttcttacaaatccgcgacggcttgtctgaatctcagactcaatctcgtgatcttttgcttcaactcacgcttctcaacaacaattgtcagatcccatttcgagagtgtttggctaaactcattaaacctagttcagattcaggaacagaggataggaaaattagctgtgtgatcgatgattccggttgggttttcacacaatccgtggcggagagttttaatcttcctcgatttgtcctctgtgcttataagttctctttctttctcggacattttcttgttcctcagattcgtcgtgaagggtttcttccagtaccagattcggaggcagatgatctagttcctgagtttccaccgcttcgaaagaaagatctttcgagaattatgggaaccagcgctcagagtaagcctctagatgcttacttgcttaagatactcgacgcgacgaagccagcttcagggattatagttatgtcctgcaaagagcttgaccatgattcacttgctgagtccaacaaagttttcagcattccgatatttcccattggcccttttcacattcatgacgtcccagcctcgtctagcagcttgttagaaccggaccagagttgcattccatggttagatatgcgtgaaacgagatcagtagtctacgtgagcttagggagcattgcgagtcttaacgagtctgacttcttggagattgcttgtggactaagaaacaccaaccaatccttcttgtgggttgtccggcctggttcagtccatggcagagattggatcgaatcattaccttcagggttcatggaaagtctcgatggtaaaggaaagatagtgagatgggcaccgcagctagacgttcttgcgcatagagccacgggagggtttttgactcataatggatggaactcgacattagagagtatatgcgaaggagtacctatgatctgcttgccttgtaagtgggaccaatttgtaaacgcgagattcataagcgaagtttggagggttgggattcacttggaaggtcggatagagcgaagagaaatcgagagagctgttataagactaatggttgagtcgaaaggagaagagattcgaggtagaatcaaagtcttgcgagacgaagtaagaaggtcagttaaacaaggaggttcgtcatatcgatctttagatgagttggttgatcgtatatcaatcatcatcgagccactagtgcctacgtga

SEQ ID NO: 79839 - protein, 464 aa, Arabidopsis thaliana
  peptide (1)..(464): Ceres Seq. ID no. 12653427
  misc_feature (7)..(455): Pfam Name: UDP-glucoronosyl and UDP-glucosyl transferase Pfam Description: UDP-glucoronosyl and UDP-glucosyl transferase
  misc_feature (1)..(464): Homolog of NCBI NO: 15239258 NR Description: glucuronosyl transferase-like protein; protein At5g05870.1 [Arabidopsis thaliana] >gi|10177560|dbj|BAB10792.1|
  misc_feature (1)..(455): Homolog of NCBI NO: 15239259 NR Description: glucuronosyl transferase-like protein; protein At5g05880.1 [Arabidopsis thaliana] >gi|10177561|dbj|BAB10793.1|
  misc_feature (1)..(455): Homolog of NCBI NO: 15239287 NR Description: glucuronosyl transferase-like protein; protein At5g05890.1 [Arabidopsis thaliana] >gi|10177562|dbj|BAB10794.1|
  misc_feature (2)..(457): Homolog of NCBI NO: 15239257 NR Description: glucuronosyl transferase-like protein; protein At5g05860.1, supported by cDNA: gi_15010631 [Arabidopsis >gi|15010632|gb|AAK73975.1| AT5g05860/MJJ3_28 [Arabidopsis
  misc_feature (1)..(455): Homolog of NCBI NO: 15239288 NR Description: glucuronosyl transferase-like protein; protein At5g05900.1 [Arabidopsis thaliana] >gi|10177563|dbj|BAB10795.1|
  misc_feature (1)..(451): Homolog of NCBI NO: 15229731 NR Description: glucosyl transferase, putative; protein id: [Arabidopsis thaliana] >gi|12321874|gb|AAG50970.1|AC073395_12
  misc_feature (1)..(451): Homolog of NCBI NO: 26452976 NR Description: unknown protein [Arabidopsis thaliana]
  misc_feature (1)..(454): Homolog of NCBI NO: 15228174 NR Description: glucuronosyl transferase - like protein; protein
  misc_feature (6)..(457): Homolog of NCBI NO: 30697251 NR Description: glycosyltransferase family [Arabidopsis thaliana]
  misc_feature (11)..(454): Homolog of NCBI NO: 21593451 NR Description: glucuronosyl transferase-like protein
MEKRNERQVILFPLPLQGCINPMLQLAKILYSRGFSITIIHTRFNAPKSSDHPLFTFLQIRDGLSESQTQSRDLLLQLTLLNNNCQIPFRECLAKLIKPSSDSGTEDRKISCVIDDSGWVFTQSVAESFNLPRFVLCAYKFSFFLGHFLVPQIRREGFLPVPDSEADDLVPEFPPLRKKDLSRIMGTSAQSKPLDAYLLKILDATKPASGIIVMSCKELDHDSLAESNKVFSIPIFPIGPFHIHDVPASSSSLLEPDQSCIPWLDMRETRSVVYVSLGSIASLNESDFLEIACGLRNTNQSFLWVVRPGSVHGRDWIESLPSGFMESLDGKGKIVRWAPQLDVLAHRATGGFLTHNGWNSTLESICEGVPMICLPCKWDQFVNARFISEVWRVGIHLEGRIERREIERAVIRLMVESKGEEIRGRIKVLRDEVRRSVKQGGSSYRSLDELVDRISIIIEPLVPT

SEQ ID NO: 79840 - protein, 442 aa, Arabidopsis thaliana
  peptide (1)..(442): Ceres Seq. ID no. 12653428
  misc_feature (1)..(433): Pfam Name: UDP-glucoronosyl and UDP-glucosyl transferase Pfam Description: UDP-glucoronosyl and UDP-glucosyl transferase
  misc_feature (1)..(442): Homolog of NCBI NO: 15239258 NR Description: glucuronosyl transferase-like protein; protein At5g05870.1 [Arabidopsis thaliana] >gi|10177560|dbj|BAB10792.1|
  misc_feature (1)..(433): Homolog of NCBI NO: 15239259 NR Description: glucuronosyl transferase-like protein; protein At5g05880.1 [Arabidopsis thaliana] >gi|10177561|dbj|BAB10793.1|
  misc_feature (1)..(433): Homolog of NCBI NO: 15239287 NR Description: glucuronosyl transferase-like protein; protein At5g05890.1 [Arabidopsis thaliana] >gi|10177562|dbj|BAB10794.1|
  misc_feature (1)..(435): Homolog of NCBI NO: 15239257 NR Description: glucuronosyl transferase-like protein; protein At5g05860.1, supported by cDNA: gi_15010631 [Arabidopsis >gi|15010632|gb|AAK73975.1| AT5g05860/MJJ3_28 [Arabidopsis
  misc_feature (1)..(433): Homolog of NCBI NO: 15239288 NR Description: glucuronosyl transferase-like protein; protein At5g05900.1 [Arabidopsis thaliana] >gi|10177563|dbj|BAB10795.1|
  misc_feature (1)..(429): Homolog of NCBI NO: 15229731 NR Description: glucosyl transferase, putative; protein id: [Arabidopsis thaliana] >gi|12321874|gb|AAG50970.1|AC073395_12
  misc_feature (1)..(429): Homolog of NCBI NO: 26452976 NR Description: unknown protein [Arabidopsis thaliana]
  misc_feature (1)..(432): Homolog of NCBI NO: 15228174 NR Description: glucuronosyl transferase - like protein; protein
  misc_feature (1)..(435): Homolog of NCBI NO: 30697251 NR Description: glycosyltransferase family [Arabidopsis thaliana]
  misc_feature (1)..(432): Homolog of NCBI NO: 21593451 NR Description: glucuronosyl transferase-like protein
MLQLAKILYSRGFSITIIHTRFNAPKSSDHPLFTFLQIRDGLSESQTQSRDLLLQLTLLNNNCQIPFRECLAKLIKPSSDSGTEDRKISCVIDDSGWVFTQSVAESFNLPRFVLCAYKFSFFLGHFLVPQIRREGFLPVPDSEADDLVPEFPPLRKKDLSRIMGTSAQSKPLDAYLLKILDATKPASGIIVMSCKELDHDSLAESNKVFSIPIFPIGPFHIHDVPASSSSLLEPDQSCIPWLDMRETRSVVYVSLGSIASLNESDFLEIACGLRNTNQSFLWVVRPGSVHGRDWIESLPSGFMESLDGKGKIVRWAPQLDVLAHRATGGFLTHNGWNSTLESICEGVPMICLPCKWDQFVNARFISEVWRVGIHLEGRIERREIERAVIRLMVESKGEEIRGRIKVLRDEVRRSVKQGGSSYRSLDELVDRISIIIEPLVPT

SEQ ID NO: 79841 - protein, 280 aa, Arabidopsis thaliana
  peptide (1)..(280): Ceres Seq. ID no. 12653429
  misc_feature (1)..(271): Pfam Name: UDP-glucoronosyl and UDP-glucosyl transferase Pfam Description: UDP-glucoronosyl and UDP-glucosyl transferase
  misc_feature (1)..(280): Homolog of NCBI NO: 15239258 NR Description: glucuronosyl transferase-like protein; protein At5g05870.1 [Arabidopsis thaliana] >gi|10177560|dbj|BAB10792.1|
  misc_feature (1)..(271): Homolog of NCBI NO: 15239259 NR Description: glucuronosyl transferase-like protein; protein At5g05880.1 [Arabidopsis thaliana] >gi|10177561|dbj|BAB10793.1|
  misc_feature (1)..(271): Homolog of NCBI NO: 15239287 NR Description: glucuronosyl transferase-like protein; protein At5g05890.1 [Arabidopsis thaliana] >gi|10177562|dbj|BAB10794.1|
  misc_feature (1)..(273): Homolog of NCBI NO: 15239257 NR Description: glucuronosyl transferase-like protein; protein At5g05860.1, supported by cDNA: gi_15010631 [Arabidopsis >gi|15010632|gb|AAK73975.1| AT5g05860/MJJ3_28 [Arabidopsis
  misc_feature (1)..(271): Homolog of NCBI NO: 15239288 NR Description: glucuronosyl transferase-like protein; protein At5g05900.1 [Arabidopsis thaliana] >gi|10177563|dbj|BAB10795.1|
  misc_feature (1)..(267): Homolog of NCBI NO: 15229731 NR Description: glucosyl transferase, putative; protein id: [Arabidopsis thaliana] >gi|12321874|gb|AAG50970.1|AC073395_12
  misc_feature (1)..(267): Homolog of NCBI NO: 26452976 NR Description: unknown protein [Arabidopsis thaliana]
  misc_feature (1)..(270): Homolog of NCBI NO: 15228174 NR Description: glucuronosyl transferase - like protein; protein
  misc_feature (1)..(273): Homolog of NCBI NO: 30697251 NR Description: glycosyltransferase family [Arabidopsis thaliana]
  misc_feature (1)..(270): Homolog of NCBI NO: 21593451 NR Description: glucuronosyl transferase-like protein
MGTSAQSKPLDAYLLKILDATKPASGIIVMSCKELDHDSLAESNKVFSIPIFPIGPFHIHDVPASSSSLLEPDQSCIPWLDMRETRSVVYVSLGSIASLNESDFLEIACGLRNTNQSFLWVVRPGSVHGRDWIESLPSGFMESLDGKGKIVRWAPQLDVLAHRATGGFLTHNGWNSTLESICEGVPMICLPCKWDQFVNARFISEVWRVGIHLEGRIERREIERAVIRLMVESKGEEIRGRIKVLRDEVRRSVKQGGSSYRSLDELVDRISIIIEPLVPT

SEQ ID NO: 79842 - DNA, 1368 bp, Arabidopsis thaliana
  misc_feature (1)..(1368): Ceres Seq. ID no. 12653430
  misc_feature: MA Experiment ID: 20000306 Result: Up-regulated in Transcription
  misc_feature: MA Experiment 20000306 PARAMETER Experiment Name: At_Germinating_Seeds_Sub_P Parameter: Age (hr) Value: 6 vs. 0
  misc_feature: MA Experiment 20000306 PARAMETER Experiment Name: At_Germinating_Seeds_Sub_P Parameter: Organism Value: A. thaliana
  misc_feature: MA Experiment 20000306 PARAMETER Experiment Name: At_Germinating_Seeds_Sub_P Parameter: Plant Line Value: WS
  misc_feature: MA Experiment 20000306 PARAMETER Experiment Name: At_Germinating_Seeds_Sub_P Parameter: Tissue Value: Germinating Seeds
  misc_feature: MA Experiment ID: 20000307 Result: Up-regulated in Transcription
  misc_feature: MA Experiment 20000307 PARAMETER Experiment Name: At_Germinating_Seeds_Sub_P Parameter: Age (hr) Value: 24 vs. 0
  misc_feature: MA Experiment 20000307 PARAMETER Experiment Name: At_Germinating_Seeds_Sub_P Parameter: Organism Value: A. thaliana
  misc_feature: MA Experiment 20000307 PARAMETER Experiment Name: At_Germinating_Seeds_Sub_P Parameter: Plant Line Value: WS
  misc_feature: MA Experiment 20000307 PARAMETER Experiment Name: At_Germinating_Seeds_Sub_P Parameter: Tissue Value: Germinating Seeds
  misc_feature: MA Experiment ID: 20000314 Result: Up-regulated in Transcription
  misc_feature: MA Experiment 20000314 PARAMETER Experiment Name: At_14day_Shoots-Roots_Sub_P Parameter: Age (day) Value: 14
  misc_feature: MA Experiment 20000314 PARAMETER Experiment Name: At_14day_Shoots-Roots_Sub_P Parameter: Organism Value: A. thaliana
  misc_feature: MA Experiment 20000314 PARAMETER Experiment Name: At_14day_Shoots-Roots_Sub_P Parameter: Plant Line Value: WS
  misc_feature: MA Experiment 20000314 PARAMETER Experiment Name: At_14day_Shoots-Roots_Sub_P Parameter: Tissue Value: Roots vs. Whole Plant
atggagaagagtaatggccttcgagtgattctgtttccacttccattacaaggctgcatcaaccccatgattcagctcgccaagatcctccactcaagaggtttctccatcactgtgatccacacgtgcttcaacgcgccaaaagcttcaagccatcctctcttcaccttcttagagatcccagatggcttgtccgaaacagagaaaagaactaacaataccaaacttctcctaacgcttctcaaccggaactgtgagtctccgtttcgtgaatgtttgagtaaactgttgcagtctgcagattcagaaacaggggaagagaaacagaggattagctgtttgatcgctgattctggatggatgttcacacaacccattgctcagagtttgaaactcccaatattggtcctcagtgtgtttacagtctccttctttcgctgccaatttgttcttcctaagcttcggcgtgaagtgtatcttccacttcaagattcagaacaggaggatctagttcaagagtttccgccgcttcgaaagaaggatattgtacgtattcttgatgtagaaacagatatactagatccattcttggacaaagttctacaaatgacaaaggcgtcttcaggtcttatattcatgtcatgtgaagagttggaccacgactcagtgagtcaggcacgtgaagatttcaaaattcctatctttgggattggaccatctcacagccactttccagctacctctagtagcttgtccacacccgacgagacttgcattccatggttagacaaacaagaagacaaatccgtgatttacgtcagttacgggagcatcgtgaccatcagcgaatcagatttaatagagattgcttggggtctaagaaacagcgaccaacccttcttgttggtcgtacgggttggttcagtccgtggcagagaatggatcgagacaatcccggaagagatcatggaaaagcttaatgagaagggaaagatagtgaaatgggctccgcaacaagacgttctaaagcatcgagccattgggggattcctgacacataatggttggagctcgactgttgagagtgtttgtgaagcagtccctatgatctgtttgccttttcgttgggaccaaatgctaaatgcaagatttgttagcgatgtatggatggtcgggataaacctagaggatcgggttgaaaggaatgagatcgagggagcgataaggagattattggtggaacctgaaggagaagccatccgagagaggatagaacatcttaaggagaaagtaggacgatcgtttcaacaaaacggttccgcatatcaatcgttacaaaatttgattgattatatatcatctttttag

SEQ ID NO: 79843 - protein, 455 aa, Arabidopsis thaliana
  peptide (1)..(455): Ceres Seq. ID no. 12653431
  misc_feature (8)..(453): Pfam Name: UDP-glucoronosyl and UDP-glucosyl transferase Pfam Description: UDP-glucoronosyl and UDP-glucosyl transferase
  misc_feature (1)..(455): Homolog of NCBI NO: 15239287 NR Description: glucuronosyl transferase-like protein; protein At5g05890.1 [Arabidopsis thaliana] >gi|10177562|dbj|BAB10794.1|
  misc_feature (1)..(455): Homolog of NCBI NO: 15239259 NR Description: glucuronosyl transferase-like protein; protein At5g05880.1 [Arabidopsis thaliana] >gi|10177561|dbj|BAB10793.1|
  misc_feature (1)..(455): Homolog of NCBI NO: 15239288 NR Description: glucuronosyl transferase-like protein; protein At5g05900.1 [Arabidopsis thaliana] >gi|10177563|dbj|BAB10795.1|
  misc_feature (1)..(453): Homolog of NCBI NO: 15239258 NR Description: glucuronosyl transferase-like protein; protein At5g05870.1 [Arabidopsis thaliana] >gi|10177560|dbj|BAB10792.1|
  misc_feature (2)..(452): Homolog of NCBI NO: 15239257 NR Description: glucuronosyl transferase-like protein; protein At5g05860.1, supported by cDNA: gi_15010631 [Arabidopsis >gi|15010632|gb|AAK73975.1| AT5g05860/MJJ3_28 [Arabidopsis
  misc_feature (9)..(455): Homolog of NCBI NO: 15229731 NR Description: glucosyl transferase, putative; protein id: [Arabidopsis thaliana] >gi|12321874|gb|AAG50970.1|AC073395_12
  misc_feature (9)..(455): Homolog of NCBI NO: 26452976 NR Description: unknown protein [Arabidopsis thaliana]
  misc_feature (1)..(455): Homolog of NCBI NO: 15228174 NR Description: glucuronosyl transferase - like protein; protein
  misc_feature (9)..(454): Homolog of NCBI NO: 629669 NR Description: glucuronosyl transferase homolog,
  misc_feature (11)..(455): Homolog of NCBI NO: 21593451 NR Description: glucuronosyl transferase-like protein
MEKSNGLRVILFPLPLQGCINPMIQLAKILHSRGFSITVIHTCFNAPKASSHPLFTFLEIPDGLSETEKRTNNTKLLLTLLNRNCESPFRECLSKLLQSADSETGEEKQRISCLIADSGWMFTQPIAQSLKLPILVLSVFTVSFFRCQFVLPKLRREVYLPLQDSEQEDLVQEFPPLRKKDIVRILDVETDILDPFLDKVLQMTKASSGLIFMSCEELDHDSVSQAREDFKIPIFGIGPSHSHFPATSSSLSTPDETCIPWLDKQEDKSVIYVSYGSIVTISESDLIEIAWGLRNSDQPFLLVVRVGSVRGREWIETIPEEIMEKLNEKGKIVKWAPQQDVLKHRAIGGFLTHNGWSSTVESVCEAVPMICLPFRWDQMLNARFVSDVWMVGINLEDRVERNEIEGAIRRLLVEPEGEAIRERIEHLKEKVGRSFQQNGSAYQSLQNLIDYISSF

SEQ ID NO: 79844 - protein, 433 aa, Arabidopsis thaliana
  peptide (1)..(433): Ceres Seq. ID no. 12653432
  misc_feature (1)..(431): Pfam Name: UDP-glucoronosyl and UDP-glucosyl transferase Pfam Description: UDP-glucoronosyl and UDP-glucosyl transferase
  misc_feature (1)..(433): Homolog of NCBI NO: 15239287 NR Description: glucuronosyl transferase-like protein; protein At5g05890.1 [Arabidopsis thaliana] >gi|10177562|dbj|BAB10794.1|
  misc_feature (1)..(433): Homolog of NCBI NO: 15239259 NR Description: glucuronosyl transferase-like protein; protein At5g05880.1 [Arabidopsis thaliana] >gi|10177561|dbj|BAB10793.1|
  misc_feature (1)..(433): Homolog of NCBI NO: 15239288 NR Description: glucuronosyl transferase-like protein; protein At5g05900.1 [Arabidopsis thaliana] >gi|10177563|dbj|BAB10795.1|
  misc_feature (1)..(431): Homolog of NCBI NO: 15239258 NR Description: glucuronosyl transferase-like protein; protein At5g05870.1 [Arabidopsis thaliana] >gi|10177560|dbj|BAB10792.1|
  misc_feature (1)..(430): Homolog of NCBI NO: 15239257 NR Description: glucuronosyl transferase-like protein; protein At5g05860.1, supported by cDNA: gi_15010631 [Arabidopsis >gi|15010632|gb|AAK73975.1| AT5g05860/MJJ3_28 [Arabidopsis
  misc_feature (1)..(433): Homolog of NCBI NO: 15229731 NR Description: glucosyl transferase, putative; protein id: [Arabidopsis thaliana] >gi|12321874|gb|AAG50970.1|AC073395_12
  misc_feature (1)..(433): Homolog of NCBI NO: 26452976 NR Description: unknown protein [Arabidopsis thaliana]
  misc_feature (1)..(433): Homolog of NCBI NO: 15228174 NR Description: glucuronosyl transferase - like protein; protein
  misc_feature (1)..(432): Homolog of NCBI NO: 629669 NR Description: glucuronosyl transferase homolog,
  misc_feature (1)..(433): Homolog of NCBI NO: 21593451 NR Description: glucuronosyl transferase-like protein
MIQLAKILHSRGFSITVIHTCFNAPKASSHPLFTFLEIPDGLSETEKRTNNTKLLLTLLNRNCESPFRECLSKLLQSADSETGEEKQRISCLIADSGWMFTQPIAQSLKLPILVLSVFTVSFFRCQFVLPKLRREVYLPLQDSEQEDLVQEFPPLRKKDIVRILDVETDILDPFLDKVLQMTKASSGLIFMSCEELDHDSVSQAREDFKIPIFGIGPSHSHFPATSSSLSTPDETCIPWLDKQEDKSVIYVSYGSIVTISESDLIEIAWGLRNSDQPFLLVVRVGSVRGREWIETIPEEIMEKLNEKGKIVKWAPQQDVLKHRAIGGFLTHNGWSSTVESVCEAVPMICLPFRWDQMLNARFVSDVWMVGINLEDRVERNEIEGAIRRLLVEPEGEAIRERIEHLKEKVGRSFQQNGSAYQSLQNLIDYISSF

SEQ ID NO: 79845 - protein, 335 aa, Arabidopsis thaliana
  peptide (1)..(335): Ceres Seq. ID no. 12653433
  misc_feature (1)..(333): Pfam Name: UDP-glucoronosyl and UDP-glucosyl transferase Pfam Description: UDP-glucoronosyl and UDP-glucosyl transferase
  misc_feature (1)..(335): Homolog of NCBI NO: 15239287 NR Description: glucuronosyl transferase-like protein; protein At5g05890.1 [Arabidopsis thaliana] >gi|10177562|dbj|BAB10794.1|
  misc_feature (1)..(335): Homolog of NCBI NO: 15239259 NR Description: glucuronosyl transferase-like protein; protein At5g05880.1 [Arabidopsis thaliana] >gi|10177561|dbj|BAB10793.1|
  misc_feature (1)..(335): Homolog of NCBI NO: 15239288 NR Description: glucuronosyl transferase-like protein; protein At5g05900.1 [Arabidopsis thaliana] >gi|10177563|dbj|BAB10795.1|
  misc_feature (1)..(333): Homolog of NCBI NO: 15239258 NR Description: glucuronosyl transferase-like protein; protein At5g05870.1 [Arabidopsis thaliana] >gi|10177560|dbj|BAB10792.1|
  misc_feature (1)..(332): Homolog of NCBI NO: 15239257 NR Description: glucuronosyl transferase-like protein; protein At5g05860.1, supported by cDNA: gi_15010631 [Arabidopsis >gi|15010632|gb|AAK73975.1| AT5g05860/MJJ3_28 [Arabidopsis
  misc_feature (1)..(335): Homolog of NCBI NO: 15229731 NR Description: glucosyl transferase, putative; protein id: [Arabidopsis thaliana] >gi|12321874|gb|AAG50970.1|AC073395_12
  misc_feature (1)..(335): Homolog of NCBI NO: 26452976 NR Description: unknown protein [Arabidopsis thaliana]
  misc_feature (1)..(335): Homolog of NCBI NO: 15228174 NR Description: glucuronosyl transferase - like protein; protein
  misc_feature (1)..(334): Homolog of NCBI NO: 629669 NR Description: glucuronosyl transferase homolog,
  misc_feature (1)..(335): Homolog of NCBI NO: 21593451 NR Description: glucuronosyl transferase-like protein
MFTQPIAQSLKLPILVLSVFTVSFFRCQFVLPKLRREVYLPLQDSEQEDLVQEFPPLRKKDIVRILDVETDILDPFLDKVLQMTKASSGLIFMSCEELDHDSVSQAREDFKIPIFGIGPSHSHFPATSSSLSTPDETCIPWLDKQEDKSVIYVSYGSIVTISESDLIEIAWGLRNSDQPFLLVVRVGSVRGREWIETIPEEIMEKLNEKGKIVKWAPQQDVLKHRAIGGFLTHNGWSSTVESVCEAVPMICLPFRWDQMLNARFVSDVWMVGINLEDRVERNEIEGAIRRLLVEPEGEAIRERIEHLKEKVGRSFQQNGSAYQSLQNLIDYISSF

SEQ ID NO: 79846 - DNA, 1353 bp, Arabidopsis thaliana
  misc_feature (1)..(1353): Ceres Seq. ID no. 12653434
  misc_feature: MA Experiment ID: 20000307 Result: Up-regulated in Transcription
  misc_feature: MA Experiment 20000307 PARAMETER Experiment Name: At_Germinating_Seeds_Sub_P Parameter: Age (hr) Value: 24 vs. 0
  misc_feature: MA Experiment 20000307 PARAMETER Experiment Name: At_Germinating_Seeds_Sub_P Parameter: Organism Value: A. thaliana
  misc_feature: MA Experiment 20000307 PARAMETER Experiment Name: At_Germinating_Seeds_Sub_P Parameter: Plant Line Value: WS
  misc_feature: MA Experiment 20000307 PARAMETER Experiment Name: At_Germinating_Seeds_Sub_P Parameter: Tissue Value: Germinating Seeds
atggataagagtaatggcctacgagtgattctgtttccacttccattacaaggatgcatcaaccccatgattcagctagcgaagatcctccactcaagaggtttctccatcactgtgatccacacgcgcttcaatgcgccaaaagcttcaaaccaccctctgttcaccttcttacagatcccagatggcttgtctgaaacagagacaagaactcacgatatcacacttctcctaacgcttctcaaccgaagctgtgagtctccatttcgtgaatgtttgactaaacttttgcagtctgcagattcagaaacaggggaagagaaacagaggattagctgtttgatcgatgattctggatggatattcacacagcccgttgctcagagtttcaatctcccgagattggtccttaacacctacaaagtctccttctttcgggaccattttgttcttcctcaactccgtcgtgaaatgtatcttccattacaagattcagaacaaggtgatgatccagttgaggagtttccaccccttcgaaagaaagatcttttacaaattcttgatcaagaatcggagcaactagactcgtactccaatatgattttggaaacaacaaaagcgtcttcaggtcttatatttgtatccacatgtgaagagttggaccaagactcactgagtcaagcacgtgaagattatcaagtcccaatctttacgataggaccttctcatagctacttcccaggctcatctagtagcttgttcacagtggacgagacttgcattccatggttagacaagcaagaagacaaatccgtgatttacgtgagttttgggagcatctcgaccattggcgaagcagaattcatggagattgcttgggctctaagaaacagcgaccaaccgttcttgtgggtcgtacggggtggttcggtagtccatggtgcagaatggatcgaacagcttcatgagaaaggaaagatagtgaattgggccccacaacaagaggttctaaagcatcaagccattggaggattcttgacacacaatggttggaactcgacggttgagagtgtttttgaaggcgtccctatgatatgtatgccttttgtatgggaccaattgcttaatgcaagatttgttagtgatgtatggatggttgggctgcatctagagggtcggattgagaggaatgtgattgagggaatgataagaagattattttcggaaactgaaggaaaagcgatccgagagaggatggaaattcttaaggagaatgtaggaagatccgttaaaccaaaaggttcggcgtatcgatcgttacaacatttgattgattatataacatatttctag

SEQ ID NO: 79847 - protein, 450 aa, Arabidopsis thaliana
  peptide (1)..(450): Ceres Seq. ID no. 12653435
  misc_feature (8)..(448): Pfam Name: UDP-glucoronosyl and UDP-glucosyl transferase Pfam Description: UDP-glucoronosyl and UDP-glucosyl transferase
  misc_feature (1)..(450): Homolog of NCBI NO: 15239288 NR Description: glucuronosyl transferase-like protein; protein At5g05900.1 [Arabidopsis thaliana] >gi|10177563|dbj|BAB10795.1|
  misc_feature (1)..(450): Homolog of NCBI NO: 15239259 NR Description: glucuronosyl transferase-like protein; protein At5g05880.1 [Arabidopsis thaliana] >gi|10177561|dbj|BAB10793.1|
  misc_feature (1)..(450): Homolog of NCBI NO: 15239287 NR Description: glucuronosyl transferase-like protein; protein At5g05890.1 [Arabidopsis thaliana] >gi|10177562|dbj|BAB10794.1|
  misc_feature (1)..(448): Homolog of NCBI NO: 15239258 NR Description: glucuronosyl transferase-like protein; protein At5g05870.1 [Arabidopsis thaliana] >gi|10177560|dbj|BAB10792.1|
  misc_feature (2)..(447): Homolog of NCBI NO: 15239257 NR Description: glucuronosyl transferase-like protein; protein At5g05860.1, supported by cDNA: gi_15010631 [Arabidopsis >gi|15010632|gb|AAK73975.1| AT5g05860/MJJ3_28 [Arabidopsis
  misc_feature (9)..(450): Homolog of NCBI NO: 15229731 NR Description: glucosyl transferase, putative; protein id: [Arabidopsis thaliana] >gi|12321874|gb|AAG50970.1|AC073395_12
  misc_feature (9)..(450): Homolog of NCBI NO: 26452976 NR Description: unknown protein [Arabidopsis thaliana]
  misc_feature (1)..(450): Homolog of NCBI NO: 15228174 NR Description: glucuronosyl transferase - like protein; protein
  misc_feature (11)..(450): Homolog of NCBI NO: 21593451 NR Description: glucuronosyl transferase-like protein
  misc_feature (1)..(445): Homolog of NCBI NO: 18033228 NR Description: UDP-glucosyltransferase BX8 [Zea mays]
MDKSNGLRVILFPLPLQGCINPMIQLAKILHSRGFSITVIHTRFNAPKASNHPLFTFLQIPDGLSETETRTHDITLLLTLLNRSCESPFRECLTKLLQSADSETGEEKQRISCLIDDSGWIFTQPVAQSFNLPRLVLNTYKVSFFRDHFVLPQLRREMYLPLQDSEQGDDPVEEFPPLRKKDLLQILDQESEQLDSYSNMILETTKASSGLIFVSTCEELDQDSLSQAREDYQVPIFTIGPSHSYFPGSSSSLFTVDETCIPWLDKQEDKSVIYVSFGSISTIGEAEFMEIAWALRNSDQPFLWVVRGGSVVHGAEWIEQLHEKGKIVNWAPQQEVLKHQAIGGFLTHNGWNSTVESVFEGVPMICMPFVWDQLLNARFVSDVWMVGLHLEGRIERNVIEGMIRRLFSETEGKAIRERMEILKENVGRSVKPKGSAYRSLQHLIDYITYF

SEQ ID NO: 79848 - protein, 428 aa, Arabidopsis thaliana
  peptide (1)..(428): Ceres Seq. ID no. 12653436
  misc_feature (1)..(426): Pfam Name: UDP-glucoronosyl and UDP-glucosyl transferase Pfam Description: UDP-glucoronosyl and UDP-glucosyl transferase
  misc_feature (1)..(428): Homolog of NCBI NO: 15239288 NR Description: glucuronosyl transferase-like protein; protein At5g05900.1 [Arabidopsis thaliana] >gi|10177563|dbj|BAB10795.1|
  misc_feature (1)..(428): Homolog of NCBI NO: 15239259 NR Description: glucuronosyl transferase-like protein; protein At5g05880.1 [Arabidopsis thaliana] >gi|10177561|dbj|BAB10793.1|
  misc_feature (1)..(428): Homolog of NCBI NO: 15239287 NR Description: glucuronosyl transferase-like protein; protein At5g05890.1 [Arabidopsis thaliana] >gi|10177562|dbj|BAB10794.1|
  misc_feature (1)..(426): Homolog of NCBI NO: 15239258 NR Description: glucuronosyl transferase-like protein; protein At5g05870.1 [Arabidopsis thaliana] >gi|10177560|dbj|BAB10792.1|
  misc_feature (1)..(425): Homolog of NCBI NO: 15239257 NR Description: glucuronosyl transferase-like protein; protein At5g05860.1, supported by cDNA: gi_15010631 [Arabidopsis >gi|15010632|gb|AAK73975.1| AT5g05860/MJJ3_28 [Arabidopsis
  misc_feature (1)..(428): Homolog of NCBI NO: 15229731 NR Description: glucosyl transferase, putative; protein id: [Arabidopsis thaliana] >gi|12321874|gb|AAG50970.1|AC073395_12
  misc_feature (1)..(428): Homolog of NCBI NO: 26452976 NR Description: unknown protein [Arabidopsis thaliana]
  misc_feature (1)..(428): Homolog of NCBI NO: 15228174 NR Description: glucuronosyl transferase - like protein; protein
  misc_feature (1)..(428): Homolog of NCBI NO: 21593451 NR Description: glucuronosyl transferase-like protein
  misc_feature (1)..(423): Homolog of NCBI NO: 18033228 NR Description: UDP-glucosyltransferase BX8 [Zea mays]
MIQLAKILHSRGFSITVIHTRFNAPKASNHPLFTFLQIPDGLSETETRTHDITLLLTLLNRSCESPFRECLTKLLQSADSETGEEKQRISCLIDDSGWIFTQPVAQSFNLPRLVLNTYKVSFFRDHFVLPQLRREMYLPLQDSEQGDDPVEEFPPLRKKDLLQILDQESEQLDSYSNMILETTKASSGLIFVSTCEELDQDSLSQAREDYQVPIFTIGPSHSYFPGSSSSLFTVDETCIPWLDKQEDKSVIYVSFGSISTIGEAEFMEIAWALRNSDQPFLWVVRGGSVVHGAEWIEQLHEKGKIVNWAPQQEVLKHQAIGGFLTHNGWNSTVESVFEGVPMICMPFVWDQLLNARFVSDVWMVGLHLEGRIERNVIEGMIRRLFSETEGKAIRERMEILKENVGRSVKPKGSAYRSLQHLIDYITYF

SEQ ID NO: 79849 - protein, 293 aa, Arabidopsis thaliana
  peptide (1)..(293): Ceres Seq. ID no. 12653437
  misc_feature (1)..(291): Pfam Name: UDP-glucoronosyl and UDP-glucosyl transferase Pfam Description: UDP-glucoronosyl and UDP-glucosyl transferase
  misc_feature (1)..(293): Homolog of NCBI NO: 15239288 NR Description: glucuronosyl transferase-like protein; protein At5g05900.1 [Arabidopsis thaliana] >gi|10177563|dbj|BAB10795.1|
  misc_feature (1)..(293): Homolog of NCBI NO: 15239259 NR Description: glucuronosyl transferase-like protein; protein At5g05880.1 [Arabidopsis thaliana] >gi|10177561|dbj|BAB10793.1|
  misc_feature (1)..(293): Homolog of NCBI NO: 15239287 NR Description: glucuronosyl transferase-like protein; protein At5g05890.1 [Arabidopsis thaliana] >gi|10177562|dbj|BAB10794.1|
  misc_feature (1)..(291): Homolog of NCBI NO: 15239258 NR Description: glucuronosyl transferase-like protein; protein At5g05870.1 [Arabidopsis thaliana] >gi|10177560|dbj|BAB10792.1|
  misc_feature (1)..(290): Homolog of NCBI NO: 15239257 NR Description: glucuronosyl transferase-like protein; protein At5g05860.1, supported by cDNA: gi_15010631 [Arabidopsis >gi|15010632|gb|AAK73975.1| AT5g05860/MJJ3_28 [Arabidopsis
  misc_feature (1)..(293): Homolog of NCBI NO: 15229731 NR Description: glucosyl transferase, putative; protein id: [Arabidopsis thaliana] >gi|12321874|gb|AAG50970.1|AC073395_12
  misc_feature (1)..(293): Homolog of NCBI NO: 26452976 NR Description: unknown protein [Arabidopsis thaliana]
  misc_feature (1)..(293): Homolog of NCBI NO: 15228174 NR Description: glucuronosyl transferase - like protein; protein
  misc_feature (1)..(293): Homolog of NCBI NO: 21593451 NR Description: glucuronosyl transferase-like protein
  misc_feature (1)..(288): Homolog of NCBI NO: 18033228 NR Description: UDP-glucosyltransferase BX8 [Zea mays]
MYLPLQDSEQGDDPVEEFPPLRKKDLLQILDQESEQLDSYSNMILETTKASSGLIFVSTCEELDQDSLSQAREDYQVPIFTIGPSHSYFPGSSSSLFTVDETCIPWLDKQEDKSVIYVSFGSISTIGEAEFMEIAWALRNSDQPFLWVVRGGSVVHGAEWIEQLHEKGKIVNWAPQQEVLKHQAIGGFLTHNGWNSTVESVFEGVPMICMPFVWDQLLNARFVSDVWMVGLHLEGRIERNVIEGMIRRLFSETEGKAIRERMEILKENVGRSVKPKGSAYRSLQHLIDYITYF

SEQ ID NO: 79850 - DNA, 1503 bp, Arabidopsis thaliana
  misc_feature (1)..(1503): Ceres Seq. ID no. 12653452
  misc_feature: MA Experiment ID: 20000314 Result: Up-regulated in Transcription
  misc_feature: MA Experiment 20000314 PARAMETER Experiment Name: At_14day_Shoots-Roots_Sub_P Parameter: Age (day) Value: 14
  misc_feature: MA Experiment 20000314 PARAMETER Experiment Name: At_14day_Shoots-Roots_Sub_P Parameter: Organism Value: A. thaliana
  misc_feature: MA Experiment 20000314 PARAMETER Experiment Name: At_14day_Shoots-Roots_Sub_P Parameter: Plant Line Value: WS
  misc_feature: MA Experiment 20000314 PARAMETER Experiment Name: At_14day_Shoots-Roots_Sub_P Parameter: Tissue Value: Roots vs. Whole Plant
  misc_feature: MA Experiment ID: 20000352 Result: Up-regulated in Transcription
  misc_feature: MA Experiment 20000352 PARAMETER Experiment Name: At_Drought_Sub_P Parameter: Age (day) Value: 7
  misc_feature: MA Experiment 20000352 PARAMETER Experiment Name: At_Drought_Sub_P Parameter: Organism Value: A. thaliana
  misc_feature: MA Experiment 20000352 PARAMETER Experiment Name: At_Drought_Sub_P Parameter: Plant Line Value: WS
  misc_feature: MA Experiment 20000352 PARAMETER Experiment Name: At_Drought_Sub_P Parameter: Timepoint (hr) Value: 6
  misc_feature: MA Experiment 20000352 PARAMETER Experiment Name: At_Drought_Sub_P Parameter: Tissue Value: Whole Plant
  misc_feature: MA Experiment 20000352 PARAMETER Experiment Name: At_Drought_Sub_P Parameter: Treatment Value: Drought vs. No Drought
atggagtcatcaactacaacatcgtattcagttgtgtcggagctagaaggaacactactgaaaaacccaaaacccttcgcctacttcatgctcgtagctttcgaggcttcaggactaatccgttttgcgaccttgctgtttctctggcctatcatagcactccttgacgttttgggctacagaaacggtagccttaagttaatgatcttcgtcgcaacggccggtttgcacgaatcagagattgaatcagtggctcgagcggttcttcccaaattcttcatggacgatatcagcatggacgcttggagggcgtttggttcgtgcgataagagagtcgttgtgacaagaatgccacgagttatggtggagagattcgctaaggatcatcttagcgccgatgaggtcatcggtacagagattgtcgtaaaccgtttcggttatgctaccggtttgattcaggaaaccaatgtggaccaatctgttttcaacagtgtggctaacttgtttgtggatcggagacctcaactaggtctaggacgacatattatctcggattctccaactttcctatctttatgtgaggagcaagttcatgcaccagttccatcgaactacaacggtcataaccagcggctacatgtgcagccgttaccagttatcttccacgatggacgacttgtgaagctaccaacaccagccaccgcactcatcatccttctttggatcccctttggaataattctagccatgattcggatattcgttgggttcttacttccattatgggccataccttacgtctcacggatattcaacactcgattcatcgtaaaaggaaagcctccggcacaagcaaccaccggaaacccaggcgtactattcgtatgcactcatagaactctaatggatccggtcgtattatcctatgtgctcggacgtagcattccagctgttacctactctatttctcgtttatccgagatcctatctccgattccaacctttaggttaactagaattcgagatgtagatgcggagatgatcaagaaagaactgtctaatggggacttagtggtatatcccgagggaaccacttgtcgcgagccgtttttgctgagatttagcgcgcttttcgcagaattaaccgacaatattgtgcccgtggcaatgaactacagagttggattctttcatgcgactaccgctagaggctggaaaggtttggacccgatcttctttttcatgaacccgagaccggtttatgaggtgacgttcttgaaccagctcgaggtggaggcgacgtgttcgtcagggaagagcccttatgacgtggctaactatgtacagagaatcttggcagctacgttaggctttgagtgtactaactttacgaggaaggataagtatagagttctcgcagggaacgacggaaccgtgtcgtatttgtcgtttctcgatcaagtcaagaaggtcgtcaccactttcaaaccttttttgcattaa

SEQ ID NO: 79851 - protein, 500 aa, Arabidopsis thaliana
  peptide (1)..(500): Ceres Seq. ID no. 12653453
  misc_feature (274)..(391): Pfam Name: Acyltransferase Pfam Description: Acyltransferase
  misc_feature (1)..(500): Homolog of NCBI NO: 15239924 NR Description: putative protein; protein id: At5g06090.1 thaliana] >gi|8978345|dbj|BAA98198.1|
  misc_feature (1)..(500): Homolog of NCBI NO: 15229747 NR Description: unknown protein; protein id: At3g11430.1
  misc_feature (331)..(500): Homolog of NCBI NO: 22330983 NR Description: hypothetical protein; protein id: At3g11325.1
  misc_feature (19)..(123): Homolog of NCBI NO: 22330983 NR Description: hypothetical protein; protein id: At3g11325.1
  misc_feature (208)..(295): Homolog of NCBI NO: 22330983 NR Description: hypothetical protein; protein id: At3g11325.1
  misc_feature (10)..(489): Homolog of NCBI NO: 38000002 NR Description: unknown protein [Oryza sativa (japonica
  misc_feature (32)..(489): Homolog of NCBI NO: 29788867 NR Description: hypothetical protein [Oryza sativa (japonica
  misc_feature (2)..(479): Homolog of NCBI NO: 37534314 NR Description: hypothetical protein [Oryza sativa (japonica group)] >gi|31432061|gb|AAP53746.1| hypothetical protein [Oryza
  misc_feature (7)..(479): Homolog of NCBI NO: 15224445 NR Description: unknown protein; protein id: At2g38110.1, by cDNA: gi_17065289 [Arabidopsis thaliana]
  misc_feature (10)..(483): Homolog of NCBI NO: 15223437 NR Description: hypothetical protein; protein id: At1g01610.1, by cDNA: gi_17064779, supported by cDNA: gi_20259891 [Arabidopsis
MESSTTTSYSVVSELEGTLLKNPKPFAYFMLVAFEASGLIRFATLLFLWPIIALLDVLGYRNGSLKLMIFVATAGLHESEIESVARAVLPKFFMDDISMDAWRAFGSCDKRVVVTRMPRVMVERFAKDHLSADEVIGTEIVVNRFGYATGLIQETNVDQSVFNSVANLFVDRRPQLGLGRHIISDSPTFLSLCEEQVHAPVPSNYNGHNQRLHVQPLPVIFHDGRLVKLPTPATALIILLWIPFGIILAMIRIFVGFLLPLWAIPYVSRIFNTRFIVKGKPPAQATTGNPGVLFVCTHRTLMDPVVLSYVLGRSIPAVTYSISRLSEILSPIPTFRLTRIRDVDAEMIKKELSNGDLVVYPEGTTCREPFLLRFSALFAELTDNIVPVAMNYRVGFFHATTARGWKGLDPIFFFMNPRPVYEVTFLNQLEVEATCSSGKSPYDVANYVQRILAATLGFECTNFTRKDKYRVLAGNDGTVSYLSFLDQVKKVVTTFKPFLH

SEQ ID NO: 79852 - protein, 471 aa, Arabidopsis thaliana
  peptide (1)..(471): Ceres Seq. ID no. 12653454
  misc_feature (245)..(362): Pfam Name: Acyltransferase Pfam Description: Acyltransferase
  misc_feature (1)..(471): Homolog of NCBI NO: 15239924 NR Description: putative protein; protein id: At5g06090.1 thaliana] >gi|8978345|dbj|BAA98198.1|
  misc_feature (1)..(471): Homolog of NCBI NO: 15229747 NR Description: unknown protein; protein id: At3g11430.1
  misc_feature (302)..(471): Homolog of NCBI NO: 22330983 NR Description: hypothetical protein; protein id: At3g11325.1
  misc_feature (1)..(94): Homolog of NCBI NO: 22330983 NR Description: hypothetical protein; protein id: At3g11325.1
  misc_feature (179)..(266): Homolog of NCBI NO: 22330983 NR Description: hypothetical protein; protein id: At3g11325.1
  misc_feature (1)..(460): Homolog of NCBI NO: 38000002 NR Description: unknown protein [Oryza sativa (japonica
  misc_feature (3)..(460): Homolog of NCBI NO: 29788867 NR Description: hypothetical protein [Oryza sativa (japonica
  misc_feature (1)..(450): Homolog of NCBI NO: 37534314 NR Description: hypothetical protein [Oryza sativa (japonica group)] >gi|31432061|gb|AAP53746.1| hypothetical protein [Oryza
  misc_feature (1)..(450): Homolog of NCBI NO: 15224445 NR Description: unknown protein; protein id: At2g38110.1, by cDNA: gi_17065289 [Arabidopsis thaliana]
  misc_feature (1)..(454): Homolog of NCBI NO: 15223437 NR Description: hypothetical protein; protein id: At1g01610.1, by cDNA: gi_17064779, supported by cDNA: gi_20259891 [Arabidopsis
MLVAFEASGLIRFATLLFLWPIIALLDVLGYRNGSLKLMIFVATAGLHESEIESVARAVLPKFFMDDISMDAWRAFGSCDKRVVVTRMPRVMVERFAKDHLSADEVIGTEIVVNRFGYATGLIQETNVDQSVFNSVANLFVDRRPQLGLGRHIISDSPTFLSLCEEQVHAPVPSNYNGHNQRLHVQPLPVIFHDGRLVKLPTPATALIILLWIPFGIILAMIRIFVGFLLPLWAIPYVSRIFNTRFIVKGKPPAQATTGNPGVLFVCTHRTLMDPVVLSYVLGRSIPAVTYSISRLSEILSPIPTFRLTRIRDVDAEMIKKELSNGDLVVYPEGTTCREPFLLRFSALFAELTDNIVPVAMNYRVGFFHATTARGWKGLDPIFFFMNPRPVYEVTFLNQLEVEATCSSGKSPYDVANYVQRILAATLGFECTNFTRKDKYRVLAGNDGTVSYLSFLDQVKKVVTTFKPFLH

SEQ ID NO: 79853 - protein, 433 aa, Arabidopsis thaliana
  peptide (1)..(433): Ceres Seq. ID no. 12653455
  misc_feature (207)..(324): Pfam Name: Acyltransferase Pfam Description: Acyltransferase
  misc_feature (1)..(433): Homolog of NCBI NO: 15239924 NR Description: putative protein; protein id: At5g06090.1 thaliana] >gi|8978345|dbj|BAA98198.1|
  misc_feature (1)..(433): Homolog of NCBI NO: 15229747 NR Description: unknown protein; protein id: At3g11430.1
  misc_feature (264)..(433): Homolog of NCBI NO: 22330983 NR Description: hypothetical protein; protein id: At3g11325.1
  misc_feature (1)..(56): Homolog of NCBI NO: 22330983 NR Description: hypothetical protein; protein id: At3g11325.1
  misc_feature (141)..(228): Homolog of NCBI NO: 22330983 NR Description: hypothetical protein; protein id: At3g11325.1
  misc_feature (1)..(422): Homolog of NCBI NO: 38000002 NR Description: unknown protein [Oryza sativa (japonica
  misc_feature (1)..(422): Homolog of NCBI NO: 29788867 NR Description: hypothetical protein [Oryza sativa (japonica
  misc_feature (1)..(412): Homolog of NCBI NO: 37534314 NR Description: hypothetical protein [Oryza sativa (japonica group)] >gi|31432061|gb|AAP53746.1| hypothetical protein [Oryza
  misc_feature (1)..(412): Homolog of NCBI NO: 15224445 NR Description: unknown protein; protein id: At2g38110.1, by cDNA: gi_17065289 [Arabidopsis thaliana]
  misc_feature (1)..(416): Homolog of NCBI NO: 15223437 NR Description: hypothetical protein; protein id: At1g01610.1, by cDNA: gi_17064779, supported by cDNA: gi_20259891 [Arabidopsis
MIFVATAGLHESEIESVARAVLPKFFMDDISMDAWRAFGSCDKRVVVTRMPRVMVERFAKDHLSADEVIGTEIVVNRFGYATGLIQETNVDQSVFNSVANLFVDRRPQLGLGRHIISDSPTFLSLCEEQVHAPVPSNYNGHNQRLHVQPLPVIFHDGRLVKLPTPATALIILLWIPFGIILAMIRIFVGFLLPLWAIPYVSRIFNTRFIVKGKPPAQATTGNPGVLFVCTHRTLMDPVVLSYVLGRSIPAVTYSISRLSEILSPIPTFRLTRIRDVDAEMIKKELSNGDLVVYPEGTTCREPFLLRFSALFAELTDNIVPVAMNYRVGFFHATTARGWKGLDPIFFFMNPRPVYEVTFLNQLEVEATCSSGKSPYDVANYVQRILAATLGFECTNFTRKDKYRVLAGNDGTVSYLSFLDQVKKVVTTFKPFLH

SEQ ID NO: 79854 - DNA, 1532 bp, Arabidopsis thaliana
  misc_feature (1)..(1532): Ceres Seq. ID no. 12653467
  misc_feature: MA Experiment ID: 20000182 Result: Up-regulated in Transcription
  misc_feature: MA Experiment 20000182 PARAMETER Experiment Name: At_2mM_SA_P Parameter: Age (day) Value: 14
  misc_feature: MA Experiment 20000182 PARAMETER Experiment Name: At_2mM_SA_P Parameter: Organism Value: A. thaliana
  misc_feature: MA Experiment 20000182 PARAMETER Experiment Name: At_2mM_SA_P Parameter: Plant Line Value: WS
  misc_feature: MA Experiment 20000182 PARAMETER Experiment Name: At_2mM_SA_P Parameter: Timepoint (hr) Value: 6
  misc_feature: MA Experiment 20000182 PARAMETER Experiment Name: At_2mM_SA_P Parameter: Tissue Value: Aerial
  misc_feature: MA Experiment 20000182 PARAMETER Experiment Name: At_2mM_SA_P Parameter: Treatment Value: 2mM SA vs. No Treatment
  misc_feature: MA Experiment ID: 20000184 Result: Down-regulated in Transcription
  misc_feature: MA Experiment 20000184 PARAMETER Experiment Name: At_Shoots__P Parameter: Age (day) Value: 7
  misc_feature: MA Experiment 20000184 PARAMETER Experiment Name: At_Shoots__P Parameter: Tissue Value: Shoots vs. Whole Plant
  misc_feature: MA Experiment ID: 20000234 Result: Down-regulated in Transcription
  misc_feature: MA Experiment 20000234 PARAMETER Experiment Name: At_Siliques_P Parameter: Age (day) Value: 21
  misc_feature: MA Experiment 20000234 PARAMETER Experiment Name: At_Siliques_P Parameter: Organism Value: A. thaliana
  misc_feature: MA Experiment 20000234 PARAMETER Experiment Name: At_Siliques_P Parameter: Plant Line Value: WS
  misc_feature: MA Experiment 20000234 PARAMETER Experiment Name: At_Siliques_P Parameter: Tissue Value: Less Than 5mm Siliques vs. Whole Plant
  misc_feature: MA Experiment ID: 20000265 Result: Down-regulated in Transcription
  misc_feature: MA Experiment 20000265 PARAMETER Experiment Name: At_Open_Flower_P Parameter: Age (day) Value: 21
  misc_feature: MA Experiment 20000265 PARAMETER Experiment Name: At_Open_Flower_P Parameter: Plant Line Value: WS
  misc_feature: MA Experiment 20000265 PARAMETER Experiment Name: At_Open_Flower_P Parameter: Tissue Value: Closed Flower vs. Whole Plant
  misc_feature: MA Experiment ID: 20000286 Result: Down-regulated in Transcription
  misc_feature: MA Experiment 20000286 PARAMETER Experiment Name: At_Open_Flower_P Parameter: Age (day) Value: 21
  misc_feature: MA Experiment 20000286 PARAMETER Experiment Name: At_Open_Flower_P Parameter: Plant Line Value: WS
  misc_feature: MA Experiment 20000286 PARAMETER Experiment Name: At_Open_Flower_P Parameter: Tissue Value: Half Open vs. Whole Plant
  misc_feature: MA Experiment ID: 20000438 Result: Down-regulated in Transcription
  misc_feature: MA Experiment 20000438 PARAMETER Experiment Name: At_Shoots__P Parameter: Age (day) Value: 14
  misc_feature: MA Experiment 20000438 PARAMETER Experiment Name: At_Shoots__P Parameter: Tissue Value: Shoots vs. Whole Plant
  misc_feature: MA Experiment ID: 20000453 Result: Up-regulated in Transcription
  misc_feature: MA Experiment 20000453 PARAMETER Experiment Name: At_100uM_ABA_P Parameter: Age (day) Value: 15
  misc_feature: MA Experiment 20000453 PARAMETER Experiment Name: At_100uM_ABA_P Parameter: Organism Value: A. thaliana
  misc_feature: MA Experiment 20000453 PARAMETER Experiment Name: At_100uM_ABA_P Parameter: Plant Line Value: WS
  misc_feature: MA Experiment 20000453 PARAMETER Experiment Name: At_100uM_ABA_P Parameter: Timepoint (hr) Value: 24
  misc_feature: MA Experiment 20000453 PARAMETER Experiment Name: At_100uM_ABA_P Parameter: Tissue Value: Aerial
  misc_feature: MA Experiment 20000453 PARAMETER Experiment Name: At_100uM_ABA_P Parameter: Treatment Value: 100uM ABA vs. No Treatment
  misc_feature: MA Experiment ID: 20000527 Result: Down-regulated in Transcription
  misc_feature: MA Experiment 20000527 PARAMETER Experiment Name: At_10percent_PEG_P Parameter: Age (day) Value: 20
  misc_feature: MA Experiment 20000527 PARAMETER Experiment Name: At_10percent_PEG_P Parameter: Organism Value: A. thaliana
  misc_feature: MA Experiment 20000527 PARAMETER Experiment Name: At_10percent_PEG_P Parameter: Plant Line Value: WS
  misc_feature: MA Experiment 20000527 PARAMETER Experiment Name: At_10percent_PEG_P Parameter: Timepoint (day) Value: 20
  misc_feature: MA Experiment 20000527 PARAMETER Experiment Name: At_10percent_PEG_P Parameter: Tissue Value: Whole Plant
  misc_feature: MA Experiment 20000527 PARAMETER Experiment Name: At_10percent_PEG_P Parameter: Treatment Value: 10percent PEG vs. No Treatment
  misc_feature: MA Experiment ID: 20000794 Result: Down-regulated in Transcription
  misc_feature: MA Experiment 20000794 PARAMETER Experiment Name: At_Petals_P Parameter: Age (day) Value: 23-25 days
  misc_feature: MA Experiment 20000794 PARAMETER Experiment Name: At_Petals_P Parameter: Plant Line Value: WS
  misc_feature: MA Experiment 20000794 PARAMETER Experiment Name: At_Petals_P Parameter: Tissue Value: Petals vs. Whole plant
  misc_feature: MA Experiment ID: 20001757 Result: Down-regulated in Transcription
  misc_feature: MA Experiment 20001757 PARAMETER Experiment Name: At_50mM_NH4NO3_L-to-H_P Parameter: Timepoint (hr) Value: 6
  misc_feature: MA Experiment 20001757 PARAMETER Experiment Name: At_50mM_NH4NO3_L-to-H_P Parameter: Tissue Value: Leaf
  misc_feature: MA Experiment 20001757 PARAMETER Experiment Name: At_50mM_NH4NO3_L-to-H_P Parameter: Treatment Value: 50mM NH4NO3 vs 100mM Mannitol
  misc_feature: MA Experiment ID: 20001904 Result: Up-regulated in Transcription
  misc_feature: MA Experiment 20001904 PARAMETER Experiment Name: At_Drought_Reproduction_P Parameter: Age (day) Value: 37
  misc_feature: MA Experiment 20001904 PARAMETER Experiment Name: At_Drought_Reproduction_P Parameter: Organism Value: A. thaliana
  misc_feature: MA Experiment 20001904 PARAMETER Experiment Name: At_Drought_Reproduction_P Parameter: Plant Line Value: WS
  misc_feature: MA Experiment 20001904 PARAMETER Experiment Name: At_Drought_Reproduction_P Parameter: Timepoint (day) Value: 7
  misc_feature: MA Experiment 20001904 PARAMETER Experiment Name: At_Drought_Reproduction_P Parameter: Tissue Value: Rosettes
  misc_feature: MA Experiment 20001904 PARAMETER Experiment Name: At_Drought_Reproduction_P Parameter: Treatment Value: Drought vs. No Drought
  misc_feature: MA Experiment ID: 20001905 Result: Up-regulated in Transcription
  misc_feature: MA Experiment 20001905 PARAMETER Experiment Name: At_Drought_Reproduction_P Parameter: Age (day) Value: 40
  misc_feature: MA Experiment 20001905 PARAMETER Experiment Name: At_Drought_Reproduction_P Parameter: Organism Value: A. thaliana
  misc_feature: MA Experiment 20001905 PARAMETER Experiment Name: At_Drought_Reproduction_P Parameter: Plant Line Value: WS
  misc_feature: MA Experiment 20001905 PARAMETER Experiment Name: At_Drought_Reproduction_P Parameter: Timepoint (day) Value: 10
  misc_feature: MA Experiment 20001905 PARAMETER Experiment Name: At_Drought_Reproduction_P Parameter: Tissue Value: Rosettes
  misc_feature: MA Experiment 20001905 PARAMETER Experiment Name: At_Drought_Reproduction_P Parameter: Treatment Value: Drought vs. No Drought
acatcttcaagatcaagaaacatctcttcgtcagcctctttttacttagcctcctcatattctcgaccgtggtcgtcgacgtcatgccctctcttcgtatcggattgttgtcatcgtcatcatcgcaaacagtaacaaaggagtgcgattactccaaaggaaaatgggttcgtcgagcatcatcatcatcatcatccgttaatggattgttttatggcgaagagtgtcgctttcttgactctggttttcgttgtcataagcatggaagaaaagattctggttatcttgattggcgatggcaaccacacggctgcgatcttccacgatttaacgcaagtgatttacttgagaggagtcggaacgggaggatagtgttcgtgggagattccatcggaagaaaccagtgggaatcccttatgtgcatgctctcacaagcaatacctaataaatctgagatctatgaagtaaatgggaaccctataactaaacacaagggctttctctccatgcgattccctcgggaaaacctcactgttgagtatcacagatcaccctttcttgtcgtgattggtcggccaccggataaatcaccgaaagagatcaaaaccacagtgagagttgatgagtttaactggcagtcgaaaagatgggtcgggtcagacgttctggtcttcaattcagggcattggtggaacgaagacaaaactgtgttaacgggatgctattttgaggagggaaggaaagtgaacaagacaatgggagtaatggaggcatttggaaagtctttgaagacatggaagtcatgggtcttggagaaacttgatcctgacaagagttatgtcttcttcagaagctactctccagtgcactacagaaatgggacatggaataccggtggtctatgtgatgcagagattgagcctgagactgataaaaggaagctggaacctgatgcgagtcacaatgaatatatctataaagtaattgaagaaatgagatatcgacatagtaaggttaagtttctgaacattacatatctgacagagtttaggaaagatggtcatatttctcggtatcgagagcaaggcacttctgttgatgttcctcaagactgtagccactggtgcctacccggtgtaccagatacatggaatgagatcctctatgcgcaactcttgtcaatgaactatagaacaaagtgattccttgaggttcaacctttcggctccgtaggtcgaaggtatctgaacaaaaaaggaaaaaagtgttctttatcaacttgattgaagaaatgtacagaagagaagaagcaagtaaaaaagaaagcattaccaagcctggcacatatctctgaattgcagcaagcatagccgcatgaccaactgctgtgacctgttagacataagtgcccattagattagttcatagactcagacatattgtaaatgttaaggtagatgtaatgatacagtgattggtattacgggattttgtacaaagagcaaccatcaatagatcagcataaaagttgt

SEQ ID NO: 79855 - protein, 399 aa, Arabidopsis thaliana
  peptide (1)..(399): Ceres Seq. ID no. 12653468
  misc_feature (229)..(391): Pfam Name: Arabidopsis proteins of unknown function Pfam Description: Arabidopsis proteins of unknown function
  misc_feature (1)..(399): Homolog of NCBI NO: 9759321 NR Description: gb|AAF00670.1~gene_id:MBL20.11~strong similarity
  misc_feature (28)..(399): Homolog of NCBI NO: 18415139 NR Description: putative protein; protein id: At5g06230.1, by cDNA: gi_13605530 [Arabidopsis thaliana] AT5g06230/MBL20_11 [Arabidopsis thaliana]
  misc_feature (3)..(399): Homolog of NCBI NO: 15229797 NR Description: hypothetical protein; protein id: At3g11570.1
  misc_feature (30)..(389): Homolog of NCBI NO: 6862912 NR Description: unknown protein [Arabidopsis thaliana]
  misc_feature (32)..(392): Homolog of NCBI NO: 15239660 NR Description: putative protein; protein id: At5g19160.1
  misc_feature (48)..(392): Homolog of NCBI NO: 15242021 NR Description: putative protein; protein id: At5g20590.1,
  misc_feature (46)..(392): Homolog of NCBI NO: 15228743 NR Description: putative protein; protein id: At3g62390.1, by cDNA: 126100. [Arabidopsis thaliana] >gi|11357988|pir||T48031
  misc_feature (24)..(399): Homolog of NCBI NO: 22330347 NR Description: hypothetical protein; protein id: At1g60790.1, by cDNA: gi_17979148 [Arabidopsis thaliana] unknown protein [Arabidopsis thaliana]
  misc_feature (48)..(392): Homolog of NCBI NO: 21592371 NR Description: unknown [Arabidopsis thaliana]
  misc_feature (46)..(392): Homolog of NCBI NO: 23617116 NR Description: leaf senescence related protein-like [Oryza
IFKIKKHLFVSLFLLSLLIFSTVVVDVMPSLRIGLLSSSSSQTVTKECDYSKGKWVRRASSSSSSVNGLFYGEECRFLDSGFRCHKHGRKDSGYLDWRWQPHGCDLPRFNASDLLERSRNGRIVFVGDSIGRNQWESLMCMLSQAIPNKSEIYEVNGNPITKHKGFLSMRFPRENLTVEYHRSPFLVVIGRPPDKSPKEIKTTVRVDEFNWQSKRWVGSDVLVFNSGHWWNEDKTVLTGCYFEEGRKVNKTMGVMEAFGKSLKTWKSWVLEKLDPDKSYVFFRSYSPVHYRNGTWNTGGLCDAEIEPETDKRKLEPDASHNEYIYKVIEEMRYRHSKVKFLNITYLTEFRKDGHISRYREQGTSVDVPQDCSHWCLPGVPDTWNEILYAQLLSMNYRTK

SEQ ID NO: 79856 - protein, 372 aa, Arabidopsis thaliana
  peptide (1)..(372): Ceres Seq. ID no. 12653469
  misc_feature (202)..(364): Pfam Name: Arabidopsis proteins of unknown function Pfam Description: Arabidopsis proteins of unknown function
  misc_feature (1)..(372): Homolog of NCBI NO: 9759321 NR Description: gb|AAF00670.1~gene_id:MBL20.11~strong similarity
  misc_feature (1)..(372): Homolog of NCBI NO: 18415139 NR Description: putative protein; protein id: At5g06230.1, by cDNA: gi_13605530 [Arabidopsis thaliana] AT5g06230/MBL20_11 [Arabidopsis thaliana]
  misc_feature (1)..(372): Homolog of NCBI NO: 15229797 NR Description: hypothetical protein; protein id: At3g11570.1
  misc_feature (3)..(362): Homolog of NCBI NO: 6862912 NR Description: unknown protein [Arabidopsis thaliana]
  misc_feature (5)..(365): Homolog of NCBI NO: 15239660 NR Description: putative protein; protein id: At5g19160.1
  misc_feature (21)..(365): Homolog of NCBI NO: 15242021 NR Description: putative protein; protein id: At5g20590.1,
  misc_feature (19)..(365): Homolog of NCBI NO: 15228743 NR Description: putative protein; protein id: At3g62390.1, by cDNA: 126100. [Arabidopsis thaliana] >gi|11357988|pir||T48031
  misc_feature (1)..(372): Homolog of NCBI NO: 22330347 NR Description: hypothetical protein; protein id: At1g60790.1, by cDNA: gi_17979148 [Arabidopsis thaliana] unknown protein [Arabidopsis thaliana]
  misc_feature (21)..(365): Homolog of NCBI NO: 21592371 NR Description: unknown [Arabidopsis thaliana]
  misc_feature (19)..(365): Homolog of NCBI NO: 23617116 NR Description: leaf senescence related protein-like [Oryza
MPSLRIGLLSSSSSQTVTKECDYSKGKWVRRASSSSSSVNGLFYGEECRFLDSGFRCHKHGRKDSGYLDWRWQPHGCDLPRFNASDLLERSRNGRIVFVGDSIGRNQWESLMCMLSQAIPNKSEIYEVNGNPITKHKGFLSMRFPRENLTVEYHRSPFLVVIGRPPDKSPKEIKTTVRVDEFNWQSKRWVGSDVLVFNSGHWWNEDKTVLTGCYFEEGRKVNKTMGVMEAFGKSLKTWKSWVLEKLDPDKSYVFFRSYSPVHYRNGTWNTGGLCDAEIEPETDKRKLEPDASHNEYIYKVIEEMRYRHSKVKFLNITYLTEFRKDGHISRYREQGTSVDVPQDCSHWCLPGVPDTWNEILYAQLLSMNYRTK

SEQ ID NO: 79857 - protein, 261 aa, Arabidopsis thaliana
  peptide (1)..(261): Ceres Seq. ID no. 12653470
  misc_feature (91)..(253): Pfam Name: Arabidopsis proteins of unknown function Pfam Description: Arabidopsis proteins of unknown function
  misc_feature (1)..(261): Homolog of NCBI NO: 9759321 NR Description: gb|AAF00670.1~gene_id:MBL20.11~strong similarity
  misc_feature (1)..(261): Homolog of NCBI NO: 18415139 NR Description: putative protein; protein id: At5g06230.1, by cDNA: gi_13605530 [Arabidopsis thaliana] AT5g06230/MBL20_11 [Arabidopsis thaliana]
  misc_feature (1)..(261): Homolog of NCBI NO: 15229797 NR Description: hypothetical protein; protein id: At3g11570.1
  misc_feature (1)..(251): Homolog of NCBI NO: 6862912 NR Description: unknown protein [Arabidopsis thaliana]
  misc_feature (1)..(254): Homolog of NCBI NO: 15239660 NR Description: putative protein; protein id: At5g19160.1
  misc_feature (1)..(254): Homolog of NCBI NO: 15242021 NR Description: putative protein; protein id: At5g20590.1,
  misc_feature (1)..(254): Homolog of NCBI NO: 15228743 NR Description: putative protein; protein id: At3g62390.1, by cDNA: 126100. [Arabidopsis thaliana] >gi|11357988|pir||T48031
  misc_feature (1)..(261): Homolog of NCBI NO: 22330347 NR Description: hypothetical protein; protein id: At1g60790.1, by cDNA: gi_17979148 [Arabidopsis thaliana] unknown protein [Arabidopsis thaliana]
  misc_feature (1)..(254): Homolog of NCBI NO: 21592371 NR Description: unknown [Arabidopsis thaliana]
  misc_feature (1)..(254): Homolog of NCBI NO: 23617116 NR Description: leaf senescence related protein-like [Oryza
MCMLSQAIPNKSEIYEVNGNPITKHKGFLSMRFPRENLTVEYHRSPFLVVIGRPPDKSPKEIKTTVRVDEFNWQSKRWVGSDVLVFNSGHWWNEDKTVLTGCYFEEGRKVNKTMGVMEAFGKSLKTWKSWVLEKLDPDKSYVFFRSYSPVHYRNGTWNTGGLCDAEIEPETDKRKLEPDASHNEYIYKVIEEMRYRHSKVKFLNITYLTEFRKDGHISRYREQGTSVDVPQDCSHWCLPGVPDTWNEILYAQLLSMNYRTK

SEQ ID NO: 79858 - DNA, 624 bp, Arabidopsis thaliana
  misc_feature (1)..(624): Ceres Seq. ID no. 12653478
  misc_feature: MA Experiment ID: 20000307 Result: Down-regulated in Transcription
  misc_feature: MA Experiment 20000307 PARAMETER Experiment Name: At_Germinating_Seeds_Sub_P Parameter: Age (hr) Value: 24 vs. 0
  misc_feature: MA Experiment 20000307 PARAMETER Experiment Name: At_Germinating_Seeds_Sub_P Parameter: Organism Value: A. thaliana
  misc_feature: MA Experiment 20000307 PARAMETER Experiment Name: At_Germinating_Seeds_Sub_P Parameter: Plant Line Value: WS
  misc_feature: MA Experiment 20000307 PARAMETER Experiment Name: At_Germinating_Seeds_Sub_P Parameter: Tissue Value: Germinating Seeds
  misc_feature: MA Experiment ID: 20000314 Result: Up-regulated in Transcription
  misc_feature: MA Experiment 20000314 PARAMETER Experiment Name: At_14day_Shoots-Roots_Sub_P Parameter: Age (day) Value: 14
  misc_feature: MA Experiment 20000314 PARAMETER Experiment Name: At_14day_Shoots-Roots_Sub_P Parameter: Organism Value: A. thaliana
  misc_feature: MA Experiment 20000314 PARAMETER Experiment Name: At_14day_Shoots-Roots_Sub_P Parameter: Plant Line Value: WS
  misc_feature: MA Experiment 20000314 PARAMETER Experiment Name: At_14day_Shoots-Roots_Sub_P Parameter: Tissue Value: Roots vs. Whole Plant
  misc_feature: MA Experiment ID: 20000440 Result: Up-regulated in Transcription
  misc_feature: MA Experiment 20000440 PARAMETER Experiment Name: At_Closed-Flower__Sub_P Parameter: Tissue Value: Closed Flower vs. Whole Plant
atgacctcaaaagactgtggctctcacgacagccactcatcatgcaaccgtaaaatagtgatctggacgatatcaataatcctcctcttaatccttgtcgtaattctcctagtttgggcaatccttcaaccatcgaaaccacgcttcgtcctccaagacgccaccgtcttcaacttcaacgtctccggcaatccaccgaacctcctcacctcaaatttccaattcactctctcctctcgtaaccctaacgacaagatcggtatctactacgaccgtcttgacgtctacgcttcttaccggagccaacagatcactttgccgagtcccatgcttaccacttatcaaggacacaaagaagtcaacgtttggtctcctttcgtcggtggatactccgttcctgtggctccgtacaacgctttctatctcgatcaggaccattcaagtggcgcgatcatgttgatgcttcatctcgacggtcgagttcgttggaaagtcggatccttcatcaccggaaaatatcatctccacgttagatgtcatgcgcttatcaacttcgggagtagtgctgccggagttatcgtcggaaagtacatgctcaccgaaacttgtagtgttagtgtttga

SEQ ID NO: 79859 - protein, 207 aa, Arabidopsis thaliana
  peptide (1)..(207): Ceres Seq. ID no. 12653479
  misc_feature (1)..(207): Homolog of NCBI NO: 15240001 NR Description: hairpin-induced protein, putative (HIN1); protein
  misc_feature (4)..(207): Homolog of NCBI NO: 18399308 NR Description: VAMP protein SEC22; protein id: At3g11660.1, by cDNA: 8166., supported by cDNA: gi_9502171 [Arabidopsis
  misc_feature (4)..(207): Homolog of NCBI NO: 28392929 NR Description: putative VAMP protein SEC22 [Arabidopsis thaliana]
  misc_feature (1)..(207): Homolog of NCBI NO: 15227538 NR Description: hairpin-induced protein, putative (HIN1); protein
  misc_feature (3)..(207): Homolog of NCBI NO: 15231227 NR Description: hairpin-induced protein, putative (HIN1); protein At3g52470.1, supported by cDNA: 92178., supported by cDNA: supported by cDNA: gi_21281063 [Arabidopsis thaliana]
  misc_feature (1)..(207): Homolog of NCBI NO: 15229906 NR Description: hairpin-induced protein, putative (HIN1); protein At3g44220.1 [Arabidopsis thaliana] >gi|11282595|pir||T49138
  misc_feature (1)..(206): Homolog of NCBI NO: 15233951 NR Description: hairpin-induced protein, putative (HIN1); protein At4g09590.1 [Arabidopsis thaliana] >gi|25354574|pir||A85098
  misc_feature (1)..(206): Homolog of NCBI NO: 15227540 NR Description: hairpin-induced protein, putative (HIN1); protein
  misc_feature (1)..(207): Homolog of NCBI NO: 22326984 NR Description: similar to hairpin-induced protein, putative
  misc_feature (1)..(191): Homolog of NCBI NO: 38637038 NR Description: harpin-induced protein 1 family (HIN1)-like
MTSKDCGSHDSHSSCNRKIVIWTISIILLLILVVILLVWAILQPSKPRFVLQDATVFNFNVSGNPPNLLTSNFQFTLSSRNPNDKIGIYYDRLDVYASYRSQQITLPSPMLTTYQGHKEVNVWSPFVGGYSVPVAPYNAFYLDQDHSSGAIMLMLHLDGRVRWKVGSFITGKYHLHVRCHALINFGSSAAGVIVGKYMLTETCSVSV

SEQ ID NO: 79860 - DNA, 720 bp, Arabidopsis thaliana
  misc_feature (1)..(720): Ceres Seq. ID no. 12653495
  misc_feature: MA Experiment ID: 20000184 Result: Down-regulated in Transcription
  misc_feature: MA Experiment 20000184 PARAMETER Experiment Name: At_Shoots__P Parameter: Age (day) Value: 7
  misc_feature: MA Experiment 20000184 PARAMETER Experiment Name: At_Shoots__P Parameter: Tissue Value: Shoots vs. Whole Plant
  misc_feature: MA Experiment ID: 20000185 Result: Down-regulated in Transcription
  misc_feature: MA Experiment 20000185 PARAMETER Experiment Name: At_Roots__P Parameter: Age (day) Value: 7 vs. 21
  misc_feature: MA Experiment 20000185 PARAMETER Experiment Name: At_Roots__P Parameter: Organism Value: A. thaliana
  misc_feature: MA Experiment 20000185 PARAMETER Experiment Name: At_Roots__P Parameter: Tissue Value: Roots vs. Whole Plant
  misc_feature: MA Experiment ID: 20000438 Result: Down-regulated in Transcription
  misc_feature: MA Experiment 20000438 PARAMETER Experiment Name: At_Shoots__P Parameter: Age (day) Value: 14
  misc_feature: MA Experiment 20000438 PARAMETER Experiment Name: At_Shoots__P Parameter: Tissue Value: Shoots vs. Whole Plant
  misc_feature: MA Experiment ID: 20000439 Result: Down-regulated in Transcription
  misc_feature: MA Experiment 20000439 PARAMETER Experiment Name: At_Roots__P Parameter: Age (day) Value: 14 vs. 21
  misc_feature: MA Experiment 20000439 PARAMETER Experiment Name: At_Roots__P Parameter: Organism Value: A. thaliana
  misc_feature: MA Experiment 20000439 PARAMETER Experiment Name: At_Roots__P Parameter: Tissue Value: Roots vs. Whole Plant
  misc_feature: MA Experiment ID: 20001911 Result: Down-regulated in Transcription
  misc_feature: MA Experiment 20001911 PARAMETER Experiment Name: At_Drought_Reproduction_P Parameter: Age (day) Value: 40
  misc_feature: MA Experiment 20001911 PARAMETER Experiment Name: At_Drought_Reproduction_P Parameter: Organism Value: A. thaliana
  misc_feature: MA Experiment 20001911 PARAMETER Experiment Name: At_Drought_Reproduction_P Parameter: Plant Line Value: WS
  misc_feature: MA Experiment 20001911 PARAMETER Experiment Name: At_Drought_Reproduction_P Parameter: Timepoint (day) Value: 10
  misc_feature: MA Experiment 20001911 PARAMETER Experiment Name: At_Drought_Reproduction_P Parameter: Tissue Value: Flowers
  misc_feature: MA Experiment 20001911 PARAMETER Experiment Name: At_Drought_Reproduction_P Parameter: Treatment Value: Drought vs. No Drought
atgaagggaatgaaggaaagattggtgaagaaaatcaaactcatcaccactgtcaagacgttgaagcaaagcttaactcttcataagagtaccattgatcgcacaatccatcatctaagagacgaaatagtcgctgaatctggtcaaagcaaaggttgtgttacaccaacactactagagcttgaggatgcagaggaacataatcttgaagaagaaagagggattcttctggagtttaaagagaattgcccacccggaggagaagattcggttgtattctacacgacgggcctgcgaagtgtgaggaaaacatttgaagcttgcagaagagtgagattcttgttggagaatcaccaggtgatgtatagagagagagacgtttccatggattcagagtttagagaagagatgtggaggttgcttggtgggaaagttacctctccgaggctgttcattagaggtaggtacattggtggagcagaagaagttgtggcattgaacgagaacgggaagctgaagaagctactacaaggaatctcacaggttgattcaccttgcgagtcttgcgagaacgaaaggtttttgatatgttctagctgcaatggaagcacaagattgcttgcagagcatcacgatgaagagagtagtaatgataatatgtggacaagatgcagagaatgtaatgagaatggacttgtgaaatgtcctctttgtacgtag

SEQ ID NO: 79861 - protein, 239 aa, Arabidopsis thaliana
  peptide (1)..(239): Ceres Seq. ID no. 12653496
  misc_feature (90)..(176): Pfam Name: Glutaredoxin Pfam Description: Glutaredoxin
  misc_feature (1)..(239): Homolog of NCBI NO: 15240060 NR Description: putative protein; protein id: At5g06470.1 thaliana] >gi|9758427|dbj|BAB08969.1|
  misc_feature (83)..(239): Homolog of NCBI NO: 38346321 NR Description: OJ000126_13.3 [Oryza sativa (japonica
  misc_feature (70)..(238): Homolog of NCBI NO: 34899868 NR Description: OJ1714_H10.16 [Oryza sativa (japonica
  misc_feature (76)..(239): Homolog of NCBI NO: 15240974 NR Description: putative protein; protein id: At5g01420.1
  misc_feature (76)..(239): Homolog of NCBI NO: 26451045 NR Description: unknown protein [Arabidopsis thaliana]
  misc_feature (42)..(239): Homolog of NCBI NO: 15237554 NR Description: putative protein; protein id: At5g03870.1
  misc_feature (76)..(238): Homolog of NCBI NO: 15217659 NR Description: peptide transporter, putative; protein id: supported by cDNA: gi_15810442, supported by cDNA: gi_17381051
  misc_feature (76)..(238): Homolog of NCBI NO: 17381052 NR Description: putative peptide transporter protein [Arabidopsis
  misc_feature (76)..(239): Homolog of NCBI NO: 15223291 NR Description: unknown protein; protein id: At1g32760.1 thaliana] >gi|6714276|gb|AAF25972.1|AC017118_9 F6N18.14
  misc_feature (78)..(239): Homolog of NCBI NO: 15235179 NR Description: putative protein; protein id: At4g10630.1
MKGMKERLVKKIKLITTVKTLKQSLTLHKSTIDRTIHHLRDEIVAESGQSKGCVTPTLLELEDAEEHNLEEERGILLEFKENCPPGGEDSVVFYTTGLRSVRKTFEACRRVRFLLENHQVMYRERDVSMDSEFREEMWRLLGGKVTSPRLFIRGRYIGGAEEVVALNENGKLKKLLQGISQVDSPCESCENERFLICSSCNGSTRLLAEHHDEESSNDNMWTRCRECNENGLVKCPLCT

SEQ ID NO: 79862 - protein, 236 aa, Arabidopsis thaliana
  peptide (1)..(236): Ceres Seq. ID no. 12653497
  misc_feature (87)..(173): Pfam Name: Glutaredoxin Pfam Description: Glutaredoxin
  misc_feature (1)..(236): Homolog of NCBI NO: 15240060 NR Description: putative protein; protein id: At5g06470.1 thaliana] >gi|9758427|dbj|BAB08969.1|
  misc_feature (80)..(236): Homolog of NCBI NO: 38346321 NR Description: OJ000126_13.3 [Oryza sativa (japonica
  misc_feature (67)..(235): Homolog of NCBI NO: 34899868 NR Description: OJ1714_H10.16 [Oryza sativa (japonica
  misc_feature (73)..(236): Homolog of NCBI NO: 15240974 NR Description: putative protein; protein id: At5g01420.1
  misc_feature (73)..(236): Homolog of NCBI NO: 26451045 NR Description: unknown protein [Arabidopsis thaliana]
  misc_feature (39)..(236): Homolog of NCBI NO: 15237554 NR Description: putative protein; protein id: At5g03870.1
  misc_feature (73)..(235): Homolog of NCBI NO: 15217659 NR Description: peptide transporter, putative; protein id: supported by cDNA: gi_15810442, supported by cDNA: gi_17381051
  misc_feature (73)..(235): Homolog of NCBI NO: 17381052 NR Description: putative peptide transporter protein [Arabidopsis
  misc_feature (73)..(236): Homolog of NCBI NO: 15223291 NR Description: unknown protein; protein id: At1g32760.1 thaliana] >gi|6714276|gb|AAF25972.1|AC017118_9 F6N18.14
  misc_feature (75)..(236): Homolog of NCBI NO: 15235179 NR Description: putative protein; protein id: At4g10630.1
MKERLVKKIKLITTVKTLKQSLTLHKSTIDRTIHHLRDEIVAESGQSKGCVTPTLLELEDAEEHNLEEERGILLEFKENCPPGGEDSVVFYTTGLRSVRKTFEACRRVRFLLENHQVMYRERDVSMDSEFREEMWRLLGGKVTSPRLFIRGRYIGGAEEVVALNENGKLKKLLQGISQVDSPCESCENERFLICSSCNGSTRLLAEHHDEESSNDNMWTRCRECNENGLVKCPLCT

SEQ ID NO: 79863 - protein, 119 aa, Arabidopsis thaliana
  peptide (1)..(119): Ceres Seq. ID no. 12653498
  misc_feature (1)..(56): Pfam Name: Glutaredoxin Pfam Description: Glutaredoxin
  misc_feature (1)..(119): Homolog of NCBI NO: 15240060 NR Description: putative protein; protein id: At5g06470.1 thaliana] >gi|9758427|dbj|BAB08969.1|
  misc_feature (1)..(119): Homolog of NCBI NO: 38346321 NR Description: OJ000126_13.3 [Oryza sativa (japonica
  misc_feature (1)..(118): Homolog of NCBI NO: 34899868 NR Description: OJ1714_H10.16 [Oryza sativa (japonica
  misc_feature (1)..(119): Homolog of NCBI NO: 15240974 NR Description: putative protein; protein id: At5g01420.1
  misc_feature (1)..(119): Homolog of NCBI NO: 26451045 NR Description: unknown protein [Arabidopsis thaliana]
  misc_feature (1)..(119): Homolog of NCBI NO: 15237554 NR Description: putative protein; protein id: At5g03870.1
  misc_feature (1)..(118): Homolog of NCBI NO: 15217659 NR Description: peptide transporter, putative; protein id: supported by cDNA: gi_15810442, supported by cDNA: gi_17381051
  misc_feature (1)..(118): Homolog of NCBI NO: 17381052 NR Description: putative peptide transporter protein [Arabidopsis
  misc_feature (1)..(119): Homolog of NCBI NO: 15223291 NR Description: unknown protein; protein id: At1g32760.1 thaliana] >gi|6714276|gb|AAF25972.1|AC017118_9 F6N18.14
  misc_feature (1)..(119): Homolog of NCBI NO: 15235179 NR Description: putative protein; protein id: At4g10630.1
MYRERDVSMDSEFREEMWRLLGGKVTSPRLFIRGRYIGGAEEVVALNENGKLKKLLQGISQVDSPCESCENERFLICSSCNGSTRLLAEHHDEESSNDNMWTRCRECNENGLVKCPLCT

SEQ ID NO: 79864 - DNA, 1305 bp, Arabidopsis thaliana
  misc_feature (1)..(1305): Ceres Seq. ID no. 12653522
  misc_feature: MA Experiment ID: 20000307 Result: Up-regulated in Transcription
  misc_feature: MA Experiment 20000307 PARAMETER Experiment Name: At_Germinating_Seeds_Sub_P Parameter: Age (hr) Value: 24 vs. 0
  misc_feature: MA Experiment 20000307 PARAMETER Experiment Name: At_Germinating_Seeds_Sub_P Parameter: Organism Value: A. thaliana
  misc_feature: MA Experiment 20000307 PARAMETER Experiment Name: At_Germinating_Seeds_Sub_P Parameter: Plant Line Value: WS
  misc_feature: MA Experiment 20000307 PARAMETER Experiment Name: At_Germinating_Seeds_Sub_P Parameter: Tissue Value: Germinating Seeds
  misc_feature: MA Experiment ID: 20000314 Result: Up-regulated in Transcription
  misc_feature: MA Experiment 20000314 PARAMETER Experiment Name: At_14day_Shoots-Roots_Sub_P Parameter: Age (day) Value: 14
  misc_feature: MA Experiment 20000314 PARAMETER Experiment Name: At_14day_Shoots-Roots_Sub_P Parameter: Organism Value: A. thaliana
  misc_feature: MA Experiment 20000314 PARAMETER Experiment Name: At_14day_Shoots-Roots_Sub_P Parameter: Plant Line Value: WS
  misc_feature: MA Experiment 20000314 PARAMETER Experiment Name: At_14day_Shoots-Roots_Sub_P Parameter: Tissue Value: Roots vs. Whole Plant
atgggattaatgaattgcatggtttatgttgtggtcctaagtgctattgcggctacagtgacatcatacccttactcatctcctcataccccagcttacgattctcccagctatgaacacaaaggcccaaagtacgcaccacatccgaaaccatatgtttacagttctccaccaccaccatactatactccatcaccaaaggtaaactataaatctccaccaccaccatacgtctataattctccacctccaccgtactactctccttctccaaaggtttactacaagtccccacctccaccatacgtttacagctccccaccaccaccgtactactctccttctcctaaggtatactacaagtccccaccaccaccgtacgtctacagttccccaccaccactgtactactctccttcaccaaaggtttactacaagtccccaccaccaccatacgtctacagttccccaccaccaccgtactactctccttctccaaaggtttactacaagtccccacctccaccatacgtctacagctccccacccccaccgtactactctccatctccaaaggtatactacaagtccccaccaccaccgtacgtctacagttctccaccaccaccgtactactctccttctccaaaggtttactacaagtccccacctccaccatacgtctacagctccccacccccaccgtactactctccatctccaaaggtatactacaagtccccaccaccaccgtacgtctacagttctccaccaccaccgtactactctccttctccaaaggtttactataagtctccacctccaccatacgtctacagctccccaccaccaccgtactactctccttctcctaaggtatactacaagtccccaccaccaccgtacgtctacagttccccaccaccaccgtactactctccttctccaaaggtttactacaagtccccaccaccaccgtacgtctacagctccccacccccaccgtactactcaccatctccaaatgtatactacaagtccccaccaccaccgtacgtctacagttccccaccaccaccatactactctccttctcctaaagttcactacaagtccccacctccaccatacgtctacagctccccaccaccaccctattactctccttctcctaaggttcactacaagtctccaccaccaccatacgtctacagctccccacctcctccatactactctccttctcctaaagtcacttacaagtctccaccaccaccatatgtctacaagacgccttattattga

SEQ ID NO: 79865 - protein, 434 aa, Arabidopsis thaliana
  peptide (1)..(434): Ceres Seq. ID no. 12653523
  misc_feature (3)..(337): Pfam Name: Extensin-like region Pfam Description: Extensin-like region
  misc_feature (1)..(434): Homolog of NCBI NO: 10178119 NR Description: gb|AAD23015.1~gene_id:F15M7.16~similar to unknown
  misc_feature (1)..(434): Homolog of NCBI NO: 30681552 NR Description: proline-rich protein family [Arabidopsis thaliana]
  misc_feature (1)..(434): Homolog of NCBI NO: 15224658 NR Description: unknown protein; protein id: At2g24980.1
  misc_feature (1)..(434): Homolog of NCBI NO: 15240117 NR Description: putative protein; protein id: At5g06640.1 thaliana] >gi|10178120|dbj|BAB11413.1|
  misc_feature (23)..(434): Homolog of NCBI NO: 15224658 NR Description: unknown protein; protein id: At2g24980.1
  misc_feature (1)..(434): Homolog of NCBI NO: 15239790 NR Description: putative protein; protein id: At5g49080.1 thaliana] >gi|10176941|dbj|BAB10090.1|
  misc_feature (1)..(434): Homolog of NCBI NO: 15236486 NR Description: extensin-like protein; protein id: At4g08400.1
  misc_feature (23)..(434): Homolog of NCBI NO: 15224658 NR Description: unknown protein; protein id: At2g24980.1
  misc_feature (23)..(434): Homolog of NCBI NO: 15224658 NR Description: unknown protein; protein id: At2g24980.1
  misc_feature (1)..(434): Homolog of NCBI NO: 15236488 NR Description: extensin-like protein; protein id: At4g08410.1
MGLMNCMVYVVVLSAIAATVTSYPYSSPHTPAYDSPSYEHKGPKYAPHPKPYVYSSPPPPYYTPSPKVNYKSPPPPYVYNSPPPPYYSPSPKVYYKSPPPPYVYSSPPPPYYSPSPKVYYKSPPPPYVYSSPPPLYYSPSPKVYYKSPPPPYVYSSPPPPYYSPSPKVYYKSPPPPYVYSSPPPPYYSPSPKVYYKSPPPPYVYSSPPPPYYSPSPKVYYKSPPPPYVYSSPPPPYYSPSPKVYYKSPPPPYVYSSPPPPYYSPSPKVYYKSPPPPYVYSSPPPPYYSPSPKVYYKSPPPPYVYSSPPPPYYSPSPKVYYKSPPPPYVYSSPPPPYYSPSPNVYYKSPPPPYVYSSPPPPYYSPSPKVHYKSPPPPYVYSSPPPPYYSPSPKVHYKSPPPPYVYSSPPPPYYSPSPKVTYKSPPPPYVYKTPYY

SEQ ID NO: 79866 - protein, 431 aa, Arabidopsis thaliana
  peptide (1)..(431): Ceres Seq. ID no. 12653524
  misc_feature (1)..(334): Pfam Name: Extensin-like region Pfam Description: Extensin-like region
  misc_feature (1)..(431): Homolog of NCBI NO: 30681552 NR Description: proline-rich protein family [Arabidopsis thaliana]
  misc_feature (1)..(431): Homolog of NCBI NO: 10178119 NR Description: gb|AAD23015.1~gene_id:F15M7.16~similar to unknown
  misc_feature (1)..(431): Homolog of NCBI NO: 15224658 NR Description: unknown protein; protein id: At2g24980.1
  misc_feature (1)..(431): Homolog of NCBI NO: 15240117 NR Description: putative protein; protein id: At5g06640.1 thaliana] >gi|10178120|dbj|BAB11413.1|
  misc_feature (20)..(431): Homolog of NCBI NO: 15224658 NR Description: unknown protein; protein id: At2g24980.1
  misc_feature (1)..(431): Homolog of NCBI NO: 15239790 NR Description: putative protein; protein id: At5g49080.1 thaliana] >gi|10176941|dbj|BAB10090.1|
  misc_feature (1)..(431): Homolog of NCBI NO: 15236486 NR Description: extensin-like protein; protein id: At4g08400.1
  misc_feature (20)..(431): Homolog of NCBI NO: 15224658 NR Description: unknown protein; protein id: At2g24980.1
  misc_feature (20)..(431): Homolog of NCBI NO: 15224658 NR Description: unknown protein; protein id: At2g24980.1
  misc_feature (1)..(431): Homolog of NCBI NO: 15236488 NR Description: extensin-like protein; protein id: At4g08410.1
MNCMVYVVVLSAIAATVTSYPYSSPHTPAYDSPSYEHKGPKYAPHPKPYVYSSPPPPYYTPSPKVNYKSPPPPYVYNSPPPPYYSPSPKVYYKSPPPPYVYSSPPPPYYSPSPKVYYKSPPPPYVYSSPPPLYYSPSPKVYYKSPPPPYVYSSPPPPYYSPSPKVYYKSPPPPYVYSSPPPPYYSPSPKVYYKSPPPPYVYSSPPPPYYSPSPKVYYKSPPPPYVYSSPPPPYYSPSPKVYYKSPPPPYVYSSPPPPYYSPSPKVYYKSPPPPYVYSSPPPPYYSPSPKVYYKSPPPPYVYSSPPPPYYSPSPKVYYKSPPPPYVYSSPPPPYYSPSPNVYYKSPPPPYVYSSPPPPYYSPSPKVHYKSPPPPYVYSSPPPPYYSPSPKVHYKSPPPPYVYSSPPPPYYSPSPKVTYKSPPPPYVYKTPYY

SEQ ID NO: 79867 - protein, 428 aa, Arabidopsis thaliana
  peptide (1)..(428): Ceres Seq. ID no. 12653525
  misc_feature (1)..(331): Pfam Name: Extensin-like region Pfam Description: Extensin-like region
  misc_feature (1)..(428): Homolog of NCBI NO: 30681552 NR Description: proline-rich protein family [Arabidopsis thaliana]
  misc_feature (1)..(428): Homolog of NCBI NO: 10178119 NR Description: gb|AAD23015.1~gene_id:F15M7.16~similar to unknown
  misc_feature (1)..(428): Homolog of NCBI NO: 15224658 NR Description: unknown protein; protein id: At2g24980.1
  misc_feature (1)..(428): Homolog of NCBI NO: 15240117 NR Description: putative protein; protein id: At5g06640.1 thaliana] >gi|10178120|dbj|BAB11413.1|
  misc_feature (17)..(428): Homolog of NCBI NO: 15224658 NR Description: unknown protein; protein id: At2g24980.1
  misc_feature (1)..(428): Homolog of NCBI NO: 15239790 NR Description: putative protein; protein id: At5g49080.1 thaliana] >gi|10176941|dbj|BAB10090.1|
  misc_feature (1)..(428): Homolog of NCBI NO: 15236486 NR Description: extensin-like protein; protein id: At4g08400.1
  misc_feature (17)..(428): Homolog of NCBI NO: 15224658 NR Description: unknown protein; protein id: At2g24980.1
  misc_feature (17)..(428): Homolog of NCBI NO: 15224658 NR Description: unknown protein; protein id: At2g24980.1
  misc_feature (1)..(428): Homolog of NCBI NO: 15236488 NR Description: extensin-like protein; protein id: At4g08410.1
MVYVVVLSAIAATVTSYPYSSPHTPAYDSPSYEHKGPKYAPHPKPYVYSSPPPPYYTPSPKVNYKSPPPPYVYNSPPPPYYSPSPKVYYKSPPPPYVYSSPPPPYYSPSPKVYYKSPPPPYVYSSPPPLYYSPSPKVYYKSPPPPYVYSSPPPPYYSPSPKVYYKSPPPPYVYSSPPPPYYSPSPKVYYKSPPPPYVYSSPPPPYYSPSPKVYYKSPPPPYVYSSPPPPYYSPSPKVYYKSPPPPYVYSSPPPPYYSPSPKVYYKSPPPPYVYSSPPPPYYSPSPKVYYKSPPPPYVYSSPPPPYYSPSPKVYYKSPPPPYVYSSPPPPYYSPSPNVYYKSPPPPYVYSSPPPPYYSPSPKVHYKSPPPPYVYSSPPPPYYSPSPKVHYKSPPPPYVYSSPPPPYYSPSPKVTYKSPPPPYVYKTPYY

SEQ ID NO: 79868 - DNA, 2979 bp, Arabidopsis thaliana
  misc_feature (1)..(2979): Ceres Seq. ID no. 12653529
  misc_feature: MA Experiment ID: 20000173 Result: Down-regulated in Transcription
  misc_feature: MA Experiment 20000173 PARAMETER Experiment Name: At_42deg_Heat_P Parameter: Age (day) Value: 14
  misc_feature: MA Experiment 20000173 PARAMETER Experiment Name: At_42deg_Heat_P Parameter: Organism Value: A. thaliana
  misc_feature: MA Experiment 20000173 PARAMETER Experiment Name: At_42deg_Heat_P Parameter: Plant Line Value: WS
  misc_feature: MA Experiment 20000173 PARAMETER Experiment Name: At_42deg_Heat_P Parameter: Temperature (deg C) Value: 42 vs. 22
  misc_feature: MA Experiment 20000173 PARAMETER Experiment Name: At_42deg_Heat_P Parameter: Timepoint (hr) Value: 6
  misc_feature: MA Experiment 20000173 PARAMETER Experiment Name: At_42deg_Heat_P Parameter: Tissue Value: Aerial
  misc_feature: MA Experiment ID: 20000182 Result: Down-regulated in Transcription
  misc_feature: MA Experiment 20000182 PARAMETER Experiment Name: At_2mM_SA_P Parameter: Age (day) Value: 14
  misc_feature: MA Experiment 20000182 PARAMETER Experiment Name: At_2mM_SA_P Parameter: Organism Value: A. thaliana
  misc_feature: MA Experiment 20000182 PARAMETER Experiment Name: At_2mM_SA_P Parameter: Plant Line Value: WS
  misc_feature: MA Experiment 20000182 PARAMETER Experiment Name: At_2mM_SA_P Parameter: Timepoint (hr) Value: 6
  misc_feature: MA Experiment 20000182 PARAMETER Experiment Name: At_2mM_SA_P Parameter: Tissue Value: Aerial
  misc_feature: MA Experiment 20000182 PARAMETER Experiment Name: At_2mM_SA_P Parameter: Treatment Value: 2mM SA vs. No Treatment
  misc_feature: MA Experiment ID: 20000184 Result: Down-regulated in Transcription
  misc_feature: MA Experiment 20000184 PARAMETER Experiment Name: At_Shoots__P Parameter: Age (day) Value: 7
  misc_feature: MA Experiment 20000184 PARAMETER Experiment Name: At_Shoots__P Parameter: Tissue Value: Shoots vs. Whole Plant
  misc_feature: MA Experiment ID: 20000234 Result: Up-regulated in Transcription
  misc_feature: MA Experiment 20000234 PARAMETER Experiment Name: At_Siliques_P Parameter: Age (day) Value: 21
  misc_feature: MA Experiment 20000234 PARAMETER Experiment Name: At_Siliques_P Parameter: Organism Value: A. thaliana
  misc_feature: MA Experiment 20000234 PARAMETER Experiment Name: At_Siliques_P Parameter: Plant Line Value: WS
  misc_feature: MA Experiment 20000234 PARAMETER Experiment Name: At_Siliques_P Parameter: Tissue Value: Less Than 5mm Siliques vs. Whole Plant
  misc_feature: MA Experiment ID: 20000235 Result: Up-regulated in Transcription
  misc_feature: MA Experiment 20000235 PARAMETER Experiment Name: At_Siliques_P Parameter: Age (day) Value: 21
  misc_feature: MA Experiment 20000235 PARAMETER Experiment Name: At_Siliques_P Parameter: Organism Value: A. thaliana
  misc_feature: MA Experiment 20000235 PARAMETER Experiment Name: At_Siliques_P Parameter: Plant Line Value: WS
  misc_feature: MA Experiment 20000235 PARAMETER Experiment Name: At_Siliques_P Parameter: Tissue Value: 5-10mm Siliques vs. Whole Plant
  misc_feature: MA Experiment ID: 20000265 Result: Up-regulated in Transcription
  misc_feature: MA Experiment 20000265 PARAMETER Experiment Name: At_Open_Flower_P Parameter: Age (day) Value: 21
  misc_feature: MA Experiment 20000265 PARAMETER Experiment Name: At_Open_Flower_P Parameter: Plant Line Value: WS
  misc_feature: MA Experiment 20000265 PARAMETER Experiment Name: At_Open_Flower_P Parameter: Tissue Value: Closed Flower vs. Whole Plant
  misc_feature: MA Experiment ID: 20000495 Result: Up-regulated in Transcription
  misc_feature: MA Experiment 20000495 PARAMETER Experiment Name: At_Guard_Cells_P Parameter: Harvest Date Value: 8/2/2002
  misc_feature: MA Experiment 20000495 PARAMETER Experiment Name: At_Guard_Cells_P Parameter: Organism Value: A. thaliana
  misc_feature: MA Experiment 20000495 PARAMETER Experiment Name: At_Guard_Cells_P Parameter: Tissue Value: Guard Cells vs. Leaves
  misc_feature: MA Experiment ID: 20001556 Result: Up-regulated in Transcription
  misc_feature: MA Experiment 20001556 PARAMETER Experiment Name: At_Drought_Soil_Dry_P Parameter: Age (day) Value: 26
  misc_feature: MA Experiment 20001556 PARAMETER Experiment Name: At_Drought_Soil_Dry_P Parameter: Organism Value: A. thaliana
  misc_feature: MA Experiment 20001556 PARAMETER Experiment Name: At_Drought_Soil_Dry_P Parameter: Plant Line Value: WS
  misc_feature: MA Experiment 20001556 PARAMETER Experiment Name: At_Drought_Soil_Dry_P Parameter: Post Timepoint (hr) Value: None
  misc_feature: MA Experiment 20001556 PARAMETER Experiment Name: At_Drought_Soil_Dry_P Parameter: Post-Treatment Value: None
  misc_feature: MA Experiment 20001556 PARAMETER Experiment Name: At_Drought_Soil_Dry_P Parameter: Timepoint (day) Value: 12
  misc_feature: MA Experiment 20001556 PARAMETER Experiment Name: At_Drought_Soil_Dry_P Parameter: Treatment Value: Drought vs. No Drought
atgggatctaaacaagtatcaaagactagaaatggtggatttagcaagttaaagactgttgagtcctctgcatcttcaacaacctcgtcttcaaaactttatcaagaggcgtctgtagatagccatagctcccctacttcttcatcggttcgaagcaagcctcagttaccacctaagcctttgcagtccaaagaaaatgtcactgtcactgtgcgttttcgtccactcagtccaagggaaatccggaaaggagaggagattgcatggtatgcagatggggaaacgatagtgcggaatgagaataatcaatcaatagcttatgcctatgatcgtgttttcgggcctactacgactacacgcaatgtctatgatgttgctgctcagcatgtcgttaatggtgctatggcgggggtcaatgtgactttgagtgttaattcaaccacagggaccattttcgcatatggagtgacaagcagtgggaaaactcatacaatgcatgggaaccaaagatctcctggtataataccattagccgtgaaagatgctttcagcattatacaagagacaccaaggcgagaatttctcctacgtgtttcctactttgaaatttataacgaggttgtcaatgatttgttgaatccagcaggacaaaatttgaggatcagagaagatgagcagggaacctatattgaagggattaaagaagaggttgttctgtcccctgctcatgtgctttctctcatagcagctggagaagagcaccgacatattggatccacaagttttaatttgctcagcagccgaagccatacaatgtttaccctgactatagagagtagtcccttgggtgacaataatgaaggtggagcagtacacctctcgcagctgaacctcattgacctggcaggttctgagagctcaaaagctgaaaccagcggtttaaggcgcaaggaagggtcttatataaataaaagtttgctaactttagggaccgtaatatcaaagcttacagatagaagggctagtcatgtaccatatagggactctaaattaaccagactgcttgagtcctcactgagtggtcatggacgtgtatctctcatatgtacagtgacacctgcatcaagcaactctgaagaaacacacaacacattgaagtttgctcatcgtgcaaagcatattgagattcaagccgcacagaacaagataattgatgagaaatcattgatcaagaagtaccaatacgagattcgccaactcaaggaggagctggaacagcttaaacaaggaattaaaccagtttctcagctaaaggatatcagtggagatgatatcgacattgttctcctgaagcagaaactagaagaagaggaagatgctaaagcagctctcttgagtcgaatccaaaggctgacaaaactaattctcgtgtctaataaaactccacaaacatcgcggttttcttatcgtgctgatcctcggaggagacactcattcggagaagaggagttgataatgcatggccagcttgcttacctaccgcataagaggcgcgacttgacagatgatgagaaccttgaattgtatgtttctcgtgaagggactcctgagattatagatgatgcgtttatagaagaaaagaagacaaggaagcatggcctactgaactggttgaaaattaagaaaaaagacagcagtttggggggatcaagcctcagtgacaagtcgagtgcagtcaagtccaacagtacaccgtcaactcctcaaggagaaggcagtgattttcatacagaatctagactttcagaaggctccgcattggcagatcaaattatagagactatggagaatagagaagctcatgaagacagttttcatgagattgagacacctgagactagaataaaaatgatcgaccagatggaaatactgagggaacagcaaaagactttatcagaggagatggcacaacaatcaaggtcttttaaactgttgtcagaagaggctgccaaagcccctcaaaatgaagaaattaaagcagagattataaacctcaatggcgacatcaaggcaaagaacgaccagattgctacgttggggaaacaaatactggattttgttatagcatcacatgatgaattggataaatctgatatcgtgcaggctgtttctgaaatgagggctcaactaaatgagaaatgttttgaactcgaggttaaagctgcagataatcgtatcattcaggaacaactcaccgaaaagacaagtttctgtgaagatttgcaagaagaggttgcaaacctaaagcagcagctctctgacgccctggaactgggagatatcaactcggtcacatgtcacatgcaacaatcttctcaatcgccaaacaaaaatgaagaaaaagtcatagaagcacaggcatttgagattgaagagcttaaactgaaagctgcagaactaagtgaactgaatgaacaactagaaatccgaaacaagaaactagctgaagagagttcatatgcgaaagagcttgcttcagcggctgctattgagctcaaggcattgtctgaggaaatagcaagacttatgaatcacaacgagagactagcagctgatctggcagcagtgcagaagagctctgttacaacaccacagggaaagacaggaaacctgaggaatggaagaagggagagtgtttcaaagaggaaagagcaagaaaactcgttgatggaactgaagagagaactgactgtgagcaaggaacgtgaagtttcattcgaagctgctctcattgaaaaaattcagagggaagccgagctacaaagaacagtagaagagtcgaaacaaagggaagcgtatctagagaatgaacttgctaatatgtggggtcttgttgccaagttgagatcccaaggagctgctaattcaggtttgtctgattcagtatcagagacaagaatcgagcattttgggacttaa

SEQ ID NO: 79869 - protein, 992 aa, Arabidopsis thaliana
  peptide (1)..(992): Ceres Seq. ID no. 12653530
  misc_feature (389)..(950): Pfam Name: Myosin tail Pfam Description: Myosin tail
  misc_feature (1)..(739): Homolog of NCBI NO: 22331006 NR Description: kinesin-related protein; protein id: At3g12020.1
  misc_feature (1)..(739): Homolog of NCBI NO: 10998143 NR Description: kinesin (centromere protein) like heavy
  misc_feature (1)..(951): Homolog of NCBI NO: 12322006 NR Description: kinesin heavy chain, putative; 55116-47986
  misc_feature (508)..(973): Homolog of NCBI NO: 21741211 NR Description: OSJNBb0086G13.6 [Oryza sativa (japonica
  misc_feature (189)..(503): Homolog of NCBI NO: 21741211 NR Description: OSJNBb0086G13.6 [Oryza sativa (japonica
  misc_feature (7)..(166): Homolog of NCBI NO: 21741211 NR Description: OSJNBb0086G13.6 [Oryza sativa (japonica
  misc_feature (23)..(872): Homolog of NCBI NO: 30687506 NR Description: kinesin-related protein [Arabidopsis thaliana]
  misc_feature (23)..(869): Homolog of NCBI NO: 25518765 NR Description: hypothetical protein F8K7.17 - Arabidopsis >gi|5263326|gb|AAD41428.1|AC007727_17 Similar to gb|U06698 kinesin heavy chain from Homo sapiens and contains a PF|00225
  misc_feature (64)..(951): Homolog of NCBI NO: 18399675 NR Description: kinesin-related protein; protein id: At2g21380.1, by cDNA: gi_14532683 [Arabidopsis thaliana] putative kinesin heavy chain [Arabidopsis thaliana]
  misc_feature (1)..(971): Homolog of NCBI NO: 20259522 NR Description: putative kinesin [Arabidopsis thaliana]
MGSKQVSKTRNGGFSKLKTVESSASSTTSSSKLYQEASVDSHSSPTSSSVRSKPQLPPKPLQSKENVTVTVRFRPLSPREIRKGEEIAWYADGETIVRNENNQSIAYAYDRVFGPTTTTRNVYDVAAQHVVNGAMAGVNVTLSVNSTTGTIFAYGVTSSGKTHTMHGNQRSPGIIPLAVKDAFSIIQETPRREFLLRVSYFEIYNEVVNDLLNPAGQNLRIREDEQGTYIEGIKEEVVLSPAHVLSLIAAGEEHRHIGSTSFNLLSSRSHTMFTLTIESSPLGDNNEGGAVHLSQLNLIDLAGSESSKAETSGLRRKEGSYINKSLLTLGTVISKLTDRRASHVPYRDSKLTRLLESSLSGHGRVSLICTVTPASSNSEETHNTLKFAHRAKHIEIQAAQNKIIDEKSLIKKYQYEIRQLKEELEQLKQGIKPVSQLKDISGDDIDIVLLKQKLEEEEDAKAALLSRIQRLTKLILVSNKTPQTSRFSYRADPRRRHSFGEEELIMHGQLAYLPHKRRDLTDDENLELYVSREGTPEIIDDAFIEEKKTRKHGLLNWLKIKKKDSSLGGSSLSDKSSAVKSNSTPSTPQGEGSDFHTESRLSEGSALADQIIETMENREAHEDSFHEIETPETRIKMIDQMEILREQQKTLSEEMAQQSRSFKLLSEEAAKAPQNEEIKAEIINLNGDIKAKNDQIATLGKQILDFVIASHDELDKSDIVQAVSEMRAQLNEKCFELEVKAADNRIIQEQLTEKTSFCEDLQEEVANLKQQLSDALELGDINSVTCHMQQSSQSPNKNEEKVIEAQAFEIEELKLKAAELSELNEQLEIRNKKLAEESSYAKELASAAAIELKALSEEIARLMNHNERLAADLAAVQKSSVTTPQGKTGNLRNGRRESVSKRKEQENSLMELKRELTVSKEREVSFEAALIEKIQREAELQRTVEESKQREAYLENELANMWGLVAKLRSQGAANSGLSDSVSETRIEHFGT

SEQ ID NO: 79870 - protein, 858 aa, Arabidopsis thaliana
  peptide (1)..(858): Ceres Seq. ID no. 12653531
  misc_feature (255)..(816): Pfam Name: Myosin tail Pfam Description: Myosin tail
  misc_feature (1)..(605): Homolog of NCBI NO: 22331006 NR Description: kinesin-related protein; protein id: At3g12020.1
  misc_feature (1)..(605): Homolog of NCBI NO: 10998143 NR Description: kinesin (centromere protein) like heavy
  misc_feature (1)..(817): Homolog of NCBI NO: 12322006 NR Description: kinesin heavy chain, putative; 55116-47986
  misc_feature (374)..(839): Homolog of NCBI NO: 21741211 NR Description: OSJNBb0086G13.6 [Oryza sativa (japonica
  misc_feature (55)..(369): Homolog of NCBI NO: 21741211 NR Description: OSJNBb0086G13.6 [Oryza sativa (japonica
  misc_feature (1)..(32): Homolog of NCBI NO: 21741211 NR Description: OSJNBb0086G13.6 [Oryza sativa (japonica
  misc_feature (1)..(738): Homolog of NCBI NO: 30687506 NR Description: kinesin-related protein [Arabidopsis thaliana]
  misc_feature (1)..(735): Homolog of NCBI NO: 25518765 NR Description: hypothetical protein F8K7.17 - Arabidopsis >gi|5263326|gb|AAD41428.1|AC007727_17 Similar to gb|U06698 kinesin heavy chain from Homo sapiens and contains a PF|00225
  misc_feature (1)..(817): Homolog of NCBI NO: 18399675 NR Description: kinesin-related protein; protein id: At2g21380.1, by cDNA: gi_14532683 [Arabidopsis thaliana] putative kinesin heavy chain [Arabidopsis thaliana]
  misc_feature (1)..(837): Homolog of NCBI NO: 20259522 NR Description: putative kinesin [Arabidopsis thaliana]
MAGVNVTLSVNSTTGTIFAYGVTSSGKTHTMHGNQRSPGIIPLAVKDAFSIIQETPRREFLLRVSYFEIYNEVVNDLLNPAGQNLRIREDEQGTYIEGIKEEVVLSPAHVLSLIAAGEEHRHIGSTSFNLLSSRSHTMFTLTIESSPLGDNNEGGAVHLSQLNLIDLAGSESSKAETSGLRRKEGSYINKSLLTLGTVISKLTDRRASHVPYRDSKLTRLLESSLSGHGRVSLICTVTPASSNSEETHNTLKFAHRAKHIEIQAAQNKIIDEKSLIKKYQYEIRQLKEELEQLKQGIKPVSQLKDISGDDIDIVLLKQKLEEEEDAKAALLSRIQRLTKLILVSNKTPQTSRFSYRADPRRRHSFGEEELIMHGQLAYLPHKRRDLTDDENLELYVSREGTPEIIDDAFIEEKKTRKHGLLNWLKIKKKDSSLGGSSLSDKSSAVKSNSTPSTPQGEGSDFHTESRLSEGSALADQIIETMENREAHEDSFHEIETPETRIKMIDQMEILREQQKTLSEEMAQQSRSFKLLSEEAAKAPQNEEIKAEIINLNGDIKAKNDQIATLGKQILDFVIASHDELDKSDIVQAVSEMRAQLNEKCFELEVKAADNRIIQEQLTEKTSFCEDLQEEVANLKQQLSDALELGDINSVTCHMQQSSQSPNKNEEKVIEAQAFEIEELKLKAAELSELNEQLEIRNKKLAEESSYAKELASAAAIELKALSEEIARLMNHNERLAADLAAVQKSSVTTPQGKTGNLRNGRRESVSKRKEQENSLMELKRELTVSKEREVSFEAALIEKIQREAELQRTVEESKQREAYLENELANMWGLVAKLRSQGAANSGLSDSVSETRIEHFGT

SEQ ID NO: 79871 - protein, 828 aa, Arabidopsis thaliana
  peptide (1)..(828): Ceres Seq. ID no. 12653532
  misc_feature (225)..(786): Pfam Name: Myosin tail Pfam Description: Myosin tail
  misc_feature (1)..(575): Homolog of NCBI NO: 22331006 NR Description: kinesin-related protein; protein id: At3g12020.1
  misc_feature (1)..(575): Homolog of NCBI NO: 10998143 NR Description: kinesin (centromere protein) like heavy
  misc_feature (1)..(787): Homolog of NCBI NO: 12322006 NR Description: kinesin heavy chain, putative; 55116-47986
  misc_feature (344)..(809): Homolog of NCBI NO: 21741211 NR Description: OSJNBb0086G13.6 [Oryza sativa (japonica
  misc_feature (25)..(339): Homolog of NCBI NO: 21741211 NR Description: OSJNBb0086G13.6 [Oryza sativa (japonica
  misc_feature (1)..(708): Homolog of NCBI NO: 30687506 NR Description: kinesin-related protein [Arabidopsis thaliana]
  misc_feature (1)..(705): Homolog of NCBI NO: 25518765 NR Description: hypothetical protein F8K7.17 - Arabidopsis >gi|5263326|gb|AAD41428.1|AC007727_17 Similar to gb|U06698 kinesin heavy chain from Homo sapiens and contains a PF|00225
  misc_feature (1)..(787): Homolog of NCBI NO: 18399675 NR Description: kinesin-related protein; protein id: At2g21380.1, by cDNA: gi_14532683 [Arabidopsis thaliana] putative kinesin heavy chain [Arabidopsis thaliana]
  misc_feature (1)..(807): Homolog of NCBI NO: 20259522 NR Description: putative kinesin [Arabidopsis thaliana]
  misc_feature (1)..(807): Homolog of NCBI NO: 30692169 NR Description: kinesin-related protein [Arabidopsis thaliana]
MHGNQRSPGIIPLAVKDAFSIIQETPRREFLLRVSYFEIYNEVVNDLLNPAGQNLRIREDEQGTYIEGIKEEVVLSPAHVLSLIAAGEEHRHIGSTSFNLLSSRSHTMFTLTIESSPLGDNNEGGAVHLSQLNLIDLAGSESSKAETSGLRRKEGSYINKSLLTLGTVISKLTDRRASHVPYRDSKLTRLLESSLSGHGRVSLICTVTPASSNSEETHNTLKFAHRAKHIEIQAAQNKIIDEKSLIKKYQYEIRQLKEELEQLKQGIKPVSQLKDISGDDIDIVLLKQKLEEEEDAKAALLSRIQRLTKLILVSNKTPQTSRFSYRADPRRRHSFGEEELIMHGQLAYLPHKRRDLTDDENLELYVSREGTPEIIDDAFIEEKKTRKHGLLNWLKIKKKDSSLGGSSLSDKSSAVKSNSTPSTPQGEGSDFHTESRLSEGSALADQIIETMENREAHEDSFHEIETPETRIKMIDQMEILREQQKTLSEEMAQQSRSFKLLSEEAAKAPQNEEIKAEIINLNGDIKAKNDQIATLGKQILDFVIASHDELDKSDIVQAVSEMRAQLNEKCFELEVKAADNRIIQEQLTEKTSFCEDLQEEVANLKQQLSDALELGDINSVTCHMQQSSQSPNKNEEKVIEAQAFEIEELKLKAAELSELNEQLEIRNKKLAEESSYAKELASAAAIELKALSEEIARLMNHNERLAADLAAVQKSSVTTPQGKTGNLRNGRRESVSKRKEQENSLMELKRELTVSKEREVSFEAALIEKIQREAELQRTVEESKQREAYLENELANMWGLVAKLRSQGAANSGLSDSVSETRIEHFGT

SEQ ID NO: 79872 - DNA, 1125 bp, Arabidopsis thaliana
  misc_feature (1)..(1125): Ceres Seq. ID no. 12653545
  misc_feature: MA Experiment ID: 20000439 Result: Up-regulated in Transcription
  misc_feature: MA Experiment 20000439 PARAMETER Experiment Name: At_Roots__P Parameter: Age (day) Value: 14 vs. 21
  misc_feature: MA Experiment 20000439 PARAMETER Experiment Name: At_Roots__P Parameter: Organism Value: A. thaliana
  misc_feature: MA Experiment 20000439 PARAMETER Experiment Name: At_Roots__P Parameter: Tissue Value: Roots vs. Whole Plant
atggataacatcaactttgaattctcaaacgcttcacaaggaagccggctacagttgcagcaacaaccgccccagccgtttaatttacaagacttgaatatgattcaatacaatcaaccatcatctccttggactacggagaccttctctggtctaactccgtacgattgcacagccaatcaatcttttcccgtacaatgttcatcttcaaaaccctacccttcctcgtttcatccgtaccatcatcaatcttctgattctccatcattagaccaatctgtatcgatgattcctatgcagcctcttccggatcaatatatgaagccattatatcaaagatcttgctcgaacgattttgccgcaacaaatgcttcatcagcctcttactcgctttcttttgaagcaagtcatgatccacaagaactatgcagaaggacctatagtaattctaatgtaacacatcttaatttcacatcatcacaacatcaacctaaacagagtcatccaagattttcttctcctccttcattctcaatccatggagggtctatggctcctaactgtgtgaacaagacacggataagatggactcaagatcttcatgagaagtttgtggagtgcgttaatcgtcttggtggcgctgataaggcgacgcccaaggcgatattgaagcggatggattctgatggactcacaatatttcacgttaaaagccacttacagaagtatagaattgcgaaatacatgcctgagtctcaagaaggcaagtttgagaaaagagcttgtgcaaaagagctgtctcagcttgacacaagaactggagtgcaaattaaagaggcacttcagcttcaactagatgttcagaggcatcttcatgaacaactagagattcaacgaaacctacaactaagaatcgaagaacaagggaaacaactgaaaatgatgatggaacaacaacaaaaaaacaaagagagtcttctgaagaagctaccagacgctgaagcatcattgtctcttctcgatccccatattcactctcctccttcgcctttcttggtacacgacgctgaagccctgatgctaacaagttatgaagacactcaactccagtccaccaaaagttga

SEQ ID NO: 79873 - protein, 374 aa, Arabidopsis thaliana
  peptide (1)..(374): Ceres Seq. ID no. 12653546
  misc_feature (193)..(244): Pfam Name: Myb-like DNA-binding domain Pfam Description: Myb-like DNA-binding domain
  misc_feature (1)..(374): Homolog of NCBI NO: 15240148 NR Description: putative protein; protein id: At5g06800.1 thaliana] >gi|9759308|dbj|BAB09814.1| contains similarity to
  misc_feature (156)..(322): Homolog of NCBI NO: 4519671 NR Description: transfactor [Nicotiana tabacum]
  misc_feature (160)..(356): Homolog of NCBI NO: 15229298 NR Description: transfactor, putative; protein id: At3g04450.1 thaliana] >gi|7547104|gb|AAF63776.1| transfactor, putative
  misc_feature (160)..(356): Homolog of NCBI NO: 26452281 NR Description: putative transfactor [Arabidopsis thaliana]
  misc_feature (161)..(319): Homolog of NCBI NO: 34394847 NR Description: putative CDPK substrate protein 1 [Oryza sativa
  misc_feature (54)..(336): Homolog of NCBI NO: 21537366 NR Description: transfactor, putative [Arabidopsis thaliana]
  misc_feature (54)..(336): Homolog of NCBI NO: 21954075 NR Description: unknown protein [Arabidopsis thaliana]
  misc_feature (54)..(336): Homolog of NCBI NO: 30692105 NR Description: expressed protein [Arabidopsis thaliana]
  misc_feature (54)..(336): Homolog of NCBI NO: 30692110 NR Description: expressed protein [Arabidopsis thaliana]
  misc_feature (148)..(374): Homolog of NCBI NO: 29647445 NR Description: putative transfactor [Oryza sativa (japonica
MDNINFEFSNASQGSRLQLQQQPPQPFNLQDLNMIQYNQPSSPWTTETFSGLTPYDCTANQSFPVQCSSSKPYPSSFHPYHHQSSDSPSLDQSVSMIPMQPLPDQYMKPLYQRSCSNDFAATNASSASYSLSFEASHDPQELCRRTYSNSNVTHLNFTSSQHQPKQSHPRFSSPPSFSIHGGSMAPNCVNKTRIRWTQDLHEKFVECVNRLGGADKATPKAILKRMDSDGLTIFHVKSHLQKYRIAKYMPESQEGKFEKRACAKELSQLDTRTGVQIKEALQLQLDVQRHLHEQLEIQRNLQLRIEEQGKQLKMMMEQQQKNKESLLKKLPDAEASLSLLDPHIHSPPSPFLVHDAEALMLTSYEDTQLQSTKS

SEQ ID NO: 79874 - protein, 341 aa, Arabidopsis thaliana
  peptide (1)..(341): Ceres Seq. ID no. 12653547
  misc_feature (160)..(211): Pfam Name: Myb-like DNA-binding domain Pfam Description: Myb-like DNA-binding domain
  misc_feature (1)..(341): Homolog of NCBI NO: 15240148 NR Description: putative protein; protein id: At5g06800.1 thaliana] >gi|9759308|dbj|BAB09814.1| contains similarity to
  misc_feature (123)..(289): Homolog of NCBI NO: 4519671 NR Description: transfactor [Nicotiana tabacum]
  misc_feature (127)..(323): Homolog of NCBI NO: 15229298 NR Description: transfactor, putative; protein id: At3g04450.1 thaliana] >gi|7547104|gb|AAF63776.1| transfactor, putative
  misc_feature (127)..(323): Homolog of NCBI NO: 26452281 NR Description: putative transfactor [Arabidopsis thaliana]
  misc_feature (128)..(286): Homolog of NCBI NO: 34394847 NR Description: putative CDPK substrate protein 1 [Oryza sativa
  misc_feature (21)..(303): Homolog of NCBI NO: 21537366 NR Description: transfactor, putative [Arabidopsis thaliana]
  misc_feature (21)..(303): Homolog of NCBI NO: 21954075 NR Description: unknown protein [Arabidopsis thaliana]
  misc_feature (21)..(303): Homolog of NCBI NO: 30692105 NR Description: expressed protein [Arabidopsis thaliana]
  misc_feature (21)..(303): Homolog of NCBI NO: 30692110 NR Description: expressed protein [Arabidopsis thaliana]
  misc_feature (115)..(341): Homolog of NCBI NO: 29647445 NR Description: putative transfactor [Oryza sativa (japonica
MIQYNQPSSPWTTETFSGLTPYDCTANQSFPVQCSSSKPYPSSFHPYHHQSSDSPSLDQSVSMIPMQPLPDQYMKPLYQRSCSNDFAATNASSASYSLSFEASHDPQELCRRTYSNSNVTHLNFTSSQHQPKQSHPRFSSPPSFSIHGGSMAPNCVNKTRIRWTQDLHEKFVECVNRLGGADKATPKAILKRMDSDGLTIFHVKSHLQKYRIAKYMPESQEGKFEKRACAKELSQLDTRTGVQIKEALQLQLDVQRHLHEQLEIQRNLQLRIEEQGKQLKMMMEQQQKNKESLLKKLPDAEASLSLLDPHIHSPPSPFLVHDAEALMLTSYEDTQLQSTKS

SEQ ID NO: 79875 - protein, 279 aa, Arabidopsis thaliana
  peptide (1)..(279): Ceres Seq. ID no. 12653548
  misc_feature (98)..(149): Pfam Name: Myb-like DNA-binding domain Pfam Description: Myb-like DNA-binding domain
  misc_feature (1)..(279): Homolog of NCBI NO: 15240148 NR Description: putative protein; protein id: At5g06800.1 thaliana] >gi|9759308|dbj|BAB09814.1| contains similarity to
  misc_feature (61)..(227): Homolog of NCBI NO: 4519671 NR Description: transfactor [Nicotiana tabacum]
  misc_feature (65)..(261): Homolog of NCBI NO: 15229298 NR Description: transfactor, putative; protein id: At3g04450.1 thaliana] >gi|7547104|gb|AAF63776.1| transfactor, putative
  misc_feature (65)..(261): Homolog of NCBI NO: 26452281 NR Description: putative transfactor [Arabidopsis thaliana]
  misc_feature (66)..(224): Homolog of NCBI NO: 34394847 NR Description: putative CDPK substrate protein 1 [Oryza sativa
  misc_feature (1)..(241): Homolog of NCBI NO: 21537366 NR Description: transfactor, putative [Arabidopsis thaliana]
  misc_feature (1)..(241): Homolog of NCBI NO: 21954075 NR Description: unknown protein [Arabidopsis thaliana]
  misc_feature (1)..(241): Homolog of NCBI NO: 30692105 NR Description: expressed protein [Arabidopsis thaliana]
  misc_feature (1)..(241): Homolog of NCBI NO: 30692110 NR Description: expressed protein [Arabidopsis thaliana]
  misc_feature (53)..(279): Homolog of NCBI NO: 29647445 NR Description: putative transfactor [Oryza sativa (japonica
MIPMQPLPDQYMKPLYQRSCSNDFAATNASSASYSLSFEASHDPQELCRRTYSNSNVTHLNFTSSQHQPKQSHPRFSSPPSFSIHGGSMAPNCVNKTRIRWTQDLHEKFVECVNRLGGADKATPKAILKRMDSDGLTIFHVKSHLQKYRIAKYMPESQEGKFEKRACAKELSQLDTRTGVQIKEALQLQLDVQRHLHEQLEIQRNLQLRIEEQGKQLKMMMEQQQKNKESLLKKLPDAEASLSLLDPHIHSPPSPFLVHDAEALMLTSYEDTQLQSTKS

SEQ ID NO: 79876 - DNA, 1566 bp, Arabidopsis thaliana
  misc_feature (1)..(1566): Ceres Seq. ID no. 12653581
  misc_feature: MA Experiment ID: 20000171 Result: Up-regulated in Transcription
  misc_feature: MA Experiment 20000171 PARAMETER Experiment Name: At_42deg_Heat_P Parameter: Age (day) Value: 14
  misc_feature: MA Experiment 20000171 PARAMETER Experiment Name: At_42deg_Heat_P Parameter: Organism Value: A. thaliana
  misc_feature: MA Experiment 20000171 PARAMETER Experiment Name: At_42deg_Heat_P Parameter: Plant Line Value: WS
  misc_feature: MA Experiment 20000171 PARAMETER Experiment Name: At_42deg_Heat_P Parameter: Temperature (deg C) Value: 42 vs. 22
  misc_feature: MA Experiment 20000171 PARAMETER Experiment Name: At_42deg_Heat_P Parameter: Timepoint (hr) Value: 1
  misc_feature: MA Experiment 20000171 PARAMETER Experiment Name: At_42deg_Heat_P Parameter: Tissue Value: Aerial
  misc_feature: MA Experiment ID: 20000173 Result: Up-regulated in Transcription
  misc_feature: MA Experiment 20000173 PARAMETER Experiment Name: At_42deg_Heat_P Parameter: Age (day) Value: 14
  misc_feature: MA Experiment 20000173 PARAMETER Experiment Name: At_42deg_Heat_P Parameter: Organism Value: A. thaliana
  misc_feature: MA Experiment 20000173 PARAMETER Experiment Name: At_42deg_Heat_P Parameter: Plant Line Value: WS
  misc_feature: MA Experiment 20000173 PARAMETER Experiment Name: At_42deg_Heat_P Parameter: Temperature (deg C) Value: 42 vs. 22
  misc_feature: MA Experiment 20000173 PARAMETER Experiment Name: At_42deg_Heat_P Parameter: Timepoint (hr) Value: 6
  misc_feature: MA Experiment 20000173 PARAMETER Experiment Name: At_42deg_Heat_P Parameter: Tissue Value: Aerial
  misc_feature: MA Experiment ID: 20000264 Result: Down-regulated in Transcription
  misc_feature: MA Experiment 20000264 PARAMETER Experiment Name: At_Open_Flower_P Parameter: Age (day) Value: 21
  misc_feature: MA Experiment 20000264 PARAMETER Experiment Name: At_Open_Flower_P Parameter: Plant Line Value: WS
  misc_feature: MA Experiment 20000264 PARAMETER Experiment Name: At_Open_Flower_P Parameter: Tissue Value: Open Flower vs. Whole Plant
  misc_feature: MA Experiment ID: 20000286 Result: Down-regulated in Transcription
  misc_feature: MA Experiment 20000286 PARAMETER Experiment Name: At_Open_Flower_P Parameter: Age (day) Value: 21
  misc_feature: MA Experiment 20000286 PARAMETER Experiment Name: At_Open_Flower_P Parameter: Plant Line Value: WS
  misc_feature: MA Experiment 20000286 PARAMETER Experiment Name: At_Open_Flower_P Parameter: Tissue Value: Half Open vs. Whole Plant
  misc_feature: MA Experiment ID: 20000451 Result: Up-regulated in Transcription
  misc_feature: MA Experiment 20000451 PARAMETER Experiment Name: At_CS6879_Shoots-Roots_P Parameter: Age (day) Value: 14
  misc_feature: MA Experiment 20000451 PARAMETER Experiment Name: At_CS6879_Shoots-Roots_P Parameter: Organism Value: A. thaliana
  misc_feature: MA Experiment 20000451 PARAMETER Experiment Name: At_CS6879_Shoots-Roots_P Parameter: Plant Line Value: CS6879 vs. WS
  misc_feature: MA Experiment 20000451 PARAMETER Experiment Name: At_CS6879_Shoots-Roots_P Parameter: Tissue Value: Roots
atgaattatacttcttgttcatatctcttcttcacacttgtaaccatcttccttctccatagactcttcagctcctctagccgcagaggtcttcctccaggtcctcgaggacttcccgttcttggtcatatgcatctcctccggtctagcctaccacgatctcttcaagccttggctcatacttacggtcctctcatgaccatacgcatcggatcattacgagtcctcgttgtctcagattccgacacagctaagctaatcctcaagactcacgaccctgatttcgcttccaagtttgtgtttggtccgagacagttcaatgtttataaaggatcagagttctttaatgcaccttatggatcttactggaggttcatgaagaagctatgcatgactaagctattcgcgggttatcagcttgatcgatttgtcgacataagagaagaggaaacgttagctttactgagcacgctggttgagaggtcgcgaaacggagaggcttgcgatctcggtttggagttcactgctttgaccacaaagatcttatcaaagatggttatggggaaaaggtgccgccaaaactcgaatattcccaaagagatcaggaagatagtgagtgatattatggcttgcgccacaaggtttggattcatggagctatttggaccattgcgggatctggatttgtttgggaatggtaagaagcttagatcctctatttggcggtatgatgagttggttgagaagatactgaaggaatatgaaaacgataagagcaatgaggaagaagagaaagataaagatatcgtcgatatcttgttggacacgtataatgacccaaaagccgaactcagattgactatgaatcagatcaagttcttcattcttgagttgttcatggcgagcttagacacgacttctgcagctttacaatggacaatgactgagctaatcaaccatccggatatcttcgcgaagatcagagacgagatcaaatcggttgtaggaacaacgaaccggttaatcaaagaatcagatttgcagaagcttccttacctacaagcagctatcaaggagacattgagacttcatccagtaggaccattactacgcagagaaagcaacacagacatgaagatcaacgggtacgatgtaaaatccgggacaaagatcttcatcaatgcttacgggataatgcgtgatccgaccacatacaaagaccctgacaagtttatgccagagaggtttcttgtggtggaacaagatacagagagaaagatgggttactaccagcaatatatgttggaattaaaaggccaagatgtgaattatcttgcgtttgggagcggaagacgaggatgtcttggagcttctcacgcttctctggtgttgagtctcacaattgggtcactcgtgcagtgttttaattggacggtgaagggagatgaagacaaaatcaagatcaagttacctaccggcttttcggcttcagggactgctggaggaagctcacttatgtgttctcctgaattatgttttgatccatttggataccaaactaagtga

SEQ ID NO: 79877 - protein, 521 aa, Arabidopsis thaliana
  peptide (1)..(521): Ceres Seq. ID no. 12653582
  misc_feature (1)..(521): Homolog of NCBI NO: 9759546 NR Description: cytochrome P450-like protein [Arabidopsis
  misc_feature (1)..(521): Homolog of NCBI NO: 22326638 NR Description: similar to cytochrome p450, putative; protein id:
  misc_feature (8)..(516): Homolog of NCBI NO: 15227911 NR Description: cytochrome p450, putative; protein id: [Arabidopsis thaliana] >gi|7430671|pir||T00934 probable
MNYTSCSYLFFTLVTIFLLHRLFSSSSRRGLPPGPRGLPVLGHMHLLRSSLPRSLQALAHTYGPLMTIRIGSLRVLVVSDSDTAKLILKTHDPDFASKFVFGPRQFNVYKGSEFFNAPYGSYWRFMKKLCMTKLFAGYQLDRFVDIREEETLALLSTLVERSRNGEACDLGLEFTALTTKILSKMVMGKRCRQNSNIPKEIRKIVSDIMACATRFGFMELFGPLRDLDLFGNGKKLRSSIWRYDELVEKILKEYENDKSNEEEEKDKDIVDILLDTYNDPKAELRLTMNQIKFFILELFMASLDTTSAALQWTMTELINHPDIFAKIRDEIKSVVGTTNRLIKESDLQKLPYLQAAIKETLRLHPVGPLLRRESNTDMKINGYDVKSGTKIFINAYGIMRDPTTYKDPDKFMPERFLVVEQDTERKMGYYQQYMLELKGQDVNYLAFGSGRRGCLGASHASLVLSLTIGSLVQCFNWTVKGDEDKIKIKLPTGFSASGTAGGSSLMCSPELCFDPFGYQTK

SEQ ID NO: 79878 - protein, 478 aa, Arabidopsis thaliana
  peptide (1)..(478): Ceres Seq. ID no. 12653583
  misc_feature (1)..(478): Homolog of NCBI NO: 9759546 NR Description: cytochrome P450-like protein [Arabidopsis
  misc_feature (1)..(478): Homolog of NCBI NO: 22326638 NR Description: similar to cytochrome p450, putative; protein id:
  misc_feature (1)..(473): Homolog of NCBI NO: 15227911 NR Description: cytochrome p450, putative; protein id: [Arabidopsis thaliana] >gi|7430671|pir||T00934 probable
MHLLRSSLPRSLQALAHTYGPLMTIRIGSLRVLVVSDSDTAKLILKTHDPDFASKFVFGPRQFNVYKGSEFFNAPYGSYWRFMKKLCMTKLFAGYQLDRFVDIREEETLALLSTLVERSRNGEACDLGLEFTALTTKILSKMVMGKRCRQNSNIPKEIRKIVSDIMACATRFGFMELFGPLRDLDLFGNGKKLRSSIWRYDELVEKILKEYENDKSNEEEEKDKDIVDILLDTYNDPKAELRLTMNQIKFFILELFMASLDTTSAALQWTMTELINHPDIFAKIRDEIKSVVGTTNRLIKESDLQKLPYLQAAIKETLRLHPVGPLLRRESNTDMKINGYDVKSGTKIFINAYGIMRDPTTYKDPDKFMPERFLVVEQDTERKMGYYQQYMLELKGQDVNYLAFGSGRRGCLGASHASLVLSLTIGSLVQCFNWTVKGDEDKIKIKLPTGFSASGTAGGSSLMCSPELCFDPFGYQTK

SEQ ID NO: 79879 - protein, 456 aa, Arabidopsis thaliana
  peptide (1)..(456): Ceres Seq. ID no. 12653584
  misc_feature (1)..(456): Homolog of NCBI NO: 9759546 NR Description: cytochrome P450-like protein [Arabidopsis
  misc_feature (1)..(456): Homolog of NCBI NO: 22326638 NR Description: similar to cytochrome p450, putative; protein id:
  misc_feature (1)..(451): Homolog of NCBI NO: 15227911 NR Description: cytochrome p450, putative; protein id: [Arabidopsis thaliana] >gi|7430671|pir||T00934 probable
MTIRIGSLRVLVVSDSDTAKLILKTHDPDFASKFVFGPRQFNVYKGSEFFNAPYGSYWRFMKKLCMTKLFAGYQLDRFVDIREEETLALLSTLVERSRNGEACDLGLEFTALTTKILSKMVMGKRCRQNSNIPKEIRKIVSDIMACATRFGFMELFGPLRDLDLFGNGKKLRSSIWRYDELVEKILKEYENDKSNEEEEKDKDIVDILLDTYNDPKAELRLTMNQIKFFILELFMASLDTTSAALQWTMTELINHPDIFAKIRDEIKSVVGTTNRLIKESDLQKLPYLQAAIKETLRLHPVGPLLRRESNTDMKINGYDVKSGTKIFINAYGIMRDPTTYKDPDKFMPERFLVVEQDTERKMGYYQQYMLELKGQDVNYLAFGSGRRGCLGASHASLVLSLTIGSLVQCFNWTVKGDEDKIKIKLPTGFSASGTAGGSSLMCSPELCFDPFGYQTK

SEQ ID NO: 79880 - DNA, 786 bp, Arabidopsis thaliana
  misc_feature (1)..(786): Ceres Seq. ID no. 12653597
  misc_feature: MA Experiment ID: 20000307 Result: Up-regulated in Transcription
  misc_feature: MA Experiment 20000307 PARAMETER Experiment Name: At_Germinating_Seeds_Sub_P Parameter: Age (hr) Value: 24 vs. 0
  misc_feature: MA Experiment 20000307 PARAMETER Experiment Name: At_Germinating_Seeds_Sub_P Parameter: Organism Value: A. thaliana
  misc_feature: MA Experiment 20000307 PARAMETER Experiment Name: At_Germinating_Seeds_Sub_P Parameter: Plant Line Value: WS
  misc_feature: MA Experiment 20000307 PARAMETER Experiment Name: At_Germinating_Seeds_Sub_P Parameter: Tissue Value: Germinating Seeds
  misc_feature: MA Experiment ID: 20000314 Result: Up-regulated in Transcription
  misc_feature: MA Experiment 20000314 PARAMETER Experiment Name: At_14day_Shoots-Roots_Sub_P Parameter: Age (day) Value: 14
  misc_feature: MA Experiment 20000314 PARAMETER Experiment Name: At_14day_Shoots-Roots_Sub_P Parameter: Organism Value: A. thaliana
  misc_feature: MA Experiment 20000314 PARAMETER Experiment Name: At_14day_Shoots-Roots_Sub_P Parameter: Plant Line Value: WS
  misc_feature: MA Experiment 20000314 PARAMETER Experiment Name: At_14day_Shoots-Roots_Sub_P Parameter: Tissue Value: Roots vs. Whole Plant
  misc_feature: MA Experiment ID: 20000328 Result: Up-regulated in Transcription
  misc_feature: MA Experiment 20000328 PARAMETER Experiment Name: At_42deg_Heat_Sub_P Parameter: Age (day) Value: 14
  misc_feature: MA Experiment 20000328 PARAMETER Experiment Name: At_42deg_Heat_Sub_P Parameter: Organism Value: A. thaliana
  misc_feature: MA Experiment 20000328 PARAMETER Experiment Name: At_42deg_Heat_Sub_P Parameter: Plant Line Value: WS
  misc_feature: MA Experiment 20000328 PARAMETER Experiment Name: At_42deg_Heat_Sub_P Parameter: Temperature (deg C) Value: 42 vs. 22
  misc_feature: MA Experiment 20000328 PARAMETER Experiment Name: At_42deg_Heat_Sub_P Parameter: Timepoint (hr) Value: 6
  misc_feature: MA Experiment 20000328 PARAMETER Experiment Name: At_42deg_Heat_Sub_P Parameter: Tissue Value: Aerial
  misc_feature: MA Experiment ID: 20000347 Result: Up-regulated in Transcription
  misc_feature: MA Experiment 20000347 PARAMETER Experiment Name: At_2mM_SA_Sub_P Parameter: Age (day) Value: 14
  misc_feature: MA Experiment 20000347 PARAMETER Experiment Name: At_2mM_SA_Sub_P Parameter: Organism Value: A. thaliana
  misc_feature: MA Experiment 20000347 PARAMETER Experiment Name: At_2mM_SA_Sub_P Parameter: Plant Line Value: WS
  misc_feature: MA Experiment 20000347 PARAMETER Experiment Name: At_2mM_SA_Sub_P Parameter: Timepoint (hr) Value: 6
  misc_feature: MA Experiment 20000347 PARAMETER Experiment Name: At_2mM_SA_Sub_P Parameter: Tissue Value: Aerial
  misc_feature: MA Experiment 20000347 PARAMETER Experiment Name: At_2mM_SA_Sub_P Parameter: Treatment Value: 2mM SA vs. No Treatment
  misc_feature: MA Experiment ID: 20000348 Result: Up-regulated in Transcription
  misc_feature: MA Experiment 20000348 PARAMETER Experiment Name: At_100uM_ABA_Sub_P Parameter: Age (day) Value: 14
  misc_feature: MA Experiment 20000348 PARAMETER Experiment Name: At_100uM_ABA_Sub_P Parameter: Organism Value: A. thaliana
  misc_feature: MA Experiment 20000348 PARAMETER Experiment Name: At_100uM_ABA_Sub_P Parameter: Plant Line Value: WS
  misc_feature: MA Experiment 20000348 PARAMETER Experiment Name: At_100uM_ABA_Sub_P Parameter: Timepoint (hr) Value: 1
  misc_feature: MA Experiment 20000348 PARAMETER Experiment Name: At_100uM_ABA_Sub_P Parameter: Tissue Value: Aerial
  misc_feature: MA Experiment 20000348 PARAMETER Experiment Name: At_100uM_ABA_Sub_P Parameter: Treatment Value: 100uM ABA vs. No Treatment
  misc_feature: MA Experiment ID: 20000440 Result: Up-regulated in Transcription
  misc_feature: MA Experiment 20000440 PARAMETER Experiment Name: At_Closed-Flower__Sub_P Parameter: Tissue Value: Closed Flower vs. Whole Plant
atggcaacaccaccgttaacgccaagaatgatgactccaacaacaatgtcgcctctcgggagtccaaagtcgaagaagtcaacggcgacggtacgaccggagatcacgttggagcaaccatctggaagaaacaaaacaaccggctccaaatcgacgaaactcttccgacgtgttaggtctgtgttcagatcacttccgatcatgtctccgatgtgtaaatttcccgtaggaggaggaggaagactccacgagaatcacgttcatggaggaacacgtgtcacgggaacgttgtttggttaccgcaaaacgcgtgtgaatctagcggttcaagagaatccgcgttctttaccgattcttttattggagttagcgattccaacggggaaacttcttcaagatcttggagtcggtttagtgagaatcgcgttggaatgcgagaagaaaccgagcgagaaaaccaaaatcattgacgaaccgatttgggcgttgtattgtaacggtaagaaatctggttatggtgtgaagagacaaccaacggaagaggatcttgtggtgatgcagatgcttcatgctgtgtcgatgggagctggtgttttaccggtgagcagtggcgcgatcacggagcaaagcggcggaggaggaggaggacaacaagaaggagatttgacgtatatgagagcacatttcgagagagtgattgggtcaagagactccgagacgtattacatgatgaatcctgatgggaacagtggacctgagcttagtatctttttcgtgagggtttaa

SEQ ID NO: 79881 - protein, 261 aa, Arabidopsis thaliana
  peptide (1)..(261): Ceres Seq. ID no. 12653598
  misc_feature (92)..(261): Pfam Name: Protein of unknown function, DUF617 Pfam Description: Protein of unknown function, DUF617
  misc_feature (1)..(261): Homolog of NCBI NO: 15240220 NR Description: putative protein; protein id: At5g06990.1 thaliana] >gi|9759555|dbj|BAB11157.1|
  misc_feature (2)..(261): Homolog of NCBI NO: 34909066 NR Description: P0702B09.30 [Oryza sativa (japonica
  misc_feature (14)..(261): Homolog of NCBI NO: 15227126 NR Description: hypothetical protein; protein id: At2g21990.1
  misc_feature (1)..(261): Homolog of NCBI NO: 15235158 NR Description: putative protein; protein id: At4g39610.1, by cDNA: 97747. [Arabidopsis thaliana] >gi|7486050|pir||T09377
  misc_feature (1)..(261): Homolog of NCBI NO: 21618123 NR Description: unknown [Arabidopsis thaliana]
  misc_feature (2)..(260): Homolog of NCBI NO: 34903148 NR Description: unnamed protein product [Oryza sativa (japonica group)] >gi|6630701|dbj|BAA88547.1| unnamed protein product
  misc_feature (154)..(261): Homolog of NCBI NO: 15237221 NR Description: putative protein; protein id: At5g23100.1 thaliana] >gi|9759368|dbj|BAB09827.1|
  misc_feature (90)..(152): Homolog of NCBI NO: 15237221 NR Description: putative protein; protein id: At5g23100.1 thaliana] >gi|9759368|dbj|BAB09827.1|
  misc_feature (90)..(261): Homolog of NCBI NO: 18405770 NR Description: expressed protein; protein id: At2g41660.1, by cDNA: 35456., supported by cDNA: gi_13569547 [Arabidopsis
  misc_feature (90)..(261): Homolog of NCBI NO: 21593037 NR Description: unknown [Arabidopsis thaliana]
MATPPLTPRMMTPTTMSPLGSPKSKKSTATVRPEITLEQPSGRNKTTGSKSTKLFRRVRSVFRSLPIMSPMCKFPVGGGGRLHENHVHGGTRVTGTLFGYRKTRVNLAVQENPRSLPILLLELAIPTGKLLQDLGVGLVRIALECEKKPSEKTKIIDEPIWALYCNGKKSGYGVKRQPTEEDLVVMQMLHAVSMGAGVLPVSSGAITEQSGGGGGGQQEGDLTYMRAHFERVIGSRDSETYYMMNPDGNSGPELSIFFVRV

SEQ ID NO: 79882 - protein, 252 aa, Arabidopsis thaliana
  peptide (1)..(252): Ceres Seq. ID no. 12653599
  misc_feature (83)..(252): Pfam Name: Protein of unknown function, DUF617 Pfam Description: Protein of unknown function, DUF617
  misc_feature (1)..(252): Homolog of NCBI NO: 15240220 NR Description: putative protein; protein id: At5g06990.1 thaliana] >gi|9759555|dbj|BAB11157.1|
  misc_feature (1)..(252): Homolog of NCBI NO: 34909066 NR Description: P0702B09.30 [Oryza sativa (japonica
  misc_feature (5)..(252): Homolog of NCBI NO: 15227126 NR Description: hypothetical protein; protein id: At2g21990.1
  misc_feature (1)..(252): Homolog of NCBI NO: 15235158 NR Description: putative protein; protein id: At4g39610.1, by cDNA: 97747. [Arabidopsis thaliana] >gi|7486050|pir||T09377
  misc_feature (1)..(252): Homolog of NCBI NO: 21618123 NR Description: unknown [Arabidopsis thaliana]
  misc_feature (1)..(251): Homolog of NCBI NO: 34903148 NR Description: unnamed protein product [Oryza sativa (japonica group)] >gi|6630701|dbj|BAA88547.1| unnamed protein product
  misc_feature (145)..(252): Homolog of NCBI NO: 15237221 NR Description: putative protein; protein id: At5g23100.1 thaliana] >gi|9759368|dbj|BAB09827.1|
  misc_feature (81)..(143): Homolog of NCBI NO: 15237221 NR Description: putative protein; protein id: At5g23100.1 thaliana] >gi|9759368|dbj|BAB09827.1|
  misc_feature (81)..(252): Homolog of NCBI NO: 18405770 NR Description: expressed protein; protein id: At2g41660.1, by cDNA: 35456., supported by cDNA: gi_13569547 [Arabidopsis
  misc_feature (81)..(252): Homolog of NCBI NO: 21593037 NR Description: unknown [Arabidopsis thaliana]
MMTPTTMSPLGSPKSKKSTATVRPEITLEQPSGRNKTTGSKSTKLFRRVRSVFRSLPIMSPMCKFPVGGGGRLHENHVHGGTRVTGTLFGYRKTRVNLAVQENPRSLPILLLELAIPTGKLLQDLGVGLVRIALECEKKPSEKTKIIDEPIWALYCNGKKSGYGVKRQPTEEDLVVMQMLHAVSMGAGVLPVSSGAITEQSGGGGGGQQEGDLTYMRAHFERVIGSRDSETYYMMNPDGNSGPELSIFFVRV

SEQ ID NO: 79883 - protein, 251 aa, Arabidopsis thaliana
  peptide (1)..(251): Ceres Seq. ID no. 12653600
  misc_feature (82)..(251): Pfam Name: Protein of unknown function, DUF617 Pfam Description: Protein of unknown function, DUF617
  misc_feature (1)..(251): Homolog of NCBI NO: 15240220 NR Description: putative protein; protein id: At5g06990.1 thaliana] >gi|9759555|dbj|BAB11157.1|
  misc_feature (1)..(251): Homolog of NCBI NO: 34909066 NR Description: P0702B09.30 [Oryza sativa (japonica
  misc_feature (4)..(251): Homolog of NCBI NO: 15227126 NR Description: hypothetical protein; protein id: At2g21990.1
  misc_feature (1)..(251): Homolog of NCBI NO: 15235158 NR Description: putative protein; protein id: At4g39610.1, by cDNA: 97747. [Arabidopsis thaliana] >gi|7486050|pir||T09377
  misc_feature (1)..(251): Homolog of NCBI NO: 21618123 NR Description: unknown [Arabidopsis thaliana]
  misc_feature (1)..(250): Homolog of NCBI NO: 34903148 NR Description: unnamed protein product [Oryza sativa (japonica group)] >gi|6630701|dbj|BAA88547.1| unnamed protein product
  misc_feature (144)..(251): Homolog of NCBI NO: 15237221 NR Description: putative protein; protein id: At5g23100.1 thaliana] >gi|9759368|dbj|BAB09827.1|
  misc_feature (80)..(142): Homolog of NCBI NO: 15237221 NR Description: putative protein; protein id: At5g23100.1 thaliana] >gi|9759368|dbj|BAB09827.1|
  misc_feature (80)..(251): Homolog of NCBI NO: 18405770 NR Description: expressed protein; protein id: At2g41660.1, by cDNA: 35456., supported by cDNA: gi_13569547 [Arabidopsis
  misc_feature (80)..(251): Homolog of NCBI NO: 21593037 NR Description: unknown [Arabidopsis thaliana]
MTPTTMSPLGSPKSKKSTATVRPEITLEQPSGRNKTTGSKSTKLFRRVRSVFRSLPIMSPMCKFPVGGGGRLHENHVHGGTRVTGTLFGYRKTRVNLAVQENPRSLPILLLELAIPTGKLLQDLGVGLVRIALECEKKPSEKTKIIDEPIWALYCNGKKSGYGVKRQPTEEDLVVMQMLHAVSMGAGVLPVSSGAITEQSGGGGGGQQEGDLTYMRAHFERVIGSRDSETYYMMNPDGNSGPELSIFFVRV

SEQ ID NO: 79884 - DNA, 1677 bp, Arabidopsis thaliana
  misc_feature (1)..(1677): Ceres Seq. ID no. 12653601
  misc_feature: MA Experiment ID: 20000347 Result: Up-regulated in Transcription
  misc_feature: MA Experiment 20000347 PARAMETER Experiment Name: At_2mM_SA_Sub_P Parameter: Age (day) Value: 14
  misc_feature: MA Experiment 20000347 PARAMETER Experiment Name: At_2mM_SA_Sub_P Parameter: Organism Value: A. thaliana
  misc_feature: MA Experiment 20000347 PARAMETER Experiment Name: At_2mM_SA_Sub_P Parameter: Plant Line Value: WS
  misc_feature: MA Experiment 20000347 PARAMETER Experiment Name: At_2mM_SA_Sub_P Parameter: Timepoint (hr) Value: 6
  misc_feature: MA Experiment 20000347 PARAMETER Experiment Name: At_2mM_SA_Sub_P Parameter: Tissue Value: Aerial
  misc_feature: MA Experiment 20000347 PARAMETER Experiment Name: At_2mM_SA_Sub_P Parameter: Treatment Value: 2mM SA vs. No Treatment
  misc_feature: MA Experiment ID: 20000348 Result: Up-regulated in Transcription
  misc_feature: MA Experiment 20000348 PARAMETER Experiment Name: At_100uM_ABA_Sub_P Parameter: Age (day) Value: 14
  misc_feature: MA Experiment 20000348 PARAMETER Experiment Name: At_100uM_ABA_Sub_P Parameter: Organism Value: A. thaliana
  misc_feature: MA Experiment 20000348 PARAMETER Experiment Name: At_100uM_ABA_Sub_P Parameter: Plant Line Value: WS
  misc_feature: MA Experiment 20000348 PARAMETER Experiment Name: At_100uM_ABA_Sub_P Parameter: Timepoint (hr) Value: 1
  misc_feature: MA Experiment 20000348 PARAMETER Experiment Name: At_100uM_ABA_Sub_P Parameter: Tissue Value: Aerial
  misc_feature: MA Experiment 20000348 PARAMETER Experiment Name: At_100uM_ABA_Sub_P Parameter: Treatment Value: 100uM ABA vs. No Treatment
gatggagaacaaaccaagtgtattaactgaaagatatgaagttgggaggttattgggtcaaggtacttttgctaaagtgtattttggaaggagtaatcataccaacgagagtgtagctatcaagatgattgacaaggacaaagttatgagagtcgggcttagccagcaaatcaagcgagagatctctgtaatgaggatcgctaaacacccgaatgtcgttgagttatacgaggttatggctacaaagtcaaggatttactttgttattgagtattgtaaaggtggtgagcttttcaacaaggttgcaaaaggaaaacttaaagaagatgttgcttggaagtatttttatcagcttattagtgcggttgatttttgtcacagccgcggagtttatcaccgcgacattaagccggaaaatcttttgttggatgacaatgataatcttaaggtatctgattttggtttaagtgcgcttgctgattgcaagcggcaagatggtcttctacatacaacttgtggtacacctgcttatgttgcgcccgaggttattaaccgaaaaggatacgagggtacgaaagcggatatttggtcttgtggtgttgttttgtttgttcttttggctggttatcttcctttccatgacactaatcttatggagatgtataggaagataggtaaagcagacttcaagtgtcccagctggtttgctcctgaggtaaagagactattgtgtaagatgttggaccctaaccatgagactagaatcactattgcaaaaatcaaggagagttcttggttcagaaagggtttgcatttgaagcaaaaaaagatggaaaagatggagaaacaacaagtcagagaggctactaatcccatggaagctggaggttcaggccaaaatgaaaacggagaaaaccacgagccgcctcgacttgctaccttgaatgctttcgatatcatcgccttgtctacggggtttggtctggcaggactttttggggatgtatatgacaagcgagaatctaggttcgcgtcgcaaaaacctgcttcagagatcatttctaagctagtagaggttgccaagtgcctgaagctgaagataagaaagcaaggcgcaggcttgttcaaactggaaagagtaaaggaaggaaaaaacggaattttgacgatggatgcagagatattccaagtgacgccgacgtttcacctggtggaagtgaagaaatgtaatggagatacaatggagtatcagaagttagtggaggaggatcttaggcctgctttggcagatattgtttgggtttggcaaggcgagaaggagaaagaggagcagttactgcaggatgaacaaggagagcaagaaccatcatagcaagttcagctacaagcctacaactgcaagcacatgaattgttgcaggaacatgaaaatggtaaccctcttgcgacttcagctgaaacagaagcaagcatcaagaaactctaacgaaaacagaggaaggaaaacaataacaattgcacaaaatggattctttttgcatatagactacaaaaattgtagatagttgattgatttgtaacaactacgagctttttttttaccttgcctcttgtgaagttttgaacgtatattgtttcatgagtacagtaattgaatttctttaagagtttggtcgat

SEQ ID NO: 79885 - protein, 456 aa, Arabidopsis thaliana
  peptide (1)..(456): Ceres Seq. ID no. 12653602
  misc_feature (12)..(266): Pfam Name: Protein kinase domain Pfam Description: Protein kinase domain
  misc_feature (1)..(456): Homolog of NCBI NO: 15240687 NR Description: serine threonine protein kinase-like protein; id: At5g07070.1, supported by cDNA: gi_9280635 [Arabidopsis
  misc_feature (1)..(456): Homolog of NCBI NO: 9280636 NR Description: CBL-interacting protein kinase 2 [Arabidopsis
  misc_feature (1)..(454): Homolog of NCBI NO: 8777339 NR Description: serine/threonine protein kinase [Arabidopsis
  misc_feature (1)..(454): Homolog of NCBI NO: 18424099 NR Description: serine/threonine protein kinase; protein id: supported by cDNA: gi_13249118, supported by cDNA: gi_13448028, by cDNA: gi_20453091 [Arabidopsis thaliana]
  misc_feature (1)..(452): Homolog of NCBI NO: 23428550 NR Description: Serine/threonine Kinase [Persea americana]
  misc_feature (6)..(455): Homolog of NCBI NO: 34907870 NR Description: putative serine/threonine protein kinase [Oryza
  misc_feature (1)..(456): Homolog of NCBI NO: 7446373 NR Description: probable serine/threonine protein kinase (EC
  misc_feature (1)..(435): Homolog of NCBI NO: 15241066 NR Description: serine/threonine protein kinase ATPK10; protein At5g01810.1, supported by cDNA: gi_13249133, supported by cDNA: supported by cDNA: gi_1777311 [Arabidopsis thaliana]
  misc_feature (1)..(435): Homolog of NCBI NO: 1777312 NR Description: novel serine/threonine protein kinase
  misc_feature (6)..(432): Homolog of NCBI NO: 15218854 NR Description: protein kinase PK4, putative; protein id: supported by cDNA: gi_14334387 [Arabidopsis thaliana]
MENKPSVLTERYEVGRLLGQGTFAKVYFGRSNHTNESVAIKMIDKDKVMRVGLSQQIKREISVMRIAKHPNVVELYEVMATKSRIYFVIEYCKGGELFNKVAKGKLKEDVAWKYFYQLISAVDFCHSRGVYHRDIKPENLLLDDNDNLKVSDFGLSALADCKRQDGLLHTTCGTPAYVAPEVINRKGYEGTKADIWSCGVVLFVLLAGYLPFHDTNLMEMYRKIGKADFKCPSWFAPEVKRLLCKMLDPNHETRITIAKIKESSWFRKGLHLKQKKMEKMEKQQVREATNPMEAGGSGQNENGENHEPPRLATLNAFDIIALSTGFGLAGLFGDVYDKRESRFASQKPASEIISKLVEVAKCLKLKIRKQGAGLFKLERVKEGKNGILTMDAEIFQVTPTFHLVEVKKCNGDTMEYQKLVEEDLRPALADIVWVWQGEKEKEEQLLQDEQGEQEPS

SEQ ID NO: 79886 - protein, 415 aa, Arabidopsis thaliana
  peptide (1)..(415): Ceres Seq. ID no. 12653603
  misc_feature (1)..(225): Pfam Name: Protein kinase domain Pfam Description: Protein kinase domain
  misc_feature (1)..(415): Homolog of NCBI NO: 15240687 NR Description: serine threonine protein kinase-like protein; id: At5g07070.1, supported by cDNA: gi_9280635 [Arabidopsis
  misc_feature (1)..(415): Homolog of NCBI NO: 9280636 NR Description: CBL-interacting protein kinase 2 [Arabidopsis
  misc_feature (1)..(413): Homolog of NCBI NO: 8777339 NR Description: serine/threonine protein kinase [Arabidopsis
  misc_feature (1)..(413): Homolog of NCBI NO: 18424099 NR Description: serine/threonine protein kinase; protein id: supported by cDNA: gi_13249118, supported by cDNA: gi_13448028, by cDNA: gi_20453091 [Arabidopsis thaliana]
  misc_feature (1)..(411): Homolog of NCBI NO: 23428550 NR Description: Serine/threonine Kinase [Persea americana]
  misc_feature (1)..(414): Homolog of NCBI NO: 34907870 NR Description: putative serine/threonine protein kinase [Oryza
  misc_feature (1)..(415): Homolog of NCBI NO: 7446373 NR Description: probable serine/threonine protein kinase (EC
  misc_feature (1)..(394): Homolog of NCBI NO: 15241066 NR Description: serine/threonine protein kinase ATPK10; protein At5g01810.1, supported by cDNA: gi_13249133, supported by cDNA: supported by cDNA: gi_1777311 [Arabidopsis thaliana]
  misc_feature (1)..(394): Homolog of NCBI NO: 1777312 NR Description: novel serine/threonine protein kinase
  misc_feature (1)..(391): Homolog of NCBI NO: 15218854 NR Description: protein kinase PK4, putative; protein id: supported by cDNA: gi_14334387 [Arabidopsis thaliana]
MIDKDKVMRVGLSQQIKREISVMRIAKHPNVVELYEVMATKSRIYFVIEYCKGGELFNKVAKGKLKEDVAWKYFYQLISAVDFCHSRGVYHRDIKPENLLLDDNDNLKVSDFGLSALADCKRQDGLLHTTCGTPAYVAPEVINRKGYEGTKADIWSCGVVLFVLLAGYLPFHDTNLMEMYRKIGKADFKCPSWFAPEVKRLLCKMLDPNHETRITIAKIKESSWFRKGLHLKQKKMEKMEKQQVREATNPMEAGGSGQNENGENHEPPRLATLNAFDIIALSTGFGLAGLFGDVYDKRESRFASQKPASEIISKLVEVAKCLKLKIRKQGAGLFKLERVKEGKNGILTMDAEIFQVTPTFHLVEVKKCNGDTMEYQKLVEEDLRPALADIVWVWQGEKEKEEQLLQDEQGEQEPS

SEQ ID NO: 79887 - protein, 408 aa, Arabidopsis thaliana
  peptide (1)..(408): Ceres Seq. ID no. 12653604
  misc_feature (1)..(218): Pfam Name: Protein kinase domain Pfam Description: Protein kinase domain
  misc_feature (1)..(408): Homolog of NCBI NO: 15240687 NR Description: serine threonine protein kinase-like protein; id: At5g07070.1, supported by cDNA: gi_9280635 [Arabidopsis
  misc_feature (1)..(408): Homolog of NCBI NO: 9280636 NR Description: CBL-interacting protein kinase 2 [Arabidopsis
  misc_feature (1)..(406): Homolog of NCBI NO: 8777339 NR Description: serine/threonine protein kinase [Arabidopsis
  misc_feature (1)..(406): Homolog of NCBI NO: 18424099 NR Description: serine/threonine protein kinase; protein id: supported by cDNA: gi_13249118, supported by cDNA: gi_13448028, by cDNA: gi_20453091 [Arabidopsis thaliana]
  misc_feature (1)..(404): Homolog of NCBI NO: 23428550 NR Description: Serine/threonine Kinase [Persea americana]
  misc_feature (1)..(407): Homolog of NCBI NO: 34907870 NR Description: putative serine/threonine protein kinase [Oryza
  misc_feature (1)..(408): Homolog of NCBI NO: 7446373 NR Description: probable serine/threonine protein kinase (EC
  misc_feature (1)..(387): Homolog of NCBI NO: 15241066 NR Description: serine/threonine protein kinase ATPK10; protein At5g01810.1, supported by cDNA: gi_13249133, supported by cDNA: supported by cDNA: gi_1777311 [Arabidopsis thaliana]
  misc_feature (1)..(387): Homolog of NCBI NO: 1777312 NR Description: novel serine/threonine protein kinase
  misc_feature (1)..(384): Homolog of NCBI NO: 15218854 NR Description: protein kinase PK4, putative; protein id: supported by cDNA: gi_14334387 [Arabidopsis thaliana]
MRVGLSQQIKREISVMRIAKHPNVVELYEVMATKSRIYFVIEYCKGGELFNKVAKGKLKEDVAWKYFYQLISAVDFCHSRGVYHRDIKPENLLLDDNDNLKVSDFGLSALADCKRQDGLLHTTCGTPAYVAPEVINRKGYEGTKADIWSCGVVLFVLLAGYLPFHDTNLMEMYRKIGKADFKCPSWFAPEVKRLLCKMLDPNHETRITIAKIKESSWFRKGLHLKQKKMEKMEKQQVREATNPMEAGGSGQNENGENHEPPRLATLNAFDIIALSTGFGLAGLFGDVYDKRESRFASQKPASEIISKLVEVAKCLKLKIRKQGAGLFKLERVKEGKNGILTMDAEIFQVTPTFHLVEVKKCNGDTMEYQKLVEEDLRPALADIVWVWQGEKEKEEQLLQDEQGEQEPS

SEQ ID NO: 79888 - DNA, 1223 bp, Arabidopsis thaliana
  misc_feature (1)..(1223): Ceres Seq. ID no. 12653625
  misc_feature: MA Experiment ID: 20000227 Result: Down-regulated in Transcription
  misc_feature: MA Experiment 20000227 PARAMETER Experiment Name: At_Root-Tips-vs-Tops_P Parameter: Tissue Value: Root Tips vs. Root Tops
  misc_feature: MA Experiment ID: 20000495 Result: Down-regulated in Transcription
  misc_feature: MA Experiment 20000495 PARAMETER Experiment Name: At_Guard_Cells_P Parameter: Harvest Date Value: 8/2/2002
  misc_feature: MA Experiment 20000495 PARAMETER Experiment Name: At_Guard_Cells_P Parameter: Organism Value: A. thaliana
  misc_feature: MA Experiment 20000495 PARAMETER Experiment Name: At_Guard_Cells_P Parameter: Tissue Value: Guard Cells vs. Leaves
aaccaaaacaaaaaaaacaataaacaaattacagacagagaagagagagatcactatggctgtcggagatgatgatctggagaacagaatgtcggcgaaagatcgaggaatcggaagcagaggcggtgatcggaatcgaatcggaccaccgcctctgccggtagccttgtcgtcgtctactgaatttggcgataacgcgttgtcgtcgcggtggacgtcgtggcttgttccgatgttcgttgtggctaacgttgcggttttcgtcgtggcgatgttcgttaataactgtccgaatcatttcgagtctcaccgtctcagaggtcactgtgtcgccaagtttctcggtagactctcctttgagcctctccgaactaatcctctctttggtccatcttctcacacattggagaagttaggagcacttgagtggagcaaagttgtggagaagaaggaaggttggcgtctcttgacatgtatatggttacacgcgggtgttattcatctcggagccaatatgttaagccttgttttcattggtattcgtctcgagcagcaatttggttttgttagaatcggagttatatacctattatcaggaattggagggagtgtattgtcgtcgttgtttatcagaaacagtatctctgttggagcttctggtgctctttttggcctccttggctcaatgctctctgaacttttcaccaactggacaatctactctaacaagattgctgcactcctgacgcttttgtttgtcatcttgataaacttggcaattgggattctgcctcacgttgataattttgctcatgtgggtggatttgtaacggggtttctcctcggtttcattctgttggctcgtccccagtttaagtggttagcaagagagcatatgccacaaggcacacctctgagatacaagtacaagacttaccaatacctattgtggctcctatctttggttctattgattgccgggtttgtggtggcgctgttgatgctatttcgaggagaaaacggcaatgatcactgccgttggtgtcactacctgcgctgtgttcccacctcaagttggaggtgtgatgatgtctgataagtaaagcaacaagttttactttgtaaatccatctataggttatatttatcgtgttattttttagtgtttcagtgtaattgtgtgattgcttatgtgtgtgactcttattgggcttttataccgg

SEQ ID NO: 79889 - protein, 364 aa, Arabidopsis thaliana
  peptide (1)..(364): Ceres Seq. ID no. 12653626
  misc_feature (19)..(364): Homolog of NCBI NO: 15240744 NR Description: membrane protein; protein id: At5g07250.1, by cDNA: gi_16648761, supported by cDNA: gi_20466142 [Arabidopsis
  misc_feature (70)..(362): Homolog of NCBI NO: 294845 NR Description: membrane protein [Saccharum hybrid cultivar
  misc_feature (62)..(361): Homolog of NCBI NO: 15221690 NR Description: membrane protein, putative; protein id: [Arabidopsis thaliana] >gi|25404407|pir||F96656 probable membrane
  misc_feature (57)..(362): Homolog of NCBI NO: 30693911 NR Description: membrane protein, Rhomboid family [Arabidopsis
  misc_feature (69)..(361): Homolog of NCBI NO: 15222058 NR Description: membrane protein, putative; protein id: supported by cDNA: gi_17529033 [Arabidopsis thaliana] putative membrane protein [Arabidopsis thaliana]
  misc_feature (69)..(361): Homolog of NCBI NO: 25402744 NR Description: protein T12C24.28 [imported] - Arabidopsis >gi|9502383|gb|AAF88090.1|AC025417_18 T12C24.28 [Arabidopsis
  misc_feature (34)..(361): Homolog of NCBI NO: 37536172 NR Description: putative membrane protein [Oryza sativa (japonica group)] >gi|22122915|gb|AAM92298.1| putative membrane protein
  misc_feature (57)..(362): Homolog of NCBI NO: 11357824 NR Description: hypothetical protein F5K20.80 - Arabidopsis >gi|7629998|emb|CAB88340.1| putative protein [Arabidopsis
  misc_feature (41)..(362): Homolog of NCBI NO: 38344377 NR Description: OSJNBb0032E06.11 [Oryza sativa (japonica
  misc_feature (63)..(359): Homolog of NCBI NO: 15236387 NR Description: putative membrane protein; protein id: At4g23070.1
TKTKKTINKLQTEKREITMAVGDDDLENRMSAKDRGIGSRGGDRNRIGPPPLPVALSSSTEFGDNALSSRWTSWLVPMFVVANVAVFVVAMFVNNCPNHFESHRLRGHCVAKFLGRLSFEPLRTNPLFGPSSHTLEKLGALEWSKVVEKKEGWRLLTCIWLHAGVIHLGANMLSLVFIGIRLEQQFGFVRIGVIYLLSGIGGSVLSSLFIRNSISVGASGALFGLLGSMLSELFTNWTIYSNKIAALLTLLFVILINLAIGILPHVDNFAHVGGFVTGFLLGFILLARPQFKWLAREHMPQGTPLRYKYKTYQYLLWLLSLVLLIAGFVVALLMLFRGENGNDHCRWCHYLRCVPTSSWRCDDV

SEQ ID NO: 79890 - protein, 346 aa, Arabidopsis thaliana
  peptide (1)..(346): Ceres Seq. ID no. 12653627
  misc_feature (1)..(346): Homolog of NCBI NO: 15240744 NR Description: membrane protein; protein id: At5g07250.1, by cDNA: gi_16648761, supported by cDNA: gi_20466142 [Arabidopsis
  misc_feature (52)..(344): Homolog of NCBI NO: 294845 NR Description: membrane protein [Saccharum hybrid cultivar
  misc_feature (44)..(343): Homolog of NCBI NO: 15221690 NR Description: membrane protein, putative; protein id: [Arabidopsis thaliana] >gi|25404407|pir||F96656 probable membrane
  misc_feature (39)..(344): Homolog of NCBI NO: 30693911 NR Description: membrane protein, Rhomboid family [Arabidopsis
  misc_feature (51)..(343): Homolog of NCBI NO: 15222058 NR Description: membrane protein, putative; protein id: supported by cDNA: gi_17529033 [Arabidopsis thaliana] putative membrane protein [Arabidopsis thaliana]
  misc_feature (51)..(343): Homolog of NCBI NO: 25402744 NR Description: protein T12C24.28 [imported] - Arabidopsis >gi|9502383|gb|AAF88090.1|AC025417_18 T12C24.28 [Arabidopsis
  misc_feature (16)..(343): Homolog of NCBI NO: 37536172 NR Description: putative membrane protein [Oryza sativa (japonica group)] >gi|22122915|gb|AAM92298.1| putative membrane protein
  misc_feature (39)..(344): Homolog of NCBI NO: 11357824 NR Description: hypothetical protein F5K20.80 - Arabidopsis >gi|7629998|emb|CAB88340.1| putative protein [Arabidopsis
  misc_feature (23)..(344): Homolog of NCBI NO: 38344377 NR Description: OSJNBb0032E06.11 [Oryza sativa (japonica
  misc_feature (45)..(341): Homolog of NCBI NO: 15236387 NR Description: putative membrane protein; protein id: At4g23070.1
MAVGDDDLENRMSAKDRGIGSRGGDRNRIGPPPLPVALSSSTEFGDNALSSRWTSWLVPMFVVANVAVFVVAMFVNNCPNHFESHRLRGHCVAKFLGRLSFEPLRTNPLFGPSSHTLEKLGALEWSKVVEKKEGWRLLTCIWLHAGVIHLGANMLSLVFIGIRLEQQFGFVRIGVIYLLSGIGGSVLSSLFIRNSISVGASGALFGLLGSMLSELFTNWTIYSNKIAALLTLLFVILINLAIGILPHVDNFAHVGGFVTGFLLGFILLARPQFKWLAREHMPQGTPLRYKYKTYQYLLWLLSLVLLIAGFVVALLMLFRGENGNDHCRWCHYLRCVPTSSWRCDDV

SEQ ID NO: 79891 - protein, 335 aa, Arabidopsis thaliana
  peptide (1)..(335): Ceres Seq. ID no. 12653628
  misc_feature (1)..(335): Homolog of NCBI NO: 15240744 NR Description: membrane protein; protein id: At5g07250.1, by cDNA: gi_16648761, supported by cDNA: gi_20466142 [Arabidopsis
  misc_feature (41)..(333): Homolog of NCBI NO: 294845 NR Description: membrane protein [Saccharum hybrid cultivar
  misc_feature (33)..(332): Homolog of NCBI NO: 15221690 NR Description: membrane protein, putative; protein id: [Arabidopsis thaliana] >gi|25404407|pir||F96656 probable membrane
  misc_feature (28)..(333): Homolog of NCBI NO: 30693911 NR Description: membrane protein, Rhomboid family [Arabidopsis
  misc_feature (40)..(332): Homolog of NCBI NO: 15222058 NR Description: membrane protein, putative; protein id: supported by cDNA: gi_17529033 [Arabidopsis thaliana] putative membrane protein [Arabidopsis thaliana]
  misc_feature (40)..(332): Homolog of NCBI NO: 25402744 NR Description: protein T12C24.28 [imported] - Arabidopsis >gi|9502383|gb|AAF88090.1|AC025417_18 T12C24.28 [Arabidopsis
  misc_feature (5)..(332): Homolog of NCBI NO: 37536172 NR Description: putative membrane protein [Oryza sativa (japonica group)] >gi|22122915|gb|AAM92298.1| putative membrane protein
  misc_feature (28)..(333): Homolog of NCBI NO: 11357824 NR Description: hypothetical protein F5K20.80 - Arabidopsis >gi|7629998|emb|CAB88340.1| putative protein [Arabidopsis
  misc_feature (12)..(333): Homolog of NCBI NO: 38344377 NR Description: OSJNBb0032E06.11 [Oryza sativa (japonica
  misc_feature (34)..(330): Homolog of NCBI NO: 15236387 NR Description: putative membrane protein; protein id: At4g23070.1
MSAKDRGIGSRGGDRNRIGPPPLPVALSSSTEFGDNALSSRWTSWLVPMFVVANVAVFVVAMFVNNCPNHFESHRLRGHCVAKFLGRLSFEPLRTNPLFGPSSHTLEKLGALEWSKVVEKKEGWRLLTCIWLHAGVIHLGANMLSLVFIGIRLEQQFGFVRIGVIYLLSGIGGSVLSSLFIRNSISVGASGALFGLLGSMLSELFTNWTIYSNKIAALLTLLFVILINLAIGILPHVDNFAHVGGFVTGFLLGFILLARPQFKWLAREHMPQGTPLRYKYKTYQYLLWLLSLVLLIAGFVVALLMLFRGENGNDHCRWCHYLRCVPTSSWRCDDV

SEQ ID NO: 79892 - DNA, 1629 bp, Arabidopsis thaliana
  misc_feature (1)..(1629): Ceres Seq. ID no. 12653655
  misc_feature: MA Experiment ID: 20000306 Result: Down-regulated in Transcription
  misc_feature: MA Experiment 20000306 PARAMETER Experiment Name: At_Germinating_Seeds_Sub_P Parameter: Age (hr) Value: 6 vs. 0
  misc_feature: MA Experiment 20000306 PARAMETER Experiment Name: At_Germinating_Seeds_Sub_P Parameter: Organism Value: A. thaliana
  misc_feature: MA Experiment 20000306 PARAMETER Experiment Name: At_Germinating_Seeds_Sub_P Parameter: Plant Line Value: WS
  misc_feature: MA Experiment 20000306 PARAMETER Experiment Name: At_Germinating_Seeds_Sub_P Parameter: Tissue Value: Germinating Seeds
  misc_feature: MA Experiment ID: 20000307 Result: Down-regulated in Transcription
  misc_feature: MA Experiment 20000307 PARAMETER Experiment Name: At_Germinating_Seeds_Sub_P Parameter: Age (hr) Value: 24 vs. 0
  misc_feature: MA Experiment 20000307 PARAMETER Experiment Name: At_Germinating_Seeds_Sub_P Parameter: Organism Value: A. thaliana
  misc_feature: MA Experiment 20000307 PARAMETER Experiment Name: At_Germinating_Seeds_Sub_P Parameter: Plant Line Value: WS
  misc_feature: MA Experiment 20000307 PARAMETER Experiment Name: At_Germinating_Seeds_Sub_P Parameter: Tissue Value: Germinating Seeds
  misc_feature: MA Experiment ID: 20000315 Result: Down-regulated in Transcription
  misc_feature: MA Experiment 20000315 PARAMETER Experiment Name: At_14day_Shoots-Roots_Sub_P Parameter: Age (day) Value: 14
  misc_feature: MA Experiment 20000315 PARAMETER Experiment Name: At_14day_Shoots-Roots_Sub_P Parameter: Organism Value: A. thaliana
  misc_feature: MA Experiment 20000315 PARAMETER Experiment Name: At_14day_Shoots-Roots_Sub_P Parameter: Plant Line Value: WS
  misc_feature: MA Experiment 20000315 PARAMETER Experiment Name: At_14day_Shoots-Roots_Sub_P Parameter: Tissue Value: Shoots vs. Whole Plant
  misc_feature: MA Experiment ID: 20000327 Result: Down-regulated in Transcription
  misc_feature: MA Experiment 20000327 PARAMETER Experiment Name: At_42deg_Heat_Sub_P Parameter: Age (day) Value: 14
  misc_feature: MA Experiment 20000327 PARAMETER Experiment Name: At_42deg_Heat_Sub_P Parameter: Organism Value: A. thaliana
  misc_feature: MA Experiment 20000327 PARAMETER Experiment Name: At_42deg_Heat_Sub_P Parameter: Plant Line Value: WS
  misc_feature: MA Experiment 20000327 PARAMETER Experiment Name: At_42deg_Heat_Sub_P Parameter: Temperature (deg C) Value: 42 vs. 22
  misc_feature: MA Experiment 20000327 PARAMETER Experiment Name: At_42deg_Heat_Sub_P Parameter: Timepoint (hr) Value: 1
  misc_feature: MA Experiment 20000327 PARAMETER Experiment Name: At_42deg_Heat_Sub_P Parameter: Tissue Value: Aerial
  misc_feature: MA Experiment ID: 20000328 Result: Down-regulated in Transcription
  misc_feature: MA Experiment 20000328 PARAMETER Experiment Name: At_42deg_Heat_Sub_P Parameter: Age (day) Value: 14
  misc_feature: MA Experiment 20000328 PARAMETER Experiment Name: At_42deg_Heat_Sub_P Parameter: Organism Value: A. thaliana
  misc_feature: MA Experiment 20000328 PARAMETER Experiment Name: At_42deg_Heat_Sub_P Parameter: Plant Line Value: WS
  misc_feature: MA Experiment 20000328 PARAMETER Experiment Name: At_42deg_Heat_Sub_P Parameter: Temperature (deg C) Value: 42 vs. 22
  misc_feature: MA Experiment 20000328 PARAMETER Experiment Name: At_42deg_Heat_Sub_P Parameter: Timepoint (hr) Value: 6
  misc_feature: MA Experiment 20000328 PARAMETER Experiment Name: At_42deg_Heat_Sub_P Parameter: Tissue Value: Aerial
  misc_feature: MA Experiment ID: 20000347 Result: Up-regulated in Transcription
  misc_feature: MA Experiment 20000347 PARAMETER Experiment Name: At_2mM_SA_Sub_P Parameter: Age (day) Value: 14
  misc_feature: MA Experiment 20000347 PARAMETER Experiment Name: At_2mM_SA_Sub_P Parameter: Organism Value: A. thaliana
  misc_feature: MA Experiment 20000347 PARAMETER Experiment Name: At_2mM_SA_Sub_P Parameter: Plant Line Value: WS
  misc_feature: MA Experiment 20000347 PARAMETER Experiment Name: At_2mM_SA_Sub_P Parameter: Timepoint (hr) Value: 6
  misc_feature: MA Experiment 20000347 PARAMETER Experiment Name: At_2mM_SA_Sub_P Parameter: Tissue Value: Aerial
  misc_feature: MA Experiment 20000347 PARAMETER Experiment Name: At_2mM_SA_Sub_P Parameter: Treatment Value: 2mM SA vs. No Treatment
  misc_feature: MA Experiment ID: 20000348 Result: Up-regulated in Transcription
  misc_feature: MA Experiment 20000348 PARAMETER Experiment Name: At_100uM_ABA_Sub_P Parameter: Age (day) Value: 14
  misc_feature: MA Experiment 20000348 PARAMETER Experiment Name: At_100uM_ABA_Sub_P Parameter: Organism Value: A. thaliana
  misc_feature: MA Experiment 20000348 PARAMETER Experiment Name: At_100uM_ABA_Sub_P Parameter: Plant Line Value: WS
  misc_feature: MA Experiment 20000348 PARAMETER Experiment Name: At_100uM_ABA_Sub_P Parameter: Timepoint (hr) Value: 1
  misc_feature: MA Experiment 20000348 PARAMETER Experiment Name: At_100uM_ABA_Sub_P Parameter: Tissue Value: Aerial
  misc_feature: MA Experiment 20000348 PARAMETER Experiment Name: At_100uM_ABA_Sub_P Parameter: Treatment Value: 100uM ABA vs. No Treatment
  misc_feature: MA Experiment ID: 20000352 Result: Up-regulated in Transcription
  misc_feature: MA Experiment 20000352 PARAMETER Experiment Name: At_Drought_Sub_P Parameter: Age (day) Value: 7
  misc_feature: MA Experiment 20000352 PARAMETER Experiment Name: At_Drought_Sub_P Parameter: Organism Value: A. thaliana
  misc_feature: MA Experiment 20000352 PARAMETER Experiment Name: At_Drought_Sub_P Parameter: Plant Line Value: WS
  misc_feature: MA Experiment 20000352 PARAMETER Experiment Name: At_Drought_Sub_P Parameter: Timepoint (hr) Value: 6
  misc_feature: MA Experiment 20000352 PARAMETER Experiment Name: At_Drought_Sub_P Parameter: Tissue Value: Whole Plant
  misc_feature: MA Experiment 20000352 PARAMETER Experiment Name: At_Drought_Sub_P Parameter: Treatment Value: Drought vs. No Drought
atgagaaactcgccgtccaagaacgggtcggcgggagggcattctcgtacttatacagacacaatctggtctccctttgtcaagtcaggtttgggaatatctcccaacagatcctacgccctagtctccctcctcatcctcctcatagtcggcgcttttatctccacgcgcctcctcctcgacaccaccgttctgctagagaaaaaagccgcgacgacgacgacgactaaaacccaaactcagacgataaccccaaaataccctcgaccaaccacggtaattactcaaagccctaaaccggagttcacactacactgctccgccaacgaaaccaccgcgtcatgtccgagtaacaaatacccgacgacaacgagcttcgaagatgatgatacaaaccatcctccgaccgccacgtgtcctgattacttccgttggattcacgaggatctccgtccatggtcgaggacgggaatcacgagggaagcattggagcgagctaaaaagacggcgactttccggctagcgatcgtcggcgggaaaatttacgtcgagaaatttcaagatgcatttcagacaagagacgtgttcacaatctggggtttcttacagcttttacggaagtaccctgggaagattccagatctcgagcttatgtttgactgcgttgactggccggtcgttagagctacggaattcgccggagctaacgcgccgtcgcctccgccgctgtttcgttactgtgggaatgaggagacgcttgatatcgtgtttcctgattggtccttctggggatgggcggaggtgaatataaagccatgggagagtttgttgaaggaactaagagaagggaatgagaggactaaatggattaacagagagccgtatgcttattggaaaggtaatccaatggtcgcagagacacgacaagatcttatgaaatgtaatgtctctgaggaacacgagtggaacgctcgtttgtatgctcaggattggatcaaagaatcaaaggaaggttacaagcaatcagacttggcaagccaatgccatcacagatacaagatatatatagaagggtctgcatggtccgttagcgagaagtacattttggcgtgtgactctgtgactctgctagtgaaacctcattactatgatttctttactagaggtttgcttccagctcaccattattggcccgttagagagcacgataagtgccgctccatcaaattcgccgttgattggggtaactctcacattcaaaaggcacaggatattggaaaggcggccagcgattttatccaacaagacctcaagatggactatgtgtatgactacatgtaccatcttttaaccgaatactcgaaactcctccagtttaaacccgagattccgcggaatgccgtggagatttgctcggaaacaatggcatgtctgaggagtgggaatgagcggaagttcatgacagaatcactcgtgaagcaacctgcggattctggtccgtgtgccatgcctcctccttatgatccggctacgtattacgaggttgtgaagaggaaacagagtactaatatgagaatcctacagtgggaaatgaagtactggagtaagcagaatcaaaccggctcttga

SEQ ID NO: 79893 - protein, 542 aa, Arabidopsis thaliana
  peptide (1)..(542): Ceres Seq. ID no. 12653656
  misc_feature (134)..(535): Pfam Name: Arabidopsis thaliana protein of unknown function Pfam Description: Arabidopsis thaliana protein of unknown
  misc_feature (1)..(542): Homolog of NCBI NO: 15237842 NR Description: putative protein; protein id: At5g23850.1 thaliana] >gi|10176852|dbj|BAB10058.1| contains similarity to
  misc_feature (1)..(542): Homolog of NCBI NO: 15229061 NR Description: putative protein; protein id: At3g48980.1
  misc_feature (82)..(536): Homolog of NCBI NO: 15222413 NR Description: hypothetical protein; protein id: At1g63420.1
  misc_feature (35)..(534): Homolog of NCBI NO: 7486461 NR Description: hypothetical protein At2g45830 [imported] - thaliana >gi|3386611|gb|AAC28541.1| unknown protein [Arabidopsis
  misc_feature (132)..(540): Homolog of NCBI NO: 15233070 NR Description: putative protein; protein id: At3g61270.1
  misc_feature (163)..(530): Homolog of NCBI NO: 21742339 NR Description: OSJNBb0020O11.18 [Oryza sativa (japonica
  misc_feature (82)..(329): Homolog of NCBI NO: 25404907 NR Description: protein F2K11.20 [imported] - Arabidopsis >gi|6633846|gb|AAF19705.1|AC008047_12 F2K11.20 [Arabidopsis
  misc_feature (326)..(536): Homolog of NCBI NO: 25404907 NR Description: protein F2K11.20 [imported] - Arabidopsis >gi|6633846|gb|AAF19705.1|AC008047_12 F2K11.20 [Arabidopsis
  misc_feature (97)..(532): Homolog of NCBI NO: 38346998 NR Description: OSJNBb0039L24.21 [Oryza sativa (japonica
  misc_feature (163)..(534): Homolog of NCBI NO: 30690136 NR Description: expressed protein [Arabidopsis thaliana]
MRNSPSKNGSAGGHSRTYTDTIWSPFVKSGLGISPNRSYALVSLLILLIVGAFISTRLLLDTTVLLEKKAATTTTTKTQTQTITPKYPRPTTVITQSPKPEFTLHCSANETTASCPSNKYPTTTSFEDDDTNHPPTATCPDYFRWIHEDLRPWSRTGITREALERAKKTATFRLAIVGGKIYVEKFQDAFQTRDVFTIWGFLQLLRKYPGKIPDLELMFDCVDWPVVRATEFAGANAPSPPPLFRYCGNEETLDIVFPDWSFWGWAEVNIKPWESLLKELREGNERTKWINREPYAYWKGNPMVAETRQDLMKCNVSEEHEWNARLYAQDWIKESKEGYKQSDLASQCHHRYKIYIEGSAWSVSEKYILACDSVTLLVKPHYYDFFTRGLLPAHHYWPVREHDKCRSIKFAVDWGNSHIQKAQDIGKAASDFIQQDLKMDYVYDYMYHLLTEYSKLLQFKPEIPRNAVEICSETMACLRSGNERKFMTESLVKQPADSGPCAMPPPYDPATYYEVVKRKQSTNMRILQWEMKYWSKQNQTGS

SEQ ID NO: 79894 - protein, 325 aa, Arabidopsis thaliana
  peptide (1)..(325): Ceres Seq. ID no. 12653657
  misc_feature (1)..(318): Pfam Name: Arabidopsis thaliana protein of unknown function Pfam Description: Arabidopsis thaliana protein of unknown
  misc_feature (1)..(325): Homolog of NCBI NO: 15237842 NR Description: putative protein; protein id: At5g23850.1 thaliana] >gi|10176852|dbj|BAB10058.1| contains similarity to
  misc_feature (1)..(325): Homolog of NCBI NO: 15229061 NR Description: putative protein; protein id: At3g48980.1
  misc_feature (1)..(319): Homolog of NCBI NO: 15222413 NR Description: hypothetical protein; protein id: At1g63420.1
  misc_feature (1)..(317): Homolog of NCBI NO: 7486461 NR Description: hypothetical protein At2g45830 [imported] - thaliana >gi|3386611|gb|AAC28541.1| unknown protein [Arabidopsis
  misc_feature (1)..(323): Homolog of NCBI NO: 15233070 NR Description: putative protein; protein id: At3g61270.1
  misc_feature (1)..(313): Homolog of NCBI NO: 21742339 NR Description: OSJNBb0020O11.18 [Oryza sativa (japonica
  misc_feature (1)..(112): Homolog of NCBI NO: 25404907 NR Description: protein F2K11.20 [imported] - Arabidopsis >gi|6633846|gb|AAF19705.1|AC008047_12 F2K11.20 [Arabidopsis
  misc_feature (109)..(319): Homolog of NCBI NO: 25404907 NR Description: protein F2K11.20 [imported] - Arabidopsis >gi|6633846|gb|AAF19705.1|AC008047_12 F2K11.20 [Arabidopsis
  misc_feature (1)..(315): Homolog of NCBI NO: 38346998 NR Description: OSJNBb0039L24.21 [Oryza sativa (japonica
  misc_feature (1)..(317): Homolog of NCBI NO: 30690136 NR Description: expressed protein [Arabidopsis thaliana]
MFDCVDWPVVRATEFAGANAPSPPPLFRYCGNEETLDIVFPDWSFWGWAEVNIKPWESLLKELREGNERTKWINREPYAYWKGNPMVAETRQDLMKCNVSEEHEWNARLYAQDWIKESKEGYKQSDLASQCHHRYKIYIEGSAWSVSEKYILACDSVTLLVKPHYYDFFTRGLLPAHHYWPVREHDKCRSIKFAVDWGNSHIQKAQDIGKAASDFIQQDLKMDYVYDYMYHLLTEYSKLLQFKPEIPRNAVEICSETMACLRSGNERKFMTESLVKQPADSGPCAMPPPYDPATYYEVVKRKQSTNMRILQWEMKYWSKQNQTGS

SEQ ID NO: 79895 - DNA, 1023 bp, Arabidopsis thaliana
  misc_feature (1)..(1023): Ceres Seq. ID no. 12653672
  misc_feature: MA Experiment ID: 20000227 Result: Up-regulated in Transcription
  misc_feature: MA Experiment 20000227 PARAMETER Experiment Name: At_Root-Tips-vs-Tops_P Parameter: Tissue Value: Root Tips vs. Root Tops
  misc_feature: MA Experiment ID: 20000451 Result: Down-regulated in Transcription
  misc_feature: MA Experiment 20000451 PARAMETER Experiment Name: At_CS6879_Shoots-Roots_P Parameter: Age (day) Value: 14
  misc_feature: MA Experiment 20000451 PARAMETER Experiment Name: At_CS6879_Shoots-Roots_P Parameter: Organism Value: A. thaliana
  misc_feature: MA Experiment 20000451 PARAMETER Experiment Name: At_CS6879_Shoots-Roots_P Parameter: Plant Line Value: CS6879 vs. WS
  misc_feature: MA Experiment 20000451 PARAMETER Experiment Name: At_CS6879_Shoots-Roots_P Parameter: Tissue Value: Roots
atgcagtttgtgaattttttcccactattggccctcgtagtcataagcttagccggaaaggctacggtagaggctgcgacgggattgaaccctccggtgaagcttgtctggcattattacaaacttactaacacttgtgatgatgcagagacttatattagataccaagttgaaaagttttataagaatgatagtagcattgccccaaagctgcttcgtctcctctactccgattgtatggttaatggatgtgatggttcgattcttttgcaaggaccaaactcagagaggacagctccacagaatcgagggcttggaggttttgtgataatcgataaaataaagcaagttcttgaatcacgttgtcctggtgtcgtttcttgcgctgatatcctcaaccttgccactagagatgctgttcacatggccggagcaccgtcttatcctgtgtttacggggagaagggacggtgggacattaaatgcagacgccgtagatctgccgtcaccgtccatctcagtcgatgagtcattggcatatttcaagtccaaaggtcttgacgttttggatatgactactcttctaggagcacactcaatggggaagacacattgtagctacgtagtggacagactatacaacttcaagaacacagggaaaccagatccgaccatgaacacgacattggtgtcacaacttcgatatctttgtcctccaagaacacaaaagggccaaaccgatccactggtttacctaaatccagactcaggctcgagcaacagattcacaagctcatactactctcgtgtcttgtctcataacgctgttttacgggtggaccaagagttgctcaacaacgatgactcgaaggagatcacgcaagagtttgcttccggttttgaagatttcagaaagtcttttgctttggcaatgtcgagaatgggatctatcaatgttttgacgggaacagctggagagattcgtcgagactgcagagttaccaacgctaatgacggggcctaa

SEQ ID NO: 79896 - protein, 340 aa, Arabidopsis thaliana
  peptide (1)..(340): Ceres Seq. ID no. 12653673
  misc_feature (53)..(299): Pfam Name: Peroxidase Pfam Description: Peroxidase
  misc_feature (1)..(340): Homolog of NCBI NO: 15237884 NR Description: cationic peroxidase family; protein id: [Arabidopsis thaliana] >gi|26397805|sp|Q9FLV5|PE61_ARATH Probable
  misc_feature (1)..(335): Homolog of NCBI NO: 30689391 NR Description: peroxidase, putative [Arabidopsis thaliana]
  misc_feature (22)..(335): Homolog of NCBI NO: 25285613 NR Description: probable peroxidase [imported] - Arabidopsis >gi|2288998|gb|AAB64327.1| putative peroxidase [Arabidopsis
  misc_feature (1)..(335): Homolog of NCBI NO: 19310389 NR Description: At2g43480/T1O24.22 [Arabidopsis thaliana]
  misc_feature (43)..(337): Homolog of NCBI NO: 1546690 NR Description: peroxidase; peroxidase ATP14a [Arabidopsis
  misc_feature (43)..(337): Homolog of NCBI NO: 15242232 NR Description: peroxidase, putative; protein id: At5g22410.1 thaliana] >gi|26397811|sp|Q9FMR0|PE60_ARATH Peroxidase 60 (Atperox P60) (ATP14a) >gi|9757822|dbj|BAB08340.1| peroxidase
  misc_feature (10)..(335): Homolog of NCBI NO: 37536958 NR Description: putative peroxidase [Oryza sativa (japonica >gi|18855005|gb|AAL79697.1| putative peroxidase [Oryza sativa]
  misc_feature (43)..(340): Homolog of NCBI NO: 21594792 NR Description: peroxidase [Arabidopsis thaliana]
  misc_feature (39)..(335): Homolog of NCBI NO: 7433068 NR Description: probable peroxidase (EC 1.11.1.7), cationic - thaliana >gi|3241946|gb|AAC23733.1| putative peroxidase
  misc_feature (39)..(335): Homolog of NCBI NO: 30688665 NR Description: peroxidase, putative [Arabidopsis thaliana] Peroxidase 25 precursor (Atperox P25) >gi|22655091|gb|AAM98136.1| peroxidase [Arabidopsis thaliana] >gi|30984554|gb|AAP42740.1|
MQFVNFFPLLALVVISLAGKATVEAATGLNPPVKLVWHYYKLTNTCDDAETYIRYQVEKFYKNDSSIAPKLLRLLYSDCMVNGCDGSILLQGPNSERTAPQNRGLGGFVIIDKIKQVLESRCPGVVSCADILNLATRDAVHMAGAPSYPVFTGRRDGGTLNADAVDLPSPSISVDESLAYFKSKGLDVLDMTTLLGAHSMGKTHCSYVVDRLYNFKNTGKPDPTMNTTLVSQLRYLCPPRTQKGQTDPLVYLNPDSGSSNRFTSSYYSRVLSHNAVLRVDQELLNNDDSKEITQEFASGFEDFRKSFALAMSRMGSINVLTGTAGEIRRDCRVTNANDGA

SEQ ID NO: 79897 - protein, 261 aa, Arabidopsis thaliana
  peptide (1)..(261): Ceres Seq. ID no. 12653674
  misc_feature (1)..(220): Pfam Name: Peroxidase Pfam Description: Peroxidase
  misc_feature (1)..(261): Homolog of NCBI NO: 15237884 NR Description: cationic peroxidase family; protein id: [Arabidopsis thaliana] >gi|26397805|sp|Q9FLV5|PE61_ARATH Probable
  misc_feature (1)..(256): Homolog of NCBI NO: 30689391 NR Description: peroxidase, putative [Arabidopsis thaliana]
  misc_feature (1)..(256): Homolog of NCBI NO: 25285613 NR Description: probable peroxidase [imported] - Arabidopsis >gi|2288998|gb|AAB64327.1| putative peroxidase [Arabidopsis
  misc_feature (1)..(256): Homolog of NCBI NO: 19310389 NR Description: At2g43480/T1O24.22 [Arabidopsis thaliana]
  misc_feature (1)..(258): Homolog of NCBI NO: 1546690 NR Description: peroxidase; peroxidase ATP14a [Arabidopsis
  misc_feature (1)..(258): Homolog of NCBI NO: 15242232 NR Description: peroxidase, putative; protein id: At5g22410.1 thaliana] >gi|26397811|sp|Q9FMR0|PE60_ARATH Peroxidase 60 (Atperox P60) (ATP14a) >gi|9757822|dbj|BAB08340.1| peroxidase
  misc_feature (1)..(256): Homolog of NCBI NO: 37536958 NR Description: putative peroxidase [Oryza sativa (japonica >gi|18855005|gb|AAL79697.1| putative peroxidase [Oryza sativa]
  misc_feature (1)..(261): Homolog of NCBI NO: 21594792 NR Description: peroxidase [Arabidopsis thaliana]
  misc_feature (1)..(256): Homolog of NCBI NO: 7433068 NR Description: probable peroxidase (EC 1.11.1.7), cationic - thaliana >gi|3241946|gb|AAC23733.1| putative peroxidase
  misc_feature (1)..(256): Homolog of NCBI NO: 30688665 NR Description: peroxidase, putative [Arabidopsis thaliana] Peroxidase 25 precursor (Atperox P25) >gi|22655091|gb|AAM98136.1| peroxidase [Arabidopsis thaliana] >gi|30984554|gb|AAP42740.1|
MVNGCDGSILLQGPNSERTAPQNRGLGGFVIIDKIKQVLESRCPGVVSCADILNLATRDAVHMAGAPSYPVFTGRRDGGTLNADAVDLPSPSISVDESLAYFKSKGLDVLDMTTLLGAHSMGKTHCSYVVDRLYNFKNTGKPDPTMNTTLVSQLRYLCPPRTQKGQTDPLVYLNPDSGSSNRFTSSYYSRVLSHNAVLRVDQELLNNDDSKEITQEFASGFEDFRKSFALAMSRMGSINVLTGTAGEIRRDCRVTNANDGA

SEQ ID NO: 79898 - protein, 199 aa, Arabidopsis thaliana
  peptide (1)..(199): Ceres Seq. ID no. 12653675
  misc_feature (1)..(158): Pfam Name: Peroxidase Pfam Description: Peroxidase
  misc_feature (1)..(199): Homolog of NCBI NO: 15237884 NR Description: cationic peroxidase family; protein id: [Arabidopsis thaliana] >gi|26397805|sp|Q9FLV5|PE61_ARATH Probable
  misc_feature (1)..(194): Homolog of NCBI NO: 30689391 NR Description: peroxidase, putative [Arabidopsis thaliana]
  misc_feature (1)..(194): Homolog of NCBI NO: 25285613 NR Description: probable peroxidase [imported] - Arabidopsis >gi|2288998|gb|AAB64327.1| putative peroxidase [Arabidopsis
  misc_feature (1)..(194): Homolog of NCBI NO: 19310389 NR Description: At2g43480/T1O24.22 [Arabidopsis thaliana]
  misc_feature (1)..(196): Homolog of NCBI NO: 1546690 NR Description: peroxidase; peroxidase ATP14a [Arabidopsis
  misc_feature (1)..(196): Homolog of NCBI NO: 15242232 NR Description: peroxidase, putative; protein id: At5g22410.1 thaliana] >gi|26397811|sp|Q9FMR0|PE60_ARATH Peroxidase 60 (Atperox P60) (ATP14a) >gi|9757822|dbj|BAB08340.1| peroxidase
  misc_feature (1)..(194): Homolog of NCBI NO: 37536958 NR Description: putative peroxidase [Oryza sativa (japonica >gi|18855005|gb|AAL79697.1| putative peroxidase [Oryza sativa]
  misc_feature (1)..(199): Homolog of NCBI NO: 21594792 NR Description: peroxidase [Arabidopsis thaliana]
  misc_feature (1)..(194): Homolog of NCBI NO: 7433068 NR Description: probable peroxidase (EC 1.11.1.7), cationic - thaliana >gi|3241946|gb|AAC23733.1| putative peroxidase
  misc_feature (1)..(194): Homolog of NCBI NO: 30688665 NR Description: peroxidase, putative [Arabidopsis thaliana] Peroxidase 25 precursor (Atperox P25) >gi|22655091|gb|AAM98136.1| peroxidase [Arabidopsis thaliana] >gi|30984554|gb|AAP42740.1|
MAGAPSYPVFTGRRDGGTLNADAVDLPSPSISVDESLAYFKSKGLDVLDMTTLLGAHSMGKTHCSYVVDRLYNFKNTGKPDPTMNTTLVSQLRYLCPPRTQKGQTDPLVYLNPDSGSSNRFTSSYYSRVLSHNAVLRVDQELLNNDDSKEITQEFASGFEDFRKSFALAMSRMGSINVLTGTAGEIRRDCRVTNANDGA

SEQ ID NO: 79899 - DNA, 909 bp, Arabidopsis thaliana
  misc_feature (1)..(909): Ceres Seq. ID no. 12653676
  misc_feature: MA Experiment ID: 20000184 Result: Up-regulated in Transcription
  misc_feature: MA Experiment 20000184 PARAMETER Experiment Name: At_Shoots__P Parameter: Age (day) Value: 7
  misc_feature: MA Experiment 20000184 PARAMETER Experiment Name: At_Shoots__P Parameter: Tissue Value: Shoots vs. Whole Plant
  misc_feature: MA Experiment ID: 20000185 Result: Up-regulated in Transcription
  misc_feature: MA Experiment 20000185 PARAMETER Experiment Name: At_Roots__P Parameter: Age (day) Value: 7 vs. 21
  misc_feature: MA Experiment 20000185 PARAMETER Experiment Name: At_Roots__P Parameter: Organism Value: A. thaliana
  misc_feature: MA Experiment 20000185 PARAMETER Experiment Name: At_Roots__P Parameter: Tissue Value: Roots vs. Whole Plant
  misc_feature: MA Experiment ID: 20000234 Result: Down-regulated in Transcription
  misc_feature: MA Experiment 20000234 PARAMETER Experiment Name: At_Siliques_P Parameter: Age (day) Value: 21
  misc_feature: MA Experiment 20000234 PARAMETER Experiment Name: At_Siliques_P Parameter: Organism Value: A. thaliana
  misc_feature: MA Experiment 20000234 PARAMETER Experiment Name: At_Siliques_P Parameter: Plant Line Value: WS
  misc_feature: MA Experiment 20000234 PARAMETER Experiment Name: At_Siliques_P Parameter: Tissue Value: Less Than 5mm Siliques vs. Whole Plant
  misc_feature: MA Experiment ID: 20000265 Result: Up-regulated in Transcription
  misc_feature: MA Experiment 20000265 PARAMETER Experiment Name: At_Open_Flower_P Parameter: Age (day) Value: 21
  misc_feature: MA Experiment 20000265 PARAMETER Experiment Name: At_Open_Flower_P Parameter: Plant Line Value: WS
  misc_feature: MA Experiment 20000265 PARAMETER Experiment Name: At_Open_Flower_P Parameter: Tissue Value: Closed Flower vs. Whole Plant
  misc_feature: MA Experiment ID: 20000286 Result: Up-regulated in Transcription
  misc_feature: MA Experiment 20000286 PARAMETER Experiment Name: At_Open_Flower_P Parameter: Age (day) Value: 21
  misc_feature: MA Experiment 20000286 PARAMETER Experiment Name: At_Open_Flower_P Parameter: Plant Line Value: WS
  misc_feature: MA Experiment 20000286 PARAMETER Experiment Name: At_Open_Flower_P Parameter: Tissue Value: Half Open vs. Whole Plant
  misc_feature: MA Experiment ID: 20000437 Result: Up-regulated in Transcription
  misc_feature: MA Experiment 20000437 PARAMETER Experiment Name: At_Drought_P Parameter: Age (day) Value: 8
  misc_feature: MA Experiment 20000437 PARAMETER Experiment Name: At_Drought_P Parameter: Organism Value: A. thaliana
  misc_feature: MA Experiment 20000437 PARAMETER Experiment Name: At_Drought_P Parameter: Plant Line Value: WS
  misc_feature: MA Experiment 20000437 PARAMETER Experiment Name: At_Drought_P Parameter: Timepoint (hr) Value: 24
  misc_feature: MA Experiment 20000437 PARAMETER Experiment Name: At_Drought_P Parameter: Tissue Value: Whole Plant
  misc_feature: MA Experiment 20000437 PARAMETER Experiment Name: At_Drought_P Parameter: Treatment Value: Drought vs. No Drought
  misc_feature: MA Experiment ID: 20000439 Result: Up-regulated in Transcription
  misc_feature: MA Experiment 20000439 PARAMETER Experiment Name: At_Roots__P Parameter: Age (day) Value: 14 vs. 21
  misc_feature: MA Experiment 20000439 PARAMETER Experiment Name: At_Roots__P Parameter: Organism Value: A. thaliana
  misc_feature: MA Experiment 20000439 PARAMETER Experiment Name: At_Roots__P Parameter: Tissue Value: Roots vs. Whole Plant
  misc_feature: MA Experiment ID: 20000453 Result: Up-regulated in Transcription
  misc_feature: MA Experiment 20000453 PARAMETER Experiment Name: At_100uM_ABA_P Parameter: Age (day) Value: 15
  misc_feature: MA Experiment 20000453 PARAMETER Experiment Name: At_100uM_ABA_P Parameter: Organism Value: A. thaliana
  misc_feature: MA Experiment 20000453 PARAMETER Experiment Name: At_100uM_ABA_P Parameter: Plant Line Value: WS
  misc_feature: MA Experiment 20000453 PARAMETER Experiment Name: At_100uM_ABA_P Parameter: Timepoint (hr) Value: 24
  misc_feature: MA Experiment 20000453 PARAMETER Experiment Name: At_100uM_ABA_P Parameter: Tissue Value: Aerial
  misc_feature: MA Experiment 20000453 PARAMETER Experiment Name: At_100uM_ABA_P Parameter: Treatment Value: 100uM ABA vs. No Treatment
  misc_feature: MA Experiment ID: 20001554 Result: Up-regulated in Transcription
  misc_feature: MA Experiment 20001554 PARAMETER Experiment Name: At_Drought_Soil_Dry_P Parameter: Age (day) Value: 21
  misc_feature: MA Experiment 20001554 PARAMETER Experiment Name: At_Drought_Soil_Dry_P Parameter: Organism Value: A. thaliana
  misc_feature: MA Experiment 20001554 PARAMETER Experiment Name: At_Drought_Soil_Dry_P Parameter: Plant Line Value: WS
  misc_feature: MA Experiment 20001554 PARAMETER Experiment Name: At_Drought_Soil_Dry_P Parameter: Post Timepoint (hr) Value: None
  misc_feature: MA Experiment 20001554 PARAMETER Experiment Name: At_Drought_Soil_Dry_P Parameter: Post-Treatment Value: None
  misc_feature: MA Experiment 20001554 PARAMETER Experiment Name: At_Drought_Soil_Dry_P Parameter: Timepoint (day) Value: 7
  misc_feature: MA Experiment 20001554 PARAMETER Experiment Name: At_Drought_Soil_Dry_P Parameter: Treatment Value: Drought vs. No Drought
  misc_feature: MA Experiment ID: 20001555 Result: Up-regulated in Transcription
  misc_feature: MA Experiment 20001555 PARAMETER Experiment Name: At_Drought_Soil_Dry_P Parameter: Age (day) Value: 24
  misc_feature: MA Experiment 20001555 PARAMETER Experiment Name: At_Drought_Soil_Dry_P Parameter: Organism Value: A. thaliana
  misc_feature: MA Experiment 20001555 PARAMETER Experiment Name: At_Drought_Soil_Dry_P Parameter: Plant Line Value: WS
  misc_feature: MA Experiment 20001555 PARAMETER Experiment Name: At_Drought_Soil_Dry_P Parameter: Post Timepoint (hr) Value: None
  misc_feature: MA Experiment 20001555 PARAMETER Experiment Name: At_Drought_Soil_Dry_P Parameter: Post-Treatment Value: None
  misc_feature: MA Experiment 20001555 PARAMETER Experiment Name: At_Drought_Soil_Dry_P Parameter: Timepoint (day) Value: 10
  misc_feature: MA Experiment 20001555 PARAMETER Experiment Name: At_Drought_Soil_Dry_P Parameter: Treatment Value: Drought vs. No Drought
  misc_feature: MA Experiment ID: 20001906 Result: Up-regulated in Transcription
  misc_feature: MA Experiment 20001906 PARAMETER Experiment Name: At_Drought_Reproduction_P Parameter: Age (day) Value: 35
  misc_feature: MA Experiment 20001906 PARAMETER Experiment Name: At_Drought_Reproduction_P Parameter: Organism Value: A. thaliana
  misc_feature: MA Experiment 20001906 PARAMETER Experiment Name: At_Drought_Reproduction_P Parameter: Plant Line Value: WS
  misc_feature: MA Experiment 20001906 PARAMETER Experiment Name: At_Drought_Reproduction_P Parameter: Timepoint (day) Value: 5
  misc_feature: MA Experiment 20001906 PARAMETER Experiment Name: At_Drought_Reproduction_P Parameter: Tissue Value: Siliques
  misc_feature: MA Experiment 20001906 PARAMETER Experiment Name: At_Drought_Reproduction_P Parameter: Treatment Value: Drought vs. No Drought
  misc_feature: MA Experiment ID: 20001907 Result: Up-regulated in Transcription
  misc_feature: MA Experiment 20001907 PARAMETER Experiment Name: At_Drought_Reproduction_P Parameter: Age (day) Value: 37
  misc_feature: MA Experiment 20001907 PARAMETER Experiment Name: At_Drought_Reproduction_P Parameter: Organism Value: A. thaliana
  misc_feature: MA Experiment 20001907 PARAMETER Experiment Name: At_Drought_Reproduction_P Parameter: Plant Line Value: WS
  misc_feature: MA Experiment 20001907 PARAMETER Experiment Name: At_Drought_Reproduction_P Parameter: Timepoint (day) Value: 7
  misc_feature: MA Experiment 20001907 PARAMETER Experiment Name: At_Drought_Reproduction_P Parameter: Tissue Value: Siliques
  misc_feature: MA Experiment 20001907 PARAMETER Experiment Name: At_Drought_Reproduction_P Parameter: Treatment Value: Drought vs. No Drought
  misc_feature: MA Experiment ID: 20001910 Result: Up-regulated in Transcription
  misc_feature: MA Experiment 20001910 PARAMETER Experiment Name: At_Drought_Reproduction_P Parameter: Age (day) Value: 37
  misc_feature: MA Experiment 20001910 PARAMETER Experiment Name: At_Drought_Reproduction_P Parameter: Organism Value: A. thaliana
  misc_feature: MA Experiment 20001910 PARAMETER Experiment Name: At_Drought_Reproduction_P Parameter: Plant Line Value: WS
  misc_feature: MA Experiment 20001910 PARAMETER Experiment Name: At_Drought_Reproduction_P Parameter: Timepoint (day) Value: 7
  misc_feature: MA Experiment 20001910 PARAMETER Experiment Name: At_Drought_Reproduction_P Parameter: Tissue Value: Flowers
  misc_feature: MA Experiment 20001910 PARAMETER Experiment Name: At_Drought_Reproduction_P Parameter: Treatment Value: Drought vs. No Drought
atgaccaacatgactcttcgcaagcatgttatatactttcttttcttcataagctgctctcttagcaaaccctccgatgcatccagaggtggcatagccatctattggggccaaaacggaaacgaaggtaacctctctgccacgtgtgccaccggccggtatgcttacgtcaacgtcgcctttcttgtgaaattcggaaatggccaaacaccggagctcaaccttgccggccactgcaaccctgcggcgaacacttgcacccattttggctctcaggtcaaagattgtcagtctcgtggcatcaaggttatgttgtctctcggcggcgggattggaaactactcgattgggtcgagggaggacgcaaaagttatcgctgattatctgtggaacaacttcttgggaggaaaatcatcatcacgtcccttaggtgatgctgttctagatggtatcgatttcaatatcgagcttggctctcctcaacactgggatgatctcgccaggactctctcaaagtttagccacagaggaagaaaaatatatctaacaggagctcctcaatgtccatttccagacagattaatgggaagtgctctcaacactaaacgttttgactatgtttggattcaattctacaataatccaccgtgttcatacagttcaggtaatactcaaaacctcttcgattcatggaacaagtggaccacttcaatcgcagcccaaaaattcttcttgggtctaccggcagctcctgaagctgccggaagtggctatatcccaccagatgtactgacttcacagattcttccgactttaaagaagtctaggaagtatggaggtgtaatgctttggtctaaattctgggatgataaaaatggatacagttcatctatattggctagtgtgtga

SEQ ID NO: 79900 - protein, 302 aa, Arabidopsis thaliana
  peptide (1)..(302): Ceres Seq. ID no. 12653677
  misc_feature (30)..(289): Pfam Name: Glycosyl hydrolases family 18 Pfam Description: Glycosyl hydrolases family 18
  misc_feature (1)..(302): Homolog of NCBI NO: 15237886 NR Description: glycosyl hydrolase family 18 (acidic protein id: At5g24090.1 [Arabidopsis thaliana] Acidic endochitinase precursor >gi|2342435|dbj|BAA21861.1| acidic
  misc_feature (1)..(302): Homolog of NCBI NO: 2342433 NR Description: acidic endochitinase [Arabidopsis thaliana]
  misc_feature (1)..(302): Homolog of NCBI NO: 2342443 NR Description: acidic endochitinase [Arabidopsis thaliana]
  misc_feature (1)..(302): Homolog of NCBI NO: 2342439 NR Description: acidic endochitinase [Arabidopsis thaliana]
  misc_feature (1)..(302): Homolog of NCBI NO: 2342453 NR Description: acidic endochitinase [Arabidopsis thaliana]
  misc_feature (1)..(302): Homolog of NCBI NO: 166664 NR Description: acidic endochitinase >gi|227775|prf||1710349B
  misc_feature (1)..(302): Homolog of NCBI NO: 2342447 NR Description: acidic endochitinase [Arabidopsis thaliana]
  misc_feature (1)..(302): Homolog of NCBI NO: 320555 NR Description: chitinase (EC 3.2.1.14) precursor, acidic -
  misc_feature (1)..(302): Homolog of NCBI NO: 2342451 NR Description: acidic endochitinase [Arabidopsis thaliana]
  misc_feature (1)..(302): Homolog of NCBI NO: 2342459 NR Description: acidic endochitinase [Arabidopsis thaliana]
MTNMTLRKHVIYFLFFISCSLSKPSDASRGGIAIYWGQNGNEGNLSATCATGRYAYVNVAFLVKFGNGQTPELNLAGHCNPAANTCTHFGSQVKDCQSRGIKVMLSLGGGIGNYSIGSREDAKVIADYLWNNFLGGKSSSRPLGDAVLDGIDFNIELGSPQHWDDLARTLSKFSHRGRKIYLTGAPQCPFPDRLMGSALNTKRFDYVWIQFYNNPPCSYSSGNTQNLFDSWNKWTTSIAAQKFFLGLPAAPEAAGSGYIPPDVLTSQILPTLKKSRKYGGVMLWSKFWDDKNGYSSSILASV

SEQ ID NO: 79901 - protein, 299 aa, Arabidopsis thaliana
  peptide (1)..(299): Ceres Seq. ID no. 12653678
  misc_feature (27)..(286): Pfam Name: Glycosyl hydrolases family 18 Pfam Description: Glycosyl hydrolases family 18
  misc_feature (1)..(299): Homolog of NCBI NO: 15237886 NR Description: glycosyl hydrolase family 18 (acidic protein id: At5g24090.1 [Arabidopsis thaliana] Acidic endochitinase precursor >gi|2342435|dbj|BAA21861.1| acidic
  misc_feature (1)..(299): Homolog of NCBI NO: 2342433 NR Description: acidic endochitinase [Arabidopsis thaliana]
  misc_feature (1)..(299): Homolog of NCBI NO: 2342443 NR Description: acidic endochitinase [Arabidopsis thaliana]
  misc_feature (1)..(299): Homolog of NCBI NO: 2342439 NR Description: acidic endochitinase [Arabidopsis thaliana]
  misc_feature (1)..(299): Homolog of NCBI NO: 2342453 NR Description: acidic endochitinase [Arabidopsis thaliana]
  misc_feature (1)..(299): Homolog of NCBI NO: 166664 NR Description: acidic endochitinase >gi|227775|prf||1710349B
  misc_feature (1)..(299): Homolog of NCBI NO: 2342447 NR Description: acidic endochitinase [Arabidopsis thaliana]
  misc_feature (1)..(299): Homolog of NCBI NO: 320555 NR Description: chitinase (EC 3.2.1.14) precursor, acidic -
  misc_feature (1)..(299): Homolog of NCBI NO: 2342451 NR Description: acidic endochitinase [Arabidopsis thaliana]
  misc_feature (1)..(299): Homolog of NCBI NO: 2342459 NR Description: acidic endochitinase [Arabidopsis thaliana]
MTLRKHVIYFLFFISCSLSKPSDASRGGIAIYWGQNGNEGNLSATCATGRYAYVNVAFLVKFGNGQTPELNLAGHCNPAANTCTHFGSQVKDCQSRGIKVMLSLGGGIGNYSIGSREDAKVIADYLWNNFLGGKSSSRPLGDAVLDGIDFNIELGSPQHWDDLARTLSKFSHRGRKIYLTGAPQCPFPDRLMGSALNTKRFDYVWIQFYNNPPCSYSSGNTQNLFDSWNKWTTSIAAQKFFLGLPAAPEAAGSGYIPPDVLTSQILPTLKKSRKYGGVMLWSKFWDDKNGYSSSILASV

SEQ ID NO: 79902 - protein, 199 aa, Arabidopsis thaliana
  peptide (1)..(199): Ceres Seq. ID no. 12653679
  misc_feature (1)..(186): Pfam Name: Glycosyl hydrolases family 18 Pfam Description: Glycosyl hydrolases family 18
  misc_feature (1)..(199): Homolog of NCBI NO: 15237886 NR Description: glycosyl hydrolase family 18 (acidic protein id: At5g24090.1 [Arabidopsis thaliana] Acidic endochitinase precursor >gi|2342435|dbj|BAA21861.1| acidic
  misc_feature (1)..(199): Homolog of NCBI NO: 2342433 NR Description: acidic endochitinase [Arabidopsis thaliana]
  misc_feature (1)..(199): Homolog of NCBI NO: 2342443 NR Description: acidic endochitinase [Arabidopsis thaliana]
  misc_feature (1)..(199): Homolog of NCBI NO: 2342439 NR Description: acidic endochitinase [Arabidopsis thaliana]
  misc_feature (1)..(199): Homolog of NCBI NO: 2342453 NR Description: acidic endochitinase [Arabidopsis thaliana]
  misc_feature (1)..(199): Homolog of NCBI NO: 166664 NR Description: acidic endochitinase >gi|227775|prf||1710349B
  misc_feature (1)..(199): Homolog of NCBI NO: 2342447 NR Description: acidic endochitinase [Arabidopsis thaliana]
  misc_feature (1)..(199): Homolog of NCBI NO: 320555 NR Description: chitinase (EC 3.2.1.14) precursor, acidic -
  misc_feature (1)..(199): Homolog of NCBI NO: 2342451 NR Description: acidic endochitinase [Arabidopsis thaliana]
  misc_feature (1)..(199): Homolog of NCBI NO: 2342459 NR Description: acidic endochitinase [Arabidopsis thaliana]
MLSLGGGIGNYSIGSREDAKVIADYLWNNFLGGKSSSRPLGDAVLDGIDFNIELGSPQHWDDLARTLSKFSHRGRKIYLTGAPQCPFPDRLMGSALNTKRFDYVWIQFYNNPPCSYSSGNTQNLFDSWNKWTTSIAAQKFFLGLPAAPEAAGSGYIPPDVLTSQILPTLKKSRKYGGVMLWSKFWDDKNGYSSSILASV

SEQ ID NO: 79903 - DNA, 1000 bp, Arabidopsis thaliana
  misc_feature (1)..(1000): Ceres Seq. ID no. 12653702
  misc_feature: MA Experiment ID: 20000182 Result: Up-regulated in Transcription
  misc_feature: MA Experiment 20000182 PARAMETER Experiment Name: At_2mM_SA_P Parameter: Age (day) Value: 14
  misc_feature: MA Experiment 20000182 PARAMETER Experiment Name: At_2mM_SA_P Parameter: Organism Value: A. thaliana
  misc_feature: MA Experiment 20000182 PARAMETER Experiment Name: At_2mM_SA_P Parameter: Plant Line Value: WS
  misc_feature: MA Experiment 20000182 PARAMETER Experiment Name: At_2mM_SA_P Parameter: Timepoint (hr) Value: 6
  misc_feature: MA Experiment 20000182 PARAMETER Experiment Name: At_2mM_SA_P Parameter: Tissue Value: Aerial
  misc_feature: MA Experiment 20000182 PARAMETER Experiment Name: At_2mM_SA_P Parameter: Treatment Value: 2mM SA vs. No Treatment
  misc_feature: MA Experiment ID: 20000184 Result: Down-regulated in Transcription
  misc_feature: MA Experiment 20000184 PARAMETER Experiment Name: At_Shoots__P Parameter: Age (day) Value: 7
  misc_feature: MA Experiment 20000184 PARAMETER Experiment Name: At_Shoots__P Parameter: Tissue Value: Shoots vs. Whole Plant
  misc_feature: MA Experiment ID: 20000185 Result: Up-regulated in Transcription
  misc_feature: MA Experiment 20000185 PARAMETER Experiment Name: At_Roots__P Parameter: Age (day) Value: 7 vs. 21
  misc_feature: MA Experiment 20000185 PARAMETER Experiment Name: At_Roots__P Parameter: Organism Value: A. thaliana
  misc_feature: MA Experiment 20000185 PARAMETER Experiment Name: At_Roots__P Parameter: Tissue Value: Roots vs. Whole Plant
  misc_feature: MA Experiment ID: 20000227 Result: Down-regulated in Transcription
  misc_feature: MA Experiment 20000227 PARAMETER Experiment Name: At_Root-Tips-vs-Tops_P Parameter: Tissue Value: Root Tips vs. Root Tops
  misc_feature: MA Experiment ID: 20000234 Result: Down-regulated in Transcription
  misc_feature: MA Experiment 20000234 PARAMETER Experiment Name: At_Siliques_P Parameter: Age (day) Value: 21
  misc_feature: MA Experiment 20000234 PARAMETER Experiment Name: At_Siliques_P Parameter: Organism Value: A. thaliana
  misc_feature: MA Experiment 20000234 PARAMETER Experiment Name: At_Siliques_P Parameter: Plant Line Value: WS
  misc_feature: MA Experiment 20000234 PARAMETER Experiment Name: At_Siliques_P Parameter: Tissue Value: Less Than 5mm Siliques vs. Whole Plant
  misc_feature: MA Experiment ID: 20000264 Result: Up-regulated in Transcription
  misc_feature: MA Experiment 20000264 PARAMETER Experiment Name: At_Open_Flower_P Parameter: Age (day) Value: 21
  misc_feature: MA Experiment 20000264 PARAMETER Experiment Name: At_Open_Flower_P Parameter: Plant Line Value: WS
  misc_feature: MA Experiment 20000264 PARAMETER Experiment Name: At_Open_Flower_P Parameter: Tissue Value: Open Flower vs. Whole Plant
  misc_feature: MA Experiment ID: 20000286 Result: Up-regulated in Transcription
  misc_feature: MA Experiment 20000286 PARAMETER Experiment Name: At_Open_Flower_P Parameter: Age (day) Value: 21
  misc_feature: MA Experiment 20000286 PARAMETER Experiment Name: At_Open_Flower_P Parameter: Plant Line Value: WS
  misc_feature: MA Experiment 20000286 PARAMETER Experiment Name: At_Open_Flower_P Parameter: Tissue Value: Half Open vs. Whole Plant
  misc_feature: MA Experiment ID: 20000437 Result: Up-regulated in Transcription
  misc_feature: MA Experiment 20000437 PARAMETER Experiment Name: At_Drought_P Parameter: Age (day) Value: 8
  misc_feature: MA Experiment 20000437 PARAMETER Experiment Name: At_Drought_P Parameter: Organism Value: A. thaliana
  misc_feature: MA Experiment 20000437 PARAMETER Experiment Name: At_Drought_P Parameter: Plant Line Value: WS
  misc_feature: MA Experiment 20000437 PARAMETER Experiment Name: At_Drought_P Parameter: Timepoint (hr) Value: 24
  misc_feature: MA Experiment 20000437 PARAMETER Experiment Name: At_Drought_P Parameter: Tissue Value: Whole Plant
  misc_feature: MA Experiment 20000437 PARAMETER Experiment Name: At_Drought_P Parameter: Treatment Value: Drought vs. No Drought
  misc_feature: MA Experiment ID: 20000438 Result: Down-regulated in Transcription
  misc_feature: MA Experiment 20000438 PARAMETER Experiment Name: At_Shoots__P Parameter: Age (day) Value: 14
  misc_feature: MA Experiment 20000438 PARAMETER Experiment Name: At_Shoots__P Parameter: Tissue Value: Shoots vs. Whole Plant
  misc_feature: MA Experiment ID: 20000441 Result: Down-regulated in Transcription
  misc_feature: MA Experiment 20000441 PARAMETER Experiment Name: At_1uM_BR-BRZ__P Parameter: Tissue Value: Shoot Apices
  misc_feature: MA Experiment 20000441 PARAMETER Experiment Name: At_1uM_BR-BRZ__P Parameter: Treatment Value: 1uM BR vs. No Treatment
  misc_feature: MA Experiment ID: 20000443 Result: Down-regulated in Transcription
  misc_feature: MA Experiment 20000443 PARAMETER Experiment Name: At_1uM_BR-BRZ__P Parameter: Tissue Value: Shoot Apices
  misc_feature: MA Experiment 20000443 PARAMETER Experiment Name: At_1uM_BR-BRZ__P Parameter: Treatment Value: 1uM BRZ vs. No Treatment
  misc_feature: MA Experiment ID: 20001248 Result: Up-regulated in Transcription
  misc_feature: MA Experiment 20001248 PARAMETER Experiment Name: At_Far-red-induction_P Parameter: Age (day) Value: 7
  misc_feature: MA Experiment 20001248 PARAMETER Experiment Name: At_Far-red-induction_P Parameter: Light Value: Far-red vs. White
  misc_feature: MA Experiment 20001248 PARAMETER Experiment Name: At_Far-red-induction_P Parameter: Organism Value: A. thaliana
  misc_feature: MA Experiment 20001248 PARAMETER Experiment Name: At_Far-red-induction_P Parameter: Plant Line Value: Columbia
  misc_feature: MA Experiment 20001248 PARAMETER Experiment Name: At_Far-red-induction_P Parameter: Timepoint (hr) Value: 4
  misc_feature: MA Experiment 20001248 PARAMETER Experiment Name: At_Far-red-induction_P Parameter: Tissue Value: Whole Plant
aggaccatttttagtagaagtaaaaccagcgaaaacgaatcgtgagaaaagcaaaggctaataacagttgagagaagggtgtgtttgtatgggctgctctgtatcgaagaagaagaagaagaatgcaatgcgaccaccgggatatgaggatcccgagcttcttgcatccgtcacgccattcacggtagaagaagtggaggctttgtatgaactgttcaagaagctaagcagctcaattatcgatgatggtcttattcataaggaagaatttcagctggctttattcagaaataggaaccggaggaatctcttcgctgatcggatatttgatgtatttgatgtgaagcgaaatggagtgatcgagtttggtgaatttgtccggtccttaggtgtcttccatccaagcgcgccggtccatgaaaaagtcaaatttgctttcaagttgtacgatttacgacaaactggattcatcgagcgagaagaattgaaagagatggtagtagcgcttcttcacgaatccgaactagttctttccgaagatatgattgaagtaatggtggataaggctttcgtgcaagcagaccgcaaaaacgacggaaaaatcgatatagatgaatggaaagactttgtatccttgaatccatcgctcatcaagaacatgactttgccatatctaaaggacataaataggacgtttccaagtttcgtttcatcttgtgaagaggaagaaatggaattgcaaaacgtatcttcctaatataagccatgcaaggaaagataaatatacataaaacgaatatttttgtacaatatcttaaaagaggaagatagagatgtaagctaggatttggaaataaaccgatcttgataacgatattggacttgccttgtgtactgtatatatttagttatttacatagcgactctccatctcacatacataattactaattaaatatttacaaatctagtctattattgcttcattgttgtatatacc

SEQ ID NO: 79904 - protein, 222 aa, Arabidopsis thaliana; identical to SEQ ID NO: 75990
  peptide (1)..(222): Ceres Seq. ID no. 12653703
  misc_feature (156)..(184): Pfam Name: EF hand Pfam Description: EF hand
  misc_feature (1)..(222): Homolog of NCBI NO: 15237928 NR Description: calcium sensor homolog (gb|AAC26110.1); protein At5g24270.1, supported by cDNA: gi_11065946, supported by cDNA: supported by cDNA: gi_20465716 [Arabidopsis thaliana]
  misc_feature (11)..(214): Homolog of NCBI NO: 15217657 NR Description: calcineurin B-like protein; protein id: supported by cDNA: gi_15866275, supported by cDNA: gi_9965361
  misc_feature (1)..(215): Homolog of NCBI NO: 18414931 NR Description: calcineurin B-like protein 1; protein id: supported by cDNA: gi_3309081 [Arabidopsis thaliana]
  misc_feature (15)..(207): Homolog of NCBI NO: 22137326 NR Description: calcineurin B [Pisum sativum]
  misc_feature (1)..(215): Homolog of NCBI NO: 15238015 NR Description: calcineurin B 1; protein id: At5g47100.1, by cDNA: gi_15866278, supported by cDNA: gi_16151824 [Arabidopsis
  misc_feature (15)..(207): Homolog of NCBI NO: 16924116 NR Description: putative calcineurin B-like protein [Oryza sativa]
  misc_feature (11)..(214): Homolog of NCBI NO: 25295757 NR Description: protein F1N19.5 [imported] - Arabidopsis thaliana
  misc_feature (18)..(214): Homolog of NCBI NO: 15236778 NR Description: calcineurin B-like protein 3; protein id: supported by cDNA: gi_18253012, supported by cDNA: gi_3309085
  misc_feature (18)..(214): Homolog of NCBI NO: 15241101 NR Description: calcineurin B-like protein 2 (gb|AAC26009.1); id: At5g55990.2, supported by cDNA: 37280., supported by cDNA: supported by cDNA: gi_3309083 [Arabidopsis thaliana] protein 2
  misc_feature (18)..(214): Homolog of NCBI NO: 21593228 NR Description: calcineurin B-like protein 2 [Arabidopsis

SEQ ID NO: 79905 - protein, 209 aa, Arabidopsis thaliana; identical to SEQ ID NO: 75991
  peptide (1)..(209): Ceres Seq. ID no. 12653704
  misc_feature (143)..(171): Pfam Name: EF hand Pfam Description: EF hand
  misc_feature (1)..(209): Homolog of NCBI NO: 15237928 NR Description: calcium sensor homolog (gb|AAC26110.1); protein At5g24270.1, supported by cDNA: gi_11065946, supported by cDNA: supported by cDNA: gi_20465716 [Arabidopsis thaliana]
  misc_feature (1)..(201): Homolog of NCBI NO: 15217657 NR Description: calcineurin B-like protein; protein id: supported by cDNA: gi_15866275, supported by cDNA: gi_9965361
  misc_feature (1)..(202): Homolog of NCBI NO: 18414931 NR Description: calcineurin B-like protein 1; protein id: supported by cDNA: gi_3309081 [Arabidopsis thaliana]
  misc_feature (2)..(194): Homolog of NCBI NO: 22137326 NR Description: calcineurin B [Pisum sativum]
  misc_feature (1)..(202): Homolog of NCBI NO: 15238015 NR Description: calcineurin B 1; protein id: At5g47100.1, by cDNA: gi_15866278, supported by cDNA: gi_16151824 [Arabidopsis
  misc_feature (2)..(194): Homolog of NCBI NO: 16924116 NR Description: putative calcineurin B-like protein [Oryza sativa]
  misc_feature (1)..(201): Homolog of NCBI NO: 25295757 NR Description: protein F1N19.5 [imported] - Arabidopsis thaliana
  misc_feature (5)..(201): Homolog of NCBI NO: 15236778 NR Description: calcineurin B-like protein 3; protein id: supported by cDNA: gi_18253012, supported by cDNA: gi_3309085
  misc_feature (5)..(201): Homolog of NCBI NO: 15241101 NR Description: calcineurin B-like protein 2 (gb|AAC26009.1); id: At5g55990.2, supported by cDNA: 37280., supported by cDNA: supported by cDNA: gi_3309083 [Arabidopsis thaliana] protein 2
  misc_feature (5)..(201): Homolog of NCBI NO: 21593228 NR Description: calcineurin B-like protein 2 [Arabidopsis

SEQ ID NO: 79906 - DNA, 786 bp, Arabidopsis thaliana
  misc_feature (1)..(786): Ceres Seq. ID no. 12653721
  misc_feature: MA Experiment ID: 20000437 Result: Down-regulated in Transcription
  misc_feature: MA Experiment 20000437 PARAMETER Experiment Name: At_Drought_P Parameter: Age (day) Value: 8
  misc_feature: MA Experiment 20000437 PARAMETER Experiment Name: At_Drought_P Parameter: Organism Value: A. thaliana
  misc_feature: MA Experiment 20000437 PARAMETER Experiment Name: At_Drought_P Parameter: Plant Line Value: WS
  misc_feature: MA Experiment 20000437 PARAMETER Experiment Name: At_Drought_P Parameter: Timepoint (hr) Value: 24
  misc_feature: MA Experiment 20000437 PARAMETER Experiment Name: At_Drought_P Parameter: Tissue Value: Whole Plant
  misc_feature: MA Experiment 20000437 PARAMETER Experiment Name: At_Drought_P Parameter: Treatment Value: Drought vs. No Drought
  misc_feature: MA Experiment ID: 20000439 Result: Up-regulated in Transcription
  misc_feature: MA Experiment 20000439 PARAMETER Experiment Name: At_Roots__P Parameter: Age (day) Value: 14 vs. 21
  misc_feature: MA Experiment 20000439 PARAMETER Experiment Name: At_Roots__P Parameter: Organism Value: A. thaliana
  misc_feature: MA Experiment 20000439 PARAMETER Experiment Name: At_Roots__P Parameter: Tissue Value: Roots vs. Whole Plant
atggcatctgttttggagaaaacgaagagtaagaagattgtgtttcccacaaagaaagaattatcggaggctatggccacgtacacggccaatctctcagccaagttttgcaaggagagaggctatttcaccgtcgttctttccggtggcgacctcatctcctggctcagtgaattgttggaaccaaagtatcaagaaagtatcgaatggtcaaagtggcacattttttgggtcgatgagagggttgttccattagaccatgaggacagcaactacaaactcgcctttgatggttttctctccaaggttccaataccaattgcaaacatatatccaatcgacaaagactgtgcagcccttggtgatgccaaaagtgcagcattactctacgaagaatgtctcaaaagactggtgaaccgaaacatcattcgcacatacaaatcgtctggcttcccacagttcgacctccagctcttaggaatgggtccagacggtcacatggcgtctttgttcccgggacattatcaaatcaaggagaaggcaaatttggtaacctatatcactgattccccaaaaccgcctccgaagagaatcacctttactttaccggttattaactgcgcttcatacaacctcatggctgtatgtgatgaggctcaagccgatgcggtagctaaggttttcaaccataacttcgacttgcctgctgcttggctcacagctgacgtagaagctatctggtttcttgaccaagccgctgcatctaagatcccaaaaggactttga

SEQ ID NO: 79907 - protein, 261 aa, Arabidopsis thaliana
  peptide (1)..(261): Ceres Seq. ID no. 12653722
  misc_feature (1)..(261): Homolog of NCBI NO: 15238523 NR Description: 6-phosphogluconolactonase-like protein; protein
  misc_feature (11)..(260): Homolog of NCBI NO: 15229127 NR Description: 6-phosphogluconolactonase - like protein; protein
  misc_feature (11)..(260): Homolog of NCBI NO: 21536675 NR Description: 6-phosphogluconolactonase-like protein
  misc_feature (11)..(257): Homolog of NCBI NO: 21537412 NR Description: 6-phosphogluconolactonase-like protein
  misc_feature (11)..(257): Homolog of NCBI NO: 15238526 NR Description: 6-phosphogluconolactonase-like protein; protein At5g24420.1, supported by cDNA: 13806., supported by cDNA: supported by cDNA: gi_15450546 [Arabidopsis thaliana]
  misc_feature (14)..(255): Homolog of NCBI NO: 14009294 NR Description: putative 6-phosphogluconolactonase [Brassica
  misc_feature (1)..(257): Homolog of NCBI NO: 21554291 NR Description: 6-phosphogluconolactonase-like protein
  misc_feature (1)..(257): Homolog of NCBI NO: 10177901 NR Description: 6-phosphogluconolactonase-like protein
  misc_feature (1)..(257): Homolog of NCBI NO: 18420789 NR Description: 6-phosphogluconolactonase-like protein; protein
  misc_feature (9)..(257): Homolog of NCBI NO: 28140256 NR Description: putative 6-phosphogluconolactonase [Elaeis
MASVLEKTKSKKIVFPTKKELSEAMATYTANLSAKFCKERGYFTVVLSGGDLISWLSELLEPKYQESIEWSKWHIFWVDERVVPLDHEDSNYKLAFDGFLSKVPIPIANIYPIDKDCAALGDAKSAALLYEECLKRLVNRNIIRTYKSSGFPQFDLQLLGMGPDGHMASLFPGHYQIKEKANLVTYITDSPKPPPKRITFTLPVINCASYNLMAVCDEAQADAVAKVFNHNFDLPAAWLTADVEAIWFLDQAAASKIPKGL

SEQ ID NO: 79908 - protein, 237 aa, Arabidopsis thaliana
  peptide (1)..(237): Ceres Seq. ID no. 12653723
  misc_feature (1)..(237): Homolog of NCBI NO: 15238523 NR Description: 6-phosphogluconolactonase-like protein; protein
  misc_feature (1)..(236): Homolog of NCBI NO: 15229127 NR Description: 6-phosphogluconolactonase - like protein; protein
  misc_feature (1)..(236): Homolog of NCBI NO: 21536675 NR Description: 6-phosphogluconolactonase-like protein
  misc_feature (1)..(233): Homolog of NCBI NO: 21537412 NR Description: 6-phosphogluconolactonase-like protein
  misc_feature (1)..(233): Homolog of NCBI NO: 15238526 NR Description: 6-phosphogluconolactonase-like protein; protein At5g24420.1, supported by cDNA: 13806., supported by cDNA: supported by cDNA: gi_15450546 [Arabidopsis thaliana]
  misc_feature (1)..(231): Homolog of NCBI NO: 14009294 NR Description: putative 6-phosphogluconolactonase [Brassica
  misc_feature (1)..(233): Homolog of NCBI NO: 21554291 NR Description: 6-phosphogluconolactonase-like protein
  misc_feature (1)..(233): Homolog of NCBI NO: 10177901 NR Description: 6-phosphogluconolactonase-like protein
  misc_feature (1)..(233): Homolog of NCBI NO: 18420789 NR Description: 6-phosphogluconolactonase-like protein; protein
  misc_feature (1)..(233): Homolog of NCBI NO: 28140256 NR Description: putative 6-phosphogluconolactonase [Elaeis
MATYTANLSAKFCKERGYFTVVLSGGDLISWLSELLEPKYQESIEWSKWHIFWVDERVVPLDHEDSNYKLAFDGFLSKVPIPIANIYPIDKDCAALGDAKSAALLYEECLKRLVNRNIIRTYKSSGFPQFDLQLLGMGPDGHMASLFPGHYQIKEKANLVTYITDSPKPPPKRITFTLPVINCASYNLMAVCDEAQADAVAKVFNHNFDLPAAWLTADVEAIWFLDQAAASKIPKGL

SEQ ID NO: 79909 - DNA, 2202 bp, Arabidopsis thaliana
  misc_feature (1)..(2202): Ceres Seq. ID no. 12653732
  misc_feature: MA Experiment ID: 20000179 Result: Down-regulated in Transcription
  misc_feature: MA Experiment 20000179 PARAMETER Experiment Name: At_Germinating_Seeds_P Parameter: Age (hr) Value: 6 vs. 0
  misc_feature: MA Experiment 20000179 PARAMETER Experiment Name: At_Germinating_Seeds_P Parameter: Tissue Value: Germinating Seeds
  misc_feature: MA Experiment ID: 20000180 Result: Down-regulated in Transcription
  misc_feature: MA Experiment 20000180 PARAMETER Experiment Name: At_Germinating_Seeds_P Parameter: Age (hr) Value: 24 vs. 0
  misc_feature: MA Experiment 20000180 PARAMETER Experiment Name: At_Germinating_Seeds_P Parameter: Tissue Value: Germinating Seeds
  misc_feature: MA Experiment ID: 20000184 Result: Down-regulated in Transcription
  misc_feature: MA Experiment 20000184 PARAMETER Experiment Name: At_Shoots__P Parameter: Age (day) Value: 7
  misc_feature: MA Experiment 20000184 PARAMETER Experiment Name: At_Shoots__P Parameter: Tissue Value: Shoots vs. Whole Plant
  misc_feature: MA Experiment ID: 20000185 Result: Down-regulated in Transcription
  misc_feature: MA Experiment 20000185 PARAMETER Experiment Name: At_Roots__P Parameter: Age (day) Value: 7 vs. 21
  misc_feature: MA Experiment 20000185 PARAMETER Experiment Name: At_Roots__P Parameter: Organism Value: A. thaliana
  misc_feature: MA Experiment 20000185 PARAMETER Experiment Name: At_Roots__P Parameter: Tissue Value: Roots vs. Whole Plant
  misc_feature: MA Experiment ID: 20000213 Result: Up-regulated in Transcription
  misc_feature: MA Experiment 20000213 PARAMETER Experiment Name: At_4deg_Cold_P Parameter: Timepoint (hr) Value: 2
  misc_feature: MA Experiment ID: 20000264 Result: Up-regulated in Transcription
  misc_feature: MA Experiment 20000264 PARAMETER Experiment Name: At_Open_Flower_P Parameter: Age (day) Value: 21
  misc_feature: MA Experiment 20000264 PARAMETER Experiment Name: At_Open_Flower_P Parameter: Plant Line Value: WS
  misc_feature: MA Experiment 20000264 PARAMETER Experiment Name: At_Open_Flower_P Parameter: Tissue Value: Open Flower vs. Whole Plant
  misc_feature: MA Experiment ID: 20000437 Result: Up-regulated in Transcription
  misc_feature: MA Experiment 20000437 PARAMETER Experiment Name: At_Drought_P Parameter: Age (day) Value: 8
  misc_feature: MA Experiment 20000437 PARAMETER Experiment Name: At_Drought_P Parameter: Organism Value: A. thaliana
  misc_feature: MA Experiment 20000437 PARAMETER Experiment Name: At_Drought_P Parameter: Plant Line Value: WS
  misc_feature: MA Experiment 20000437 PARAMETER Experiment Name: At_Drought_P Parameter: Timepoint (hr) Value: 24
  misc_feature: MA Experiment 20000437 PARAMETER Experiment Name: At_Drought_P Parameter: Tissue Value: Whole Plant
  misc_feature: MA Experiment 20000437 PARAMETER Experiment Name: At_Drought_P Parameter: Treatment Value: Drought vs. No Drought
  misc_feature: MA Experiment ID: 20000438 Result: Down-regulated in Transcription
  misc_feature: MA Experiment 20000438 PARAMETER Experiment Name: At_Shoots__P Parameter: Age (day) Value: 14
  misc_feature: MA Experiment 20000438 PARAMETER Experiment Name: At_Shoots__P Parameter: Tissue Value: Shoots vs. Whole Plant
  misc_feature: MA Experiment ID: 20000495 Result: Down-regulated in Transcription
  misc_feature: MA Experiment 20000495 PARAMETER Experiment Name: At_Guard_Cells_P Parameter: Harvest Date Value: 8/2/2002
  misc_feature: MA Experiment 20000495 PARAMETER Experiment Name: At_Guard_Cells_P Parameter: Organism Value: A. thaliana
  misc_feature: MA Experiment 20000495 PARAMETER Experiment Name: At_Guard_Cells_P Parameter: Tissue Value: Guard Cells vs. Leaves
  misc_feature: MA Experiment ID: 20000496 Result: Down-regulated in Transcription
  misc_feature: MA Experiment 20000496 PARAMETER Experiment Name: At_Guard_Cells_P Parameter: Harvest Date Value: 7/19/2002
  misc_feature: MA Experiment 20000496 PARAMETER Experiment Name: At_Guard_Cells_P Parameter: Organism Value: Canola
  misc_feature: MA Experiment 20000496 PARAMETER Experiment Name: At_Guard_Cells_P Parameter: Tissue Value: Guard Cells vs. Leaves
  misc_feature: MA Experiment ID: 20000794 Result: Up-regulated in Transcription
  misc_feature: MA Experiment 20000794 PARAMETER Experiment Name: At_Petals_P Parameter: Age (day) Value: 23-25 days
  misc_feature: MA Experiment 20000794 PARAMETER Experiment Name: At_Petals_P Parameter: Plant Line Value: WS
  misc_feature: MA Experiment 20000794 PARAMETER Experiment Name: At_Petals_P Parameter: Tissue Value: Petals vs. Whole plant
  misc_feature: MA Experiment ID: 20001247 Result: Down-regulated in Transcription
  misc_feature: MA Experiment 20001247 PARAMETER Experiment Name: At_Far-red-induction_P Parameter: Age (day) Value: 7
  misc_feature: MA Experiment 20001247 PARAMETER Experiment Name: At_Far-red-induction_P Parameter: Light Value: Far-red vs. White
  misc_feature: MA Experiment 20001247 PARAMETER Experiment Name: At_Far-red-induction_P Parameter: Organism Value: A. thaliana
  misc_feature: MA Experiment 20001247 PARAMETER Experiment Name: At_Far-red-induction_P Parameter: Plant Line Value: Columbia
  misc_feature: MA Experiment 20001247 PARAMETER Experiment Name: At_Far-red-induction_P Parameter: Timepoint (hr) Value: 1
  misc_feature: MA Experiment 20001247 PARAMETER Experiment Name: At_Far-red-induction_P Parameter: Tissue Value: Whole Plant
  misc_feature: MA Experiment ID: 20001248 Result: Up-regulated in Transcription
  misc_feature: MA Experiment 20001248 PARAMETER Experiment Name: At_Far-red-induction_P Parameter: Age (day) Value: 7
  misc_feature: MA Experiment 20001248 PARAMETER Experiment Name: At_Far-red-induction_P Parameter: Light Value: Far-red vs. White
  misc_feature: MA Experiment 20001248 PARAMETER Experiment Name: At_Far-red-induction_P Parameter: Organism Value: A. thaliana
  misc_feature: MA Experiment 20001248 PARAMETER Experiment Name: At_Far-red-induction_P Parameter: Plant Line Value: Columbia
  misc_feature: MA Experiment 20001248 PARAMETER Experiment Name: At_Far-red-induction_P Parameter: Timepoint (hr) Value: 4
  misc_feature: MA Experiment 20001248 PARAMETER Experiment Name: At_Far-red-induction_P Parameter: Tissue Value: Whole Plant
  misc_feature: MA Experiment ID: 20001459 Result: Down-regulated in Transcription
  misc_feature: MA Experiment 20001459 PARAMETER Experiment Name: At_50mM_NH4NO3_L-to-H_P Parameter: Age (day) Value: Undefined
  misc_feature: MA Experiment 20001459 PARAMETER Experiment Name: At_50mM_NH4NO3_L-to-H_P Parameter: Organism Value: Undefined
  misc_feature: MA Experiment 20001459 PARAMETER Experiment Name: At_50mM_NH4NO3_L-to-H_P Parameter: Plant Line Value: Undefined
  misc_feature: MA Experiment 20001459 PARAMETER Experiment Name: At_50mM_NH4NO3_L-to-H_P Parameter: Timepoint (hr) Value: 4
  misc_feature: MA Experiment 20001459 PARAMETER Experiment Name: At_50mM_NH4NO3_L-to-H_P Parameter: Tissue Value: Siliques
  misc_feature: MA Experiment 20001459 PARAMETER Experiment Name: At_50mM_NH4NO3_L-to-H_P Parameter: Treatment Value: 50mM NH4NO3 vs. 100mM Manitol
  misc_feature: MA Experiment ID: 20001558 Result: Down-regulated in Transcription
  misc_feature: MA Experiment 20001558 PARAMETER Experiment Name: At_Drought_Soil_Dry_P Parameter: Age (day) Value: 27
  misc_feature: MA Experiment 20001558 PARAMETER Experiment Name: At_Drought_Soil_Dry_P Parameter: Organism Value: A. thaliana
  misc_feature: MA Experiment 20001558 PARAMETER Experiment Name: At_Drought_Soil_Dry_P Parameter: Plant Line Value: WS
  misc_feature: MA Experiment 20001558 PARAMETER Experiment Name: At_Drought_Soil_Dry_P Parameter: Post Timepoint (hr) Value: 6
  misc_feature: MA Experiment 20001558 PARAMETER Experiment Name: At_Drought_Soil_Dry_P Parameter: Post-Treatment Value: Re-Water vs. No Drought
  misc_feature: MA Experiment 20001558 PARAMETER Experiment Name: At_Drought_Soil_Dry_P Parameter: Timepoint (day) Value: 13
  misc_feature: MA Experiment 20001558 PARAMETER Experiment Name: At_Drought_Soil_Dry_P Parameter: Treatment Value: Drought vs. No Drought
  misc_feature: MA Experiment ID: 20001761 Result: Down-regulated in Transcription
  misc_feature: MA Experiment 20001761 PARAMETER Experiment Name: At_50mM_NH4NO3_L-to-H_P Parameter: Timepoint (hr) Value: 4
  misc_feature: MA Experiment 20001761 PARAMETER Experiment Name: At_50mM_NH4NO3_L-to-H_P Parameter: Tissue Value: Siliques
  misc_feature: MA Experiment 20001761 PARAMETER Experiment Name: At_50mM_NH4NO3_L-to-H_P Parameter: Treatment Value: 50mM NH4NO3 vs 100mM Mannitol
  misc_feature: MA Experiment ID: 20001911 Result: Up-regulated in Transcription
  misc_feature: MA Experiment 20001911 PARAMETER Experiment Name: At_Drought_Reproduction_P Parameter: Age (day) Value: 40
  misc_feature: MA Experiment 20001911 PARAMETER Experiment Name: At_Drought_Reproduction_P Parameter: Organism Value: A. thaliana
  misc_feature: MA Experiment 20001911 PARAMETER Experiment Name: At_Drought_Reproduction_P Parameter: Plant Line Value: WS
  misc_feature: MA Experiment 20001911 PARAMETER Experiment Name: At_Drought_Reproduction_P Parameter: Timepoint (day) Value: 10
  misc_feature: MA Experiment 20001911 PARAMETER Experiment Name: At_Drought_Reproduction_P Parameter: Tissue Value: Flowers
  misc_feature: MA Experiment 20001911 PARAMETER Experiment Name: At_Drought_Reproduction_P Parameter: Treatment Value: Drought vs. No Drought
atgtggcaaacgtggccacgtcagccaattctactagatattttttcaaatccaaatactctttccacaaccgttagatcatggtcggttcgccacccactttcaatcataaccgttaaaacattcgctagattttttctagatattttcttttctccacactattatagaaagaataaagttcttttttttgctctcttctcatttatctctccactcacaaatattttgatttgttttgtaactgtttctctttctctggagctttcttcttcttcttcaataatcgatttaggtttttcaaagctaagtgtttgtgttgtgataatgactagtagcgaggaagtagttgaagtgacggtggttaaagcacctgaagctggcggaggaaagttatcacgtcggaagattcggaagaaagacgccggtgttgatggtttggtgaagtgggagagatttctcccgaaaatcgcgcttagagttttgctcgttgaagctgatgattctactagacagattatcgctgctcttctcaggaaatgtagttacagagttgctgcagtacctgatggcttaaaagcttgggagatgctaaaaggaaagcctgaaagtgttgatttgatattaacagaggttgatctaccttcaatatctggatatgctctgctaacacttatcatggagcatgatatttgcaagaacattcctgttataatgatgtcgacacaggactcggtgaatactgtgtataagtgtatgttgaaaggtgcggctgattatcttgttaagccgttgaggaggaatgagcttagaaatctttggcagcatgtctggagaagacaaacttcacttgctcctgatagctttccatggaatgagagtgttggacagcagaaagccgagggtgcgtctgcaaacaactcgaacggaaagagagacgatcatgttgtgagtgggaatggtggtgatgcccagagctcgtgtacaagaccagagatggaaggtgagagcgcagacgtggaggttagtgcgagagacgcagtacagatggagtgcgcaaagtctcagtttaatgagacacggcttctagcaaatgagttgcagagtaagcaagcagaagccattgacttcatgggagcatcgtttagaagaactggacgacgtaacagagaagaaagtgttgctcaatacgaatctcggatagagcttgatctttctctgagaagacctaatgcttctgagaaccaatcttctggagaccggccttctcttcatccttctagtgcctcagctttcacacggtacgttcacaggccgttgcagacacaatgttcagcctccccagtggttactgatcaaagaaagaatgttgcagcaagtcaagatgataacattgtgctaatgaaccaatacaatacatctgaaccgcctccaaatgctccaagaagaaacgacaccagcttttacactggagctgactcacctggtccaccgtttagtaatcagctgaattcttggccgggacagagttcataccctacgccaacccctatcaacaatatacagttcagagatcccaacacagcttatacatctgcaatggctcctgcttcactctccccaagccctagttccgttagcccgcatgagtacagttccatgtttcacccattcaacagtaaacccgaggggttacaagaccgggattgttccatggatgtagatgagaggagatacgtctcttctgcaaccgaacatagtgcaataggcaatcacattgatcagcttattgagaagaagaacgaagatggctattcattatccgtcgggaaaattcagcaatctcttcaacgagaagccgctttaaccaaattccgaatgaagcgaaaggacagatgttatgagaaaaaggttcgttacgagagccggaagaaattagcagagcaacgaccacgaatcaaaggccaattcgttcgtcaagtccaatccacacaagctccatagtgatccaacaaattgatatattatatacagttcaattttgtatcatcaactagaggaattttgttttctccgatgcaggagctgttctttgtacaactaattccacatacgttagatttggtgacacatttgtgtgtacatacacatctttcgagcttgttgttgagttttagttagaatctacgttagatctgtaac

SEQ ID NO: 79910 - protein, 667 aa, Arabidopsis thaliana
  peptide (1)..(667): Ceres Seq. ID no. 12653733
  misc_feature (159)..(282): Pfam Name: Response regulator receiver domain Pfam Description: Response regulator receiver domain
  misc_feature (110)..(667): Homolog of NCBI NO: 9758535 NR Description: contains similarity to two-component response protein~gene_id:T31K7.5 [Arabidopsis thaliana]
  misc_feature (147)..(324): Homolog of NCBI NO: 18407171 NR Description: expressed protein; protein id: At2g46790.1, by cDNA: gi_10280999, supported by cDNA: gi_9247021 [Arabidopsis
  misc_feature (617)..(663): Homolog of NCBI NO: 18407171 NR Description: expressed protein; protein id: At2g46790.1, by cDNA: gi_10280999, supported by cDNA: gi_9247021 [Arabidopsis
  misc_feature (147)..(495): Homolog of NCBI NO: 18424319 NR Description: pseudo-response regulator - like; protein id: supported by cDNA: gi_10281007 [Arabidopsis thaliana] emb|CAB86035.1~gene_id:MGO3.8~similar to unknown protein
  misc_feature (617)..(660): Homolog of NCBI NO: 18424319 NR Description: pseudo-response regulator - like; protein id: supported by cDNA: gi_10281007 [Arabidopsis thaliana] emb|CAB86035.1~gene_id:MGO3.8~similar to unknown protein
  misc_feature (147)..(324): Homolog of NCBI NO: 7485762 NR Description: hypothetical protein At2g46790 [imported] -
  misc_feature (617)..(639): Homolog of NCBI NO: 7485762 NR Description: hypothetical protein At2g46790 [imported] -
  misc_feature (125)..(460): Homolog of NCBI NO: 34394035 NR Description: putative pseudo-response regulator [Oryza sativa
  misc_feature (604)..(665): Homolog of NCBI NO: 34394035 NR Description: putative pseudo-response regulator [Oryza sativa
  misc_feature (148)..(373): Homolog of NCBI NO: 18414032 NR Description: putative protein; protein id: At5g02810.1, by cDNA: gi_10281003, supported by cDNA: gi_14532637 [Arabidopsis
MWQTWPRQPILLDIFSNPNTLSTTVRSWSVRHPLSIITVKTFARFFLDIFFSPHYYRKNKVLFFALFSFISPLTNILICFVTVSLSLELSSSSSIIDLGFSKLSVCVVIMTSSEEVVEVTVVKAPEAGGGKLSRRKIRKKDAGVDGLVKWERFLPKIALRVLLVEADDSTRQIIAALLRKCSYRVAAVPDGLKAWEMLKGKPESVDLILTEVDLPSISGYALLTLIMEHDICKNIPVIMMSTQDSVNTVYKCMLKGAADYLVKPLRRNELRNLWQHVWRRQTSLAPDSFPWNESVGQQKAEGASANNSNGKRDDHVVSGNGGDAQSSCTRPEMEGESADVEVSARDAVQMECAKSQFNETRLLANELQSKQAEAIDFMGASFRRTGRRNREESVAQYESRIELDLSLRRPNASENQSSGDRPSLHPSSASAFTRYVHRPLQTQCSASPVVTDQRKNVAASQDDNIVLMNQYNTSEPPPNAPRRNDTSFYTGADSPGPPFSNQLNSWPGQSSYPTPTPINNIQFRDPNTAYTSAMAPASLSPSPSSVSPHEYSSMFHPFNSKPEGLQDRDCSMDVDERRYVSSATEHSAIGNHIDQLIEKKNEDGYSLSVGKIQQSLQREAALTKFRMKRKDRCYEKKVRYESRKKLAEQRPRIKGQFVRQVQSTQAP

SEQ ID NO: 79911 - protein, 558 aa, Arabidopsis thaliana
  peptide (1)..(558): Ceres Seq. ID no. 12653734
  misc_feature (50)..(173): Pfam Name: Response regulator receiver domain Pfam Description: Response regulator receiver domain
  misc_feature (1)..(558): Homolog of NCBI NO: 9758535 NR Description: contains similarity to two-component response protein~gene_id:T31K7.5 [Arabidopsis thaliana]
  misc_feature (38)..(215): Homolog of NCBI NO: 18407171 NR Description: expressed protein; protein id: At2g46790.1, by cDNA: gi_10280999, supported by cDNA: gi_9247021 [Arabidopsis
  misc_feature (508)..(554): Homolog of NCBI NO: 18407171 NR Description: expressed protein; protein id: At2g46790.1, by cDNA: gi_10280999, supported by cDNA: gi_9247021 [Arabidopsis
  misc_feature (38)..(386): Homolog of NCBI NO: 18424319 NR Description: pseudo-response regulator - like; protein id: supported by cDNA: gi_10281007 [Arabidopsis thaliana] emb|CAB86035.1~gene_id:MGO3.8~similar to unknown protein
  misc_feature (508)..(551): Homolog of NCBI NO: 18424319 NR Description: pseudo-response regulator - like; protein id: supported by cDNA: gi_10281007 [Arabidopsis thaliana] emb|CAB86035.1~gene_id:MGO3.8~similar to unknown protein
  misc_feature (38)..(215): Homolog of NCBI NO: 7485762 NR Description: hypothetical protein At2g46790 [imported] -
  misc_feature (508)..(530): Homolog of NCBI NO: 7485762 NR Description: hypothetical protein At2g46790 [imported] -
  misc_feature (16)..(351): Homolog of NCBI NO: 34394035 NR Description: putative pseudo-response regulator [Oryza sativa
  misc_feature (495)..(556): Homolog of NCBI NO: 34394035 NR Description: putative pseudo-response regulator [Oryza sativa
  misc_feature (39)..(264): Homolog of NCBI NO: 18414032 NR Description: putative protein; protein id: At5g02810.1, by cDNA: gi_10281003, supported by cDNA: gi_14532637 [Arabidopsis
MTSSEEVVEVTVVKAPEAGGGKLSRRKIRKKDAGVDGLVKWERFLPKIALRVLLVEADDSTRQIIAALLRKCSYRVAAVPDGLKAWEMLKGKPESVDLILTEVDLPSISGYALLTLIMEHDICKNIPVIMMSTQDSVNTVYKCMLKGAADYLVKPLRRNELRNLWQHVWRRQTSLAPDSFPWNESVGQQKAEGASANNSNGKRDDHVVSGNGGDAQSSCTRPEMEGESADVEVSARDAVQMECAKSQFNETRLLANELQSKQAEAIDFMGASFRRTGRRNREESVAQYESRIELDLSLRRPNASENQSSGDRPSLHPSSASAFTRYVHRPLQTQCSASPVVTDQRKNVAASQDDNIVLMNQYNTSEPPPNAPRRNDTSFYTGADSPGPPFSNQLNSWPGQSSYPTPTPINNIQFRDPNTAYTSAMAPASLSPSPSSVSPHEYSSMFHPFNSKPEGLQDRDCSMDVDERRYVSSATEHSAIGNHIDQLIEKKNEDGYSLSVGKIQQSLQREAALTKFRMKRKDRCYEKKVRYESRKKLAEQRPRIKGQFVRQVQSTQAP

SEQ ID NO: 79912 - protein, 471 aa, Arabidopsis thaliana
  peptide (1)..(471): Ceres Seq. ID no. 12653735
  misc_feature (1)..(86): Pfam Name: Response regulator receiver domain Pfam Description: Response regulator receiver domain
  misc_feature (1)..(471): Homolog of NCBI NO: 9758535 NR Description: contains similarity to two-component response protein~gene_id:T31K7.5 [Arabidopsis thaliana]
  misc_feature (1)..(128): Homolog of NCBI NO: 18407171 NR Description: expressed protein; protein id: At2g46790.1, by cDNA: gi_10280999, supported by cDNA: gi_9247021 [Arabidopsis
  misc_feature (421)..(467): Homolog of NCBI NO: 18407171 NR Description: expressed protein; protein id: At2g46790.1, by cDNA: gi_10280999, supported by cDNA: gi_9247021 [Arabidopsis
  misc_feature (1)..(299): Homolog of NCBI NO: 18424319 NR Description: pseudo-response regulator - like; protein id: supported by cDNA: gi_10281007 [Arabidopsis thaliana] emb|CAB86035.1~gene_id:MGO3.8~similar to unknown protein
  misc_feature (421)..(464): Homolog of NCBI NO: 18424319 NR Description: pseudo-response regulator - like; protein id: supported by cDNA: gi_10281007 [Arabidopsis thaliana] emb|CAB86035.1~gene_id:MGO3.8~similar to unknown protein
  misc_feature (1)..(128): Homolog of NCBI NO: 7485762 NR Description: hypothetical protein At2g46790 [imported] -
  misc_feature (421)..(443): Homolog of NCBI NO: 7485762 NR Description: hypothetical protein At2g46790 [imported] -
  misc_feature (1)..(264): Homolog of NCBI NO: 34394035 NR Description: putative pseudo-response regulator [Oryza sativa
  misc_feature (408)..(469): Homolog of NCBI NO: 34394035 NR Description: putative pseudo-response regulator [Oryza sativa
  misc_feature (1)..(177): Homolog of NCBI NO: 18414032 NR Description: putative protein; protein id: At5g02810.1, by cDNA: gi_10281003, supported by cDNA: gi_14532637 [Arabidopsis
MLKGKPESVDLILTEVDLPSISGYALLTLIMEHDICKNIPVIMMSTQDSVNTVYKCMLKGAADYLVKPLRRNELRNLWQHVWRRQTSLAPDSFPWNESVGQQKAEGASANNSNGKRDDHVVSGNGGDAQSSCTRPEMEGESADVEVSARDAVQMECAKSQFNETRLLANELQSKQAEAIDFMGASFRRTGRRNREESVAQYESRIELDLSLRRPNASENQSSGDRPSLHPSSASAFTRYVHRPLQTQCSASPVVTDQRKNVAASQDDNIVLMNQYNTSEPPPNAPRRNDTSFYTGADSPGPPFSNQLNSWPGQSSYPTPTPINNIQFRDPNTAYTSAMAPASLSPSPSSVSPHEYSSMFHPFNSKPEGLQDRDCSMDVDERRYVSSATEHSAIGNHIDQLIEKKNEDGYSLSVGKIQQSLQREAALTKFRMKRKDRCYEKKVRYESRKKLAEQRPRIKGQFVRQVQSTQAP

SEQ ID NO: 79913 - DNA, 1605 bp, Arabidopsis thaliana
  misc_feature (1)..(1605): Ceres Seq. ID no. 12653740
  misc_feature: MA Experiment ID: 20000347 Result: Up-regulated in Transcription
  misc_feature: MA Experiment 20000347 PARAMETER Experiment Name: At_2mM_SA_Sub_P Parameter: Age (day) Value: 14
  misc_feature: MA Experiment 20000347 PARAMETER Experiment Name: At_2mM_SA_Sub_P Parameter: Organism Value: A. thaliana
  misc_feature: MA Experiment 20000347 PARAMETER Experiment Name: At_2mM_SA_Sub_P Parameter: Plant Line Value: WS
  misc_feature: MA Experiment 20000347 PARAMETER Experiment Name: At_2mM_SA_Sub_P Parameter: Timepoint (hr) Value: 6
  misc_feature: MA Experiment 20000347 PARAMETER Experiment Name: At_2mM_SA_Sub_P Parameter: Tissue Value: Aerial
  misc_feature: MA Experiment 20000347 PARAMETER Experiment Name: At_2mM_SA_Sub_P Parameter: Treatment Value: 2mM SA vs. No Treatment
atggcaattaagctcattgcactagtaatcacactatgtgtagcatcatgggatgttgcacagggcagatctttaagattttctacaactcctctaaatcgttatagcttccctcctcattttgattttggtgttgcctcttccgcttatcagtatgaaggtgcagtagaagaaggagggaggagtctaagcatatgggacaatttcacacatgcatttccagaaaggacgaacatggacaatggagatgttgccgttgatttttaccatcgttataaggaagacatcaaactaataaaggaaatgaatatggatagtttcagattttccctgtcctggtcaagaatattaccaagtggaaaactaagtgatggggtcaataaagaaggtgttcaattctacaagaatcttattgatgaacttatcgagaacggtatcaaaccttttgtaacaatttatcactgggatatccctcaagctcttgatgatgagtatggtagctttttaagtcctcgaatcatagatgattttcgaaactatgccagattttgtttccaagagtttggggacaaggtcagtatgtggacaactttcaacgagccatatgtttatagcgtttcgggttatgatgcgggtaataaggcaatgggtcgatgttctaaatgggtaaacagtttatgtatcgccggtgactcgggcacggagccttatttagtctcccaccaccttcttctcgctcacgctgctgctgttgaagagttcaggaaatgtgacaagatttcgcaagattccaagataggcatagtgttgtctccttattggttcgagccatatgacagtgcttctaatgctgataaagaagcagttgaaagggctcttgctttcaatattggttggcatctcagccctctagttttcggagactatccagagacgataaagataagcgctggaaatagactgccatcttttaccaaagagcaatctatgatggttaaaaattcgtttgattttatcggtgtaaattactacactgcacggtttgttgctcacgatcttaacgtcgatatttcacggcctcgcttcatgaccgaccaacacctccaatacaaattgacaaatcgtaccggcgacaccatctcattggaatcggatggtaccaaaattctctggtcatatccggaagggttacgaaagattcttaattatatcaaaaataagtacaacaatccaactatctacataactgaaaacggtttcgatgactacgaaaatggaacggtgacacgtgaagagatactagaagacacaaagagaatagagtaccaccaaaaacatcttcaagaactccagaaagcgatcactgaggatgggtgtgacgtgaaaggctacttcacatggtcgttattggataattttgaatgggaacatggatatgcagtgagatttggtttgtactacgttgactataaaaatggtcttcaacgacatgctaaacattcagctatgtggttcaaacattttcttgagagatccggaaagccaatgccgatggatctgtttaagagtgtcaagagatggtggtctacattacagatgatttaa

SEQ ID NO: 79914 - protein, 534 aa, Arabidopsis thaliana
  peptide (1)..(534): Ceres Seq. ID no. 12653741
  misc_feature (1)..(534): Homolog of NCBI NO: 15238569 NR Description: glycosyl hydrolase family 1; protein id:
  misc_feature (1)..(534): Homolog of NCBI NO: 22327030 NR Description: glycosyl hydrolase family 1; protein id:
  misc_feature (1)..(534): Homolog of NCBI NO: 10177855 NR Description: beta-glucosidase [Arabidopsis thaliana]
  misc_feature (10)..(514): Homolog of NCBI NO: 30689721 NR Description: glycosyl hydrolase family 1 [Arabidopsis thaliana]
  misc_feature (32)..(512): Homolog of NCBI NO: 15232262 NR Description: glycosyl hydrolase family 1, beta-glucosidase; id: At3g60140.1, supported by cDNA: gi_10834547 [Arabidopsis
  misc_feature (10)..(514): Homolog of NCBI NO: 7435453 NR Description: probable beta-glucosidase At2g44460 [imported] -
  misc_feature (32)..(512): Homolog of NCBI NO: 10834548 NR Description: beta-glucosidase [Arabidopsis thaliana]
  misc_feature (6)..(511): Homolog of NCBI NO: 7435454 NR Description: beta-glucosidase homolog At2g44470 [imported] -
  misc_feature (6)..(454): Homolog of NCBI NO: 30689724 NR Description: glycosyl hydrolase family 1 [Arabidopsis thaliana]
  misc_feature (34)..(509): Homolog of NCBI NO: 15224886 NR Description: glycosyl hydrolase family 1; protein id: supported by cDNA: gi_20259434 [Arabidopsis thaliana]
MAIKLIALVITLCVASWDVAQGRSLRFSTTPLNRYSFPPHFDFGVASSAYQYEGAVEEGGRSLSIWDNFTHAFPERTNMDNGDVAVDFYHRYKEDIKLIKEMNMDSFRFSLSWSRILPSGKLSDGVNKEGVQFYKNLIDELIENGIKPFVTIYHWDIPQALDDEYGSFLSPRIIDDFRNYARFCFQEFGDKVSMWTTFNEPYVYSVSGYDAGNKAMGRCSKWVNSLCIAGDSGTEPYLVSHHLLLAHAAAVEEFRKCDKISQDSKIGIVLSPYWFEPYDSASNADKEAVERALAFNIGWHLSPLVFGDYPETIKISAGNRLPSFTKEQSMMVKNSFDFIGVNYYTARFVAHDLNVDISRPRFMTDQHLQYKLTNRTGDTISLESDGTKILWSYPEGLRKILNYIKNKYNNPTIYITENGFDDYENGTVTREEILEDTKRIEYHQKHLQELQKAITEDGCDVKGYFTWSLLDNFEWEHGYAVRFGLYYVDYKNGLQRHAKHSAMWFKHFLERSGKPMPMDLFKSVKRWWSTLQMI

SEQ ID NO: 79915 - protein, 456 aa, Arabidopsis thaliana
  peptide (1)..(456): Ceres Seq. ID no. 12653742
  misc_feature (1)..(456): Homolog of NCBI NO: 15238569 NR Description: glycosyl hydrolase family 1; protein id:
  misc_feature (1)..(456): Homolog of NCBI NO: 22327030 NR Description: glycosyl hydrolase family 1; protein id:
  misc_feature (1)..(456): Homolog of NCBI NO: 10177855 NR Description: beta-glucosidase [Arabidopsis thaliana]
  misc_feature (1)..(436): Homolog of NCBI NO: 30689721 NR Description: glycosyl hydrolase family 1 [Arabidopsis thaliana]
  misc_feature (1)..(434): Homolog of NCBI NO: 15232262 NR Description: glycosyl hydrolase family 1, beta-glucosidase; id: At3g60140.1, supported by cDNA: gi_10834547 [Arabidopsis
  misc_feature (1)..(436): Homolog of NCBI NO: 7435453 NR Description: probable beta-glucosidase At2g44460 [imported] -
  misc_feature (1)..(434): Homolog of NCBI NO: 10834548 NR Description: beta-glucosidase [Arabidopsis thaliana]
  misc_feature (1)..(433): Homolog of NCBI NO: 7435454 NR Description: beta-glucosidase homolog At2g44470 [imported] -
  misc_feature (1)..(376): Homolog of NCBI NO: 30689724 NR Description: glycosyl hydrolase family 1 [Arabidopsis thaliana]
  misc_feature (1)..(431): Homolog of NCBI NO: 15224886 NR Description: glycosyl hydrolase family 1; protein id: supported by cDNA: gi_20259434 [Arabidopsis thaliana]
MDNGDVAVDFYHRYKEDIKLIKEMNMDSFRFSLSWSRILPSGKLSDGVNKEGVQFYKNLIDELIENGIKPFVTIYHWDIPQALDDEYGSFLSPRIIDDFRNYARFCFQEFGDKVSMWTTFNEPYVYSVSGYDAGNKAMGRCSKWVNSLCIAGDSGTEPYLVSHHLLLAHAAAVEEFRKCDKISQDSKIGIVLSPYWFEPYDSASNADKEAVERALAFNIGWHLSPLVFGDYPETIKISAGNRLPSFTKEQSMMVKNSFDFIGVNYYTARFVAHDLNVDISRPRFMTDQHLQYKLTNRTGDTISLESDGTKILWSYPEGLRKILNYIKNKYNNPTIYITENGFDDYENGTVTREEILEDTKRIEYHQKHLQELQKAITEDGCDVKGYFTWSLLDNFEWEHGYAVRFGLYYVDYKNGLQRHAKHSAMWFKHFLERSGKPMPMDLFKSVKRWWSTLQMI

SEQ ID NO: 79916 - protein, 433 aa, Arabidopsis thaliana
  peptide (1)..(433): Ceres Seq. ID no. 12653743
  misc_feature (1)..(433): Homolog of NCBI NO: 15238569 NR Description: glycosyl hydrolase family 1; protein id:
  misc_feature (1)..(433): Homolog of NCBI NO: 22327030 NR Description: glycosyl hydrolase family 1; protein id:
  misc_feature (1)..(433): Homolog of NCBI NO: 10177855 NR Description: beta-glucosidase [Arabidopsis thaliana]
  misc_feature (1)..(413): Homolog of NCBI NO: 30689721 NR Description: glycosyl hydrolase family 1 [Arabidopsis thaliana]
  misc_feature (1)..(411): Homolog of NCBI NO: 15232262 NR Description: glycosyl hydrolase family 1, beta-glucosidase; id: At3g60140.1, supported by cDNA: gi_10834547 [Arabidopsis
  misc_feature (1)..(413): Homolog of NCBI NO: 7435453 NR Description: probable beta-glucosidase At2g44460 [imported] -
  misc_feature (1)..(411): Homolog of NCBI NO: 10834548 NR Description: beta-glucosidase [Arabidopsis thaliana]
  misc_feature (1)..(410): Homolog of NCBI NO: 7435454 NR Description: beta-glucosidase homolog At2g44470 [imported] -
  misc_feature (1)..(353): Homolog of NCBI NO: 30689724 NR Description: glycosyl hydrolase family 1 [Arabidopsis thaliana]
  misc_feature (1)..(408): Homolog of NCBI NO: 15224886 NR Description: glycosyl hydrolase family 1; protein id: supported by cDNA: gi_20259434 [Arabidopsis thaliana]
MNMDSFRFSLSWSRILPSGKLSDGVNKEGVQFYKNLIDELIENGIKPFVTIYHWDIPQALDDEYGSFLSPRIIDDFRNYARFCFQEFGDKVSMWTTFNEPYVYSVSGYDAGNKAMGRCSKWVNSLCIAGDSGTEPYLVSHHLLLAHAAAVEEFRKCDKISQDSKIGIVLSPYWFEPYDSASNADKEAVERALAFNIGWHLSPLVFGDYPETIKISAGNRLPSFTKEQSMMVKNSFDFIGVNYYTARFVAHDLNVDISRPRFMTDQHLQYKLTNRTGDTISLESDGTKILWSYPEGLRKILNYIKNKYNNPTIYITENGFDDYENGTVTREEILEDTKRIEYHQKHLQELQKAITEDGCDVKGYFTWSLLDNFEWEHGYAVRFGLYYVDYKNGLQRHAKHSAMWFKHFLERSGKPMPMDLFKSVKRWWSTLQMI

SEQ ID NO: 79917 - DNA, 687 bp, Arabidopsis thaliana
  misc_feature (1)..(687): Ceres Seq. ID no. 12653751
  misc_feature: MA Experiment ID: 20000314 Result: Up-regulated in Transcription
  misc_feature: MA Experiment 20000314 PARAMETER Experiment Name: At_14day_Shoots-Roots_Sub_P Parameter: Age (day) Value: 14
  misc_feature: MA Experiment 20000314 PARAMETER Experiment Name: At_14day_Shoots-Roots_Sub_P Parameter: Organism Value: A. thaliana
  misc_feature: MA Experiment 20000314 PARAMETER Experiment Name: At_14day_Shoots-Roots_Sub_P Parameter: Plant Line Value: WS
  misc_feature: MA Experiment 20000314 PARAMETER Experiment Name: At_14day_Shoots-Roots_Sub_P Parameter: Tissue Value: Roots vs. Whole Plant
atgggaagagggaagattgtgatccaaaggatcgatgattcaacgagtagacaagtcactttctccaaacgaagaaagggccttatcaagaaagccaaagagctagctattctctgtgatgccgaggtcggtctcatcatcttctctagcaccggaaagctctatgactttgcaagctccagcatgaagtcggttattgatagatacaacaagagcaagatcgagcaacaacaactattgaaccccgcatcagaagtcaagttttggcagagagaagctgctgttctaagacaagaactgcatgctttgcaagaaaatcatcggcaaatgatgggagaacagctaaatggtttaagtgttaacgagctaaacagtcttgagaatcaaattgagataagtttgcgtggaattcgtatgagaaaggaacaactgttgactcaagaaatccaagaactaagccaaaagaggaatcttattcatcaggaaaacctcgatttatctaggaaagtacaacggattcatcaagaaaatgtggagctctacaagaaggcttatatggcaaacacaaacgggtttacacaccgtgaagtagctgttgcggatgatgaatcacacactcagattcggctgcaactaagccagcctgaacattccgattatgacactccaccaagagcaaacgaataa

SEQ ID NO: 79918 - protein, 228 aa, Arabidopsis thaliana
  peptide (1)..(228): Ceres Seq. ID no. 12653752
  misc_feature (75)..(172): Pfam Name: K-box region Pfam Description: K-box region
  misc_feature (1)..(228): Homolog of NCBI NO: 15235748 NR Description: MADS-box protein; protein id: At4g37940.1, by cDNA: gi_18478602 [Arabidopsis thaliana]
  misc_feature (1)..(222): Homolog of NCBI NO: 15227254 NR Description: MADS-box protein AGL17; protein id: At2g22630.1
  misc_feature (8)..(197): Homolog of NCBI NO: 862648 NR Description: MADS-box protein AGL17
  misc_feature (1)..(225): Homolog of NCBI NO: 38344968 NR Description: OSJNBa0072F16.13 [Oryza sativa (japonica
  misc_feature (1)..(226): Homolog of NCBI NO: 30694601 NR Description: MADS-box protein [Arabidopsis thaliana]
  misc_feature (1)..(225): Homolog of NCBI NO: 30313677 NR Description: transcription factor MADS27 [Oryza sativa
  misc_feature (1)..(222): Homolog of NCBI NO: 7489303 NR Description: MADS-box transcription factor DEFH125 - garden
  misc_feature (1)..(216): Homolog of NCBI NO: 34452085 NR Description: MADS-box protein 14 [Petunia x hybrida]
  misc_feature (1)..(225): Homolog of NCBI NO: 29611976 NR Description: MADS-box transcription factor MADS2 [Zea mays]
  misc_feature (1)..(225): Homolog of NCBI NO: 9964296 NR Description: MADS box protein 2 [Zea mays]
MGRGKIVIQRIDDSTSRQVTFSKRRKGLIKKAKELAILCDAEVGLIIFSSTGKLYDFASSSMKSVIDRYNKSKIEQQQLLNPASEVKFWQREAAVLRQELHALQENHRQMMGEQLNGLSVNELNSLENQIEISLRGIRMRKEQLLTQEIQELSQKRNLIHQENLDLSRKVQRIHQENVELYKKAYMANTNGFTHREVAVADDESHTQIRLQLSQPEHSDYDTPPRANE

SEQ ID NO: 79919 - protein, 167 aa, Arabidopsis thaliana
  peptide (1)..(167): Ceres Seq. ID no. 12653753
  misc_feature (14)..(111): Pfam Name: K-box region Pfam Description: K-box region
  misc_feature (1)..(167): Homolog of NCBI NO: 15235748 NR Description: MADS-box protein; protein id: At4g37940.1, by cDNA: gi_18478602 [Arabidopsis thaliana]
  misc_feature (1)..(161): Homolog of NCBI NO: 15227254 NR Description: MADS-box protein AGL17; protein id: At2g22630.1
  misc_feature (1)..(136): Homolog of NCBI NO: 862648 NR Description: MADS-box protein AGL17
  misc_feature (1)..(164): Homolog of NCBI NO: 38344968 NR Description: OSJNBa0072F16.13 [Oryza sativa (japonica
  misc_feature (1)..(165): Homolog of NCBI NO: 30694601 NR Description: MADS-box protein [Arabidopsis thaliana]
  misc_feature (1)..(164): Homolog of NCBI NO: 30313677 NR Description: transcription factor MADS27 [Oryza sativa
  misc_feature (1)..(161): Homolog of NCBI NO: 7489303 NR Description: MADS-box transcription factor DEFH125 - garden
  misc_feature (1)..(155): Homolog of NCBI NO: 34452085 NR Description: MADS-box protein 14 [Petunia x hybrida]
  misc_feature (1)..(164): Homolog of NCBI NO: 29611976 NR Description: MADS-box transcription factor MADS2 [Zea mays]
  misc_feature (1)..(164): Homolog of NCBI NO: 9964296 NR Description: MADS box protein 2 [Zea mays]
MKSVIDRYNKSKIEQQQLLNPASEVKFWQREAAVLRQELHALQENHRQMMGEQLNGLSVNELNSLENQIEISLRGIRMRKEQLLTQEIQELSQKRNLIHQENLDLSRKVQRIHQENVELYKKAYMANTNGFTHREVAVADDESHTQIRLQLSQPEHSDYDTPPRANE

SEQ ID NO: 79920 - protein, 119 aa, Arabidopsis thaliana
  peptide (1)..(119): Ceres Seq. ID no. 12653754
  misc_feature (1)..(63): Pfam Name: K-box region Pfam Description: K-box region
  misc_feature (1)..(119): Homolog of NCBI NO: 15235748 NR Description: MADS-box protein; protein id: At4g37940.1, by cDNA: gi_18478602 [Arabidopsis thaliana]
  misc_feature (1)..(113): Homolog of NCBI NO: 15227254 NR Description: MADS-box protein AGL17; protein id: At2g22630.1
  misc_feature (1)..(88): Homolog of NCBI NO: 862648 NR Description: MADS-box protein AGL17
  misc_feature (1)..(116): Homolog of NCBI NO: 38344968 NR Description: OSJNBa0072F16.13 [Oryza sativa (japonica
  misc_feature (1)..(117): Homolog of NCBI NO: 30694601 NR Description: MADS-box protein [Arabidopsis thaliana]
  misc_feature (1)..(116): Homolog of NCBI NO: 30313677 NR Description: transcription factor MADS27 [Oryza sativa
  misc_feature (1)..(113): Homolog of NCBI NO: 7489303 NR Description: MADS-box transcription factor DEFH125 - garden
  misc_feature (1)..(107): Homolog of NCBI NO: 34452085 NR Description: MADS-box protein 14 [Petunia x hybrida]
  misc_feature (1)..(116): Homolog of NCBI NO: 29611976 NR Description: MADS-box transcription factor MADS2 [Zea mays]
  misc_feature (1)..(116): Homolog of NCBI NO: 9964296 NR Description: MADS box protein 2 [Zea mays]
MMGEQLNGLSVNELNSLENQIEISLRGIRMRKEQLLTQEIQELSQKRNLIHQENLDLSRKVQRIHQENVELYKKAYMANTNGFTHREVAVADDESHTQIRLQLSQPEHSDYDTPPRANE

SEQ ID NO: 79921 - DNA, 1092 bp, Arabidopsis thaliana
  misc_feature (1)..(1092): Ceres Seq. ID no. 12653763
  misc_feature: MA Experiment ID: 20000315 Result: Down-regulated in Transcription
  misc_feature: MA Experiment 20000315 PARAMETER Experiment Name: At_14day_Shoots-Roots_Sub_P Parameter: Age (day) Value: 14
  misc_feature: MA Experiment 20000315 PARAMETER Experiment Name: At_14day_Shoots-Roots_Sub_P Parameter: Organism Value: A. thaliana
  misc_feature: MA Experiment 20000315 PARAMETER Experiment Name: At_14day_Shoots-Roots_Sub_P Parameter: Plant Line Value: WS
  misc_feature: MA Experiment 20000315 PARAMETER Experiment Name: At_14day_Shoots-Roots_Sub_P Parameter: Tissue Value: Shoots vs. Whole Plant
  misc_feature: MA Experiment ID: 20000347 Result: Down-regulated in Transcription
  misc_feature: MA Experiment 20000347 PARAMETER Experiment Name: At_2mM_SA_Sub_P Parameter: Age (day) Value: 14
  misc_feature: MA Experiment 20000347 PARAMETER Experiment Name: At_2mM_SA_Sub_P Parameter: Organism Value: A. thaliana
  misc_feature: MA Experiment 20000347 PARAMETER Experiment Name: At_2mM_SA_Sub_P Parameter: Plant Line Value: WS
  misc_feature: MA Experiment 20000347 PARAMETER Experiment Name: At_2mM_SA_Sub_P Parameter: Timepoint (hr) Value: 6
  misc_feature: MA Experiment 20000347 PARAMETER Experiment Name: At_2mM_SA_Sub_P Parameter: Tissue Value: Aerial
  misc_feature: MA Experiment 20000347 PARAMETER Experiment Name: At_2mM_SA_Sub_P Parameter: Treatment Value: 2mM SA vs. No Treatment
  misc_feature: MA Experiment ID: 20000355 Result: Down-regulated in Transcription
  misc_feature: MA Experiment 20000355 PARAMETER Experiment Name: At_Siliques_Sub_P Parameter: Age (day) Value: 21
  misc_feature: MA Experiment 20000355 PARAMETER Experiment Name: At_Siliques_Sub_P Parameter: Organism Value: A. thaliana
  misc_feature: MA Experiment 20000355 PARAMETER Experiment Name: At_Siliques_Sub_P Parameter: Plant Line Value: WS
  misc_feature: MA Experiment 20000355 PARAMETER Experiment Name: At_Siliques_Sub_P Parameter: Tissue Value: Less Than 5mm Siliques vs. Whole Plant
  misc_feature: MA Experiment ID: 20000440 Result: Down-regulated in Transcription
  misc_feature: MA Experiment 20000440 PARAMETER Experiment Name: At_Closed-Flower__Sub_P Parameter: Tissue Value: Closed Flower vs. Whole Plant
atggagagattatcaggagagaaagagcagagcgtagaggcgtttggatgggccgcgagagactcctcaggccatctctctccctttgtcttttctagaaggaaaacaggagaagaggaagtgagagtgaaggtgttatattgtggaatatgtcatagtgatctccattgtctcaagaacgaatggcattcctctatttaccctttggttcctggtcacgagattattggagaagtgagtgaaatagggaacaaagtaagtaaattcaatcttggagacaaagtcggtgtgggatgcatcgtagattcctgcagaacttgcgagagttgccgagaagatcaagaaaactactgcacaaaagcaatcgcaacctataacggagttcaccacgatggaacgattaactacggtggatactccgaccatatcgtcgtcgatgaacgttacgctgtcaaaattccacacacattgcctctagtttcggccgcacctttgctttgtgcaggcatctcgatgtacagtcctatgaagtacttcggattgaccggaccggataaacatgtcggaatcgtggggctaggtggtcttggacacattggtgtgagatttgctaaagcatttgggacaaaagtcacggtggttagttcgaccactgggaaatctaaggatgctcttgacactcttggagctgatggattcttggttagtactgatgaagaccaaatgaaggctgcaatgggaactatggatggcataattgatacagtttctgcatcgcattcgatttcacctttgattggactactcaaatccaacggtaaacttgttctactcggtgcaacggagaagccatttgatatatctgcattttccttaatattgggacgaaaatcgatagcgggaagtggtattggaggaatgcaagagacacaagagatgattgactttgcggcagagcatggcataaaagcagaaattgagatcatatccatggattatgtgaacaccgccatggatagacttgccaaaggggatgttagatatcgatttgtcattgacatttctaatacattggctgctactcgatcttaa

SEQ ID NO: 79922 - protein, 363 aa, Arabidopsis thaliana
  peptide (1)..(363): Ceres Seq. ID no. 12653764
  misc_feature (1)..(363): Homolog of NCBI NO: 15235757 NR Description: cinnamyl alcohol dehydrogenase -like protein,
  misc_feature (5)..(362): Homolog of NCBI NO: 14279694 NR Description: sinapyl alcohol dehydrogenase [Populus
  misc_feature (7)..(358): Homolog of NCBI NO: 10720093 NR Description: Probable mannitol dehydrogenase (NAD-dependent dehydrogenase) >gi|4097522|gb|AAD10327.1| cinnamyl alcohol
  misc_feature (4)..(361): Homolog of NCBI NO: 13507210 NR Description: cinnamyl alcohol dehydrogenase [Fragaria x
  misc_feature (5)..(361): Homolog of NCBI NO: 33519154 NR Description: 10-hydroxygeraniol oxidoreductase [Camptotheca
  misc_feature (5)..(358): Homolog of NCBI NO: 34013695 NR Description: 10-hydroxygeraniol oxidoreductase [Catharanthus
  misc_feature (1)..(360): Homolog of NCBI NO: 10720090 NR Description: Probable mannitol dehydrogenase (NAD-dependent
  misc_feature (1)..(362): Homolog of NCBI NO: 22475166 NR Description: putative sinapyl alcohol dehydrogenase [Populus
  misc_feature (5)..(358): Homolog of NCBI NO: 25815120 NR Description: alcohol NADP+ oxidoreductase [Solanum tuberosum]
  misc_feature (13)..(358): Homolog of NCBI NO: 15233643 NR Description: cinnamyl-alcohol dehydrogenase ELI3-2; protein At4g37990.1, supported by cDNA: gi_13605755 [Arabidopsis >gi|1168730|sp|Q02972|MTD2_ARATH Probable mannitol dehydrogenase
MERLSGEKEQSVEAFGWAARDSSGHLSPFVFSRRKTGEEEVRVKVLYCGICHSDLHCLKNEWHSSIYPLVPGHEIIGEVSEIGNKVSKFNLGDKVGVGCIVDSCRTCESCREDQENYCTKAIATYNGVHHDGTINYGGYSDHIVVDERYAVKIPHTLPLVSAAPLLCAGISMYSPMKYFGLTGPDKHVGIVGLGGLGHIGVRFAKAFGTKVTVVSSTTGKSKDALDTLGADGFLVSTDEDQMKAAMGTMDGIIDTVSASHSISPLIGLLKSNGKLVLLGATEKPFDISAFSLILGRKSIAGSGIGGMQETQEMIDFAAEHGIKAEIEIISMDYVNTAMDRLAKGDVRYRFVIDISNTLAATRS

SEQ ID NO: 79923 - protein, 192 aa, Arabidopsis thaliana
  peptide (1)..(192): Ceres Seq. ID no. 12653765
  misc_feature (1)..(192): Homolog of NCBI NO: 15235757 NR Description: cinnamyl alcohol dehydrogenase -like protein,
  misc_feature (1)..(191): Homolog of NCBI NO: 14279694 NR Description: sinapyl alcohol dehydrogenase [Populus
  misc_feature (1)..(187): Homolog of NCBI NO: 10720093 NR Description: Probable mannitol dehydrogenase (NAD-dependent dehydrogenase) >gi|4097522|gb|AAD10327.1| cinnamyl alcohol
  misc_feature (1)..(190): Homolog of NCBI NO: 13507210 NR Description: cinnamyl alcohol dehydrogenase [Fragaria x
  misc_feature (1)..(190): Homolog of NCBI NO: 33519154 NR Description: 10-hydroxygeraniol oxidoreductase [Camptotheca
  misc_feature (1)..(187): Homolog of NCBI NO: 34013695 NR Description: 10-hydroxygeraniol oxidoreductase [Catharanthus
  misc_feature (1)..(189): Homolog of NCBI NO: 10720090 NR Description: Probable mannitol dehydrogenase (NAD-dependent
  misc_feature (1)..(191): Homolog of NCBI NO: 22475166 NR Description: putative sinapyl alcohol dehydrogenase [Populus
  misc_feature (1)..(187): Homolog of NCBI NO: 25815120 NR Description: alcohol NADP+ oxidoreductase [Solanum tuberosum]
  misc_feature (1)..(187): Homolog of NCBI NO: 15233643 NR Description: cinnamyl-alcohol dehydrogenase ELI3-2; protein At4g37990.1, supported by cDNA: gi_13605755 [Arabidopsis >gi|1168730|sp|Q02972|MTD2_ARATH Probable mannitol dehydrogenase
MYSPMKYFGLTGPDKHVGIVGLGGLGHIGVRFAKAFGTKVTVVSSTTGKSKDALDTLGADGFLVSTDEDQMKAAMGTMDGIIDTVSASHSISPLIGLLKSNGKLVLLGATEKPFDISAFSLILGRKSIAGSGIGGMQETQEMIDFAAEHGIKAEIEIISMDYVNTAMDRLAKGDVRYRFVIDISNTLAATRS

SEQ ID NO: 79924 - protein, 188 aa, Arabidopsis thaliana
  peptide (1)..(188): Ceres Seq. ID no. 12653766
  misc_feature (1)..(188): Homolog of NCBI NO: 15235757 NR Description: cinnamyl alcohol dehydrogenase -like protein,
  misc_feature (1)..(187): Homolog of NCBI NO: 14279694 NR Description: sinapyl alcohol dehydrogenase [Populus
  misc_feature (1)..(183): Homolog of NCBI NO: 10720093 NR Description: Probable mannitol dehydrogenase (NAD-dependent dehydrogenase) >gi|4097522|gb|AAD10327.1| cinnamyl alcohol
  misc_feature (1)..(186): Homolog of NCBI NO: 13507210 NR Description: cinnamyl alcohol dehydrogenase [Fragaria x
  misc_feature (1)..(186): Homolog of NCBI NO: 33519154 NR Description: 10-hydroxygeraniol oxidoreductase [Camptotheca
  misc_feature (1)..(183): Homolog of NCBI NO: 34013695 NR Description: 10-hydroxygeraniol oxidoreductase [Catharanthus
  misc_feature (1)..(185): Homolog of NCBI NO: 10720090 NR Description: Probable mannitol dehydrogenase (NAD-dependent
  misc_feature (1)..(187): Homolog of NCBI NO: 22475166 NR Description: putative sinapyl alcohol dehydrogenase [Populus
  misc_feature (1)..(183): Homolog of NCBI NO: 25815120 NR Description: alcohol NADP+ oxidoreductase [Solanum tuberosum]
  misc_feature (1)..(183): Homolog of NCBI NO: 15233643 NR Description: cinnamyl-alcohol dehydrogenase ELI3-2; protein At4g37990.1, supported by cDNA: gi_13605755 [Arabidopsis >gi|1168730|sp|Q02972|MTD2_ARATH Probable mannitol dehydrogenase
MKYFGLTGPDKHVGIVGLGGLGHIGVRFAKAFGTKVTVVSSTTGKSKDALDTLGADGFLVSTDEDQMKAAMGTMDGIIDTVSASHSISPLIGLLKSNGKLVLLGATEKPFDISAFSLILGRKSIAGSGIGGMQETQEMIDFAAEHGIKAEIEIISMDYVNTAMDRLAKGDVRYRFVIDISNTLAATRS

SEQ ID NO: 79925 - DNA, 1403 bp, Arabidopsis thaliana
  misc_feature (1)..(1403): Ceres Seq. ID no. 12653767
  misc_feature: MA Experiment ID: 20000314 Result: Down-regulated in Transcription
  misc_feature: MA Experiment 20000314 PARAMETER Experiment Name: At_14day_Shoots-Roots_Sub_P Parameter: Age (day) Value: 14
  misc_feature: MA Experiment 20000314 PARAMETER Experiment Name: At_14day_Shoots-Roots_Sub_P Parameter: Organism Value: A. thaliana
  misc_feature: MA Experiment 20000314 PARAMETER Experiment Name: At_14day_Shoots-Roots_Sub_P Parameter: Plant Line Value: WS
  misc_feature: MA Experiment 20000314 PARAMETER Experiment Name: At_14day_Shoots-Roots_Sub_P Parameter: Tissue Value: Roots vs. Whole Plant
  misc_feature: MA Experiment ID: 20000315 Result: Down-regulated in Transcription
  misc_feature: MA Experiment 20000315 PARAMETER Experiment Name: At_14day_Shoots-Roots_Sub_P Parameter: Age (day) Value: 14
  misc_feature: MA Experiment 20000315 PARAMETER Experiment Name: At_14day_Shoots-Roots_Sub_P Parameter: Organism Value: A. thaliana
  misc_feature: MA Experiment 20000315 PARAMETER Experiment Name: At_14day_Shoots-Roots_Sub_P Parameter: Plant Line Value: WS
  misc_feature: MA Experiment 20000315 PARAMETER Experiment Name: At_14day_Shoots-Roots_Sub_P Parameter: Tissue Value: Shoots vs. Whole Plant
  misc_feature: MA Experiment ID: 20000347 Result: Up-regulated in Transcription
  misc_feature: MA Experiment 20000347 PARAMETER Experiment Name: At_2mM_SA_Sub_P Parameter: Age (day) Value: 14
  misc_feature: MA Experiment 20000347 PARAMETER Experiment Name: At_2mM_SA_Sub_P Parameter: Organism Value: A. thaliana
  misc_feature: MA Experiment 20000347 PARAMETER Experiment Name: At_2mM_SA_Sub_P Parameter: Plant Line Value: WS
  misc_feature: MA Experiment 20000347 PARAMETER Experiment Name: At_2mM_SA_Sub_P Parameter: Timepoint (hr) Value: 6
  misc_feature: MA Experiment 20000347 PARAMETER Experiment Name: At_2mM_SA_Sub_P Parameter: Tissue Value: Aerial
  misc_feature: MA Experiment 20000347 PARAMETER Experiment Name: At_2mM_SA_Sub_P Parameter: Treatment Value: 2mM SA vs. No Treatment
  misc_feature: MA Experiment ID: 20000348 Result: Up-regulated in Transcription
  misc_feature: MA Experiment 20000348 PARAMETER Experiment Name: At_100uM_ABA_Sub_P Parameter: Age (day) Value: 14
  misc_feature: MA Experiment 20000348 PARAMETER Experiment Name: At_100uM_ABA_Sub_P Parameter: Organism Value: A. thaliana
  misc_feature: MA Experiment 20000348 PARAMETER Experiment Name: At_100uM_ABA_Sub_P Parameter: Plant Line Value: WS
  misc_feature: MA Experiment 20000348 PARAMETER Experiment Name: At_100uM_ABA_Sub_P Parameter: Timepoint (hr) Value: 1
  misc_feature: MA Experiment 20000348 PARAMETER Experiment Name: At_100uM_ABA_Sub_P Parameter: Tissue Value: Aerial
  misc_feature: MA Experiment 20000348 PARAMETER Experiment Name: At_100uM_ABA_Sub_P Parameter: Treatment Value: 100uM ABA vs. No Treatment
  misc_feature: MA Experiment ID: 20000349 Result: Up-regulated in Transcription
  misc_feature: MA Experiment 20000349 PARAMETER Experiment Name: At_100uM_ABA_Sub_P Parameter: Age (day) Value: 14
  misc_feature: MA Experiment 20000349 PARAMETER Experiment Name: At_100uM_ABA_Sub_P Parameter: Organism Value: A. thaliana
  misc_feature: MA Experiment 20000349 PARAMETER Experiment Name: At_100uM_ABA_Sub_P Parameter: Plant Line Value: WS
  misc_feature: MA Experiment 20000349 PARAMETER Experiment Name: At_100uM_ABA_Sub_P Parameter: Timepoint (hr) Value: 6
  misc_feature: MA Experiment 20000349 PARAMETER Experiment Name: At_100uM_ABA_Sub_P Parameter: Tissue Value: Aerial
  misc_feature: MA Experiment 20000349 PARAMETER Experiment Name: At_100uM_ABA_Sub_P Parameter: Treatment Value: 100uM ABA vs. No Treatment
  misc_feature: MA Experiment ID: 20000352 Result: Up-regulated in Transcription
  misc_feature: MA Experiment 20000352 PARAMETER Experiment Name: At_Drought_Sub_P Parameter: Age (day) Value: 7
  misc_feature: MA Experiment 20000352 PARAMETER Experiment Name: At_Drought_Sub_P Parameter: Organism Value: A. thaliana
  misc_feature: MA Experiment 20000352 PARAMETER Experiment Name: At_Drought_Sub_P Parameter: Plant Line Value: WS
  misc_feature: MA Experiment 20000352 PARAMETER Experiment Name: At_Drought_Sub_P Parameter: Timepoint (hr) Value: 6
  misc_feature: MA Experiment 20000352 PARAMETER Experiment Name: At_Drought_Sub_P Parameter: Tissue Value: Whole Plant
  misc_feature: MA Experiment 20000352 PARAMETER Experiment Name: At_Drought_Sub_P Parameter: Treatment Value: Drought vs. No Drought
  misc_feature: MA Experiment ID: 20000355 Result: Down-regulated in Transcription
  misc_feature: MA Experiment 20000355 PARAMETER Experiment Name: At_Siliques_Sub_P Parameter: Age (day) Value: 21
  misc_feature: MA Experiment 20000355 PARAMETER Experiment Name: At_Siliques_Sub_P Parameter: Organism Value: A. thaliana
  misc_feature: MA Experiment 20000355 PARAMETER Experiment Name: At_Siliques_Sub_P Parameter: Plant Line Value: WS
  misc_feature: MA Experiment 20000355 PARAMETER Experiment Name: At_Siliques_Sub_P Parameter: Tissue Value: Less Than 5mm Siliques vs. Whole Plant
  misc_feature: MA Experiment ID: 20000440 Result: Down-regulated in Transcription
  misc_feature: MA Experiment 20000440 PARAMETER Experiment Name: At_Closed-Flower__Sub_P Parameter: Tissue Value: Closed Flower vs. Whole Plant
aataagtgtcattcaaaagaataaaatcaaatacttacttttgaatccgtttttttcattgtttgatcgattatgggaaaggttcttcagaaagaggcgttcggattagccgcgaaagacaattccggagttctctcgcctttcagtttcactagaagggaaacaggagaaaaggatgtgaggttcaaagtgttattttgtggaatttgtcactctgatttgcatatggtcaagaacgagtggggaatgtctacttatcctcttgtcccagggcatgagatcgtgggcgtggtgactgaagtcggagccaaagtgactaaattcaaaaccggagaaaaagtcggagttgggtgtttggtcagctcgtgcgggtcatgtgacagctgcaccgaaggtatggaaaactattgtccaaaatcaatccaaacgtacggattcccgtactacgacaacaccataacatacggtggttactccgaccacatggtttgcgaggaaggtttcgtcatccgtattccagacaatctccccttggacgccgccgcaccgctcctctgtgccggtatcacggtctattcccctatgaagtatcacgggctcgacaaacccggtatgcacatcggtgtggtaggattaggcggtttaggtcatgtaggagtgaaatttgccaaggctatgggtactaaggttacggttattagtacttcggagaaaaagagagatgaggcgattaatcggcttggtgcggatgctttcttggtgagccgtgacccaaaacagattaaggatgcaatgggtactatggatggtataattgataccgtctctgcgactcattcacttcttccgttgctcggtttgctgaagcataagggaaaacttgttatggttggtgcacccgagaagccactcgagctacctgtcatgcctctcatctttgagaggaagatggtaatgggaagtatgataggagggataaaagagacccaggaaatgatagatatggccgggaaacacaacatcactgcggatattgagcttatctctgccgattatgtcaacaccgccatggaacggctagagaaagccgacgttaggtaccgctttgtgattgatgttgccaacacattgaagcctaatcctaatttataagttttaagcattaaacttcctcaaatgttattttcttgtttggtttgtcgtactaattaagttttgtgttgttgtataactatataatttggtatgcttaatccaataaatgaatagtatgatatatatgataagattttgggggtaagccaagagttatatattagtatctaaggtttggataaagaacagtactgttaaataccaaaaatgtaaagatgatgaaagaataaaaatcattttacagtgtg

SEQ ID NO: 79926 - protein, 359 aa, Arabidopsis thaliana
  peptide (1)..(359): Ceres Seq. ID no. 12653768
  misc_feature (1)..(359): Homolog of NCBI NO: 15233643 NR Description: cinnamyl-alcohol dehydrogenase ELI3-2; protein At4g37990.1, supported by cDNA: gi_13605755 [Arabidopsis >gi|1168730|sp|Q02972|MTD2_ARATH Probable mannitol dehydrogenase
  misc_feature (1)..(357): Homolog of NCBI NO: 16267 NR Description: Eli3-1 [Arabidopsis thaliana]
  misc_feature (1)..(357): Homolog of NCBI NO: 15233642 NR Description: cinnamyl-alcohol dehydrogenase ELI3-1; protein At4g37980.1, supported by cDNA: gi_13430625, supported by cDNA:
  misc_feature (6)..(354): Homolog of NCBI NO: 10720093 NR Description: Probable mannitol dehydrogenase (NAD-dependent dehydrogenase) >gi|4097522|gb|AAD10327.1| cinnamyl alcohol
  misc_feature (8)..(354): Homolog of NCBI NO: 13507210 NR Description: cinnamyl alcohol dehydrogenase [Fragaria x
  misc_feature (8)..(354): Homolog of NCBI NO: 33519154 NR Description: 10-hydroxygeraniol oxidoreductase [Camptotheca
  misc_feature (7)..(354): Homolog of NCBI NO: 10720090 NR Description: Probable mannitol dehydrogenase (NAD-dependent
  misc_feature (8)..(353): Homolog of NCBI NO: 14279694 NR Description: sinapyl alcohol dehydrogenase [Populus
  misc_feature (8)..(356): Homolog of NCBI NO: 7430935 NR Description: probable cinnamyl-alcohol dehydrogenase (EC
  misc_feature (8)..(353): Homolog of NCBI NO: 25815120 NR Description: alcohol NADP+ oxidoreductase [Solanum tuberosum]
MGKVLQKEAFGLAAKDNSGVLSPFSFTRRETGEKDVRFKVLFCGICHSDLHMVKNEWGMSTYPLVPGHEIVGVVTEVGAKVTKFKTGEKVGVGCLVSSCGSCDSCTEGMENYCPKSIQTYGFPYYDNTITYGGYSDHMVCEEGFVIRIPDNLPLDAAAPLLCAGITVYSPMKYHGLDKPGMHIGVVGLGGLGHVGVKFAKAMGTKVTVISTSEKKRDEAINRLGADAFLVSRDPKQIKDAMGTMDGIIDTVSATHSLLPLLGLLKHKGKLVMVGAPEKPLELPVMPLIFERKMVMGSMIGGIKETQEMIDMAGKHNITADIELISADYVNTAMERLEKADVRYRFVIDVANTLKPNPNL

SEQ ID NO: 79927 - protein, 308 aa, Arabidopsis thaliana
  peptide (1)..(308): Ceres Seq. ID no. 12653769
  misc_feature (1)..(308): Homolog of NCBI NO: 15233643 NR Description: cinnamyl-alcohol dehydrogenase ELI3-2; protein At4g37990.1, supported by cDNA: gi_13605755 [Arabidopsis >gi|1168730|sp|Q02972|MTD2_ARATH Probable mannitol dehydrogenase
  misc_feature (1)..(306): Homolog of NCBI NO: 16267 NR Description: Eli3-1 [Arabidopsis thaliana]
  misc_feature (1)..(306): Homolog of NCBI NO: 15233642 NR Description: cinnamyl-alcohol dehydrogenase ELI3-1; protein At4g37980.1, supported by cDNA: gi_13430625, supported by cDNA:
  misc_feature (1)..(303): Homolog of NCBI NO: 10720093 NR Description: Probable mannitol dehydrogenase (NAD-dependent dehydrogenase) >gi|4097522|gb|AAD10327.1| cinnamyl alcohol
  misc_feature (1)..(303): Homolog of NCBI NO: 13507210 NR Description: cinnamyl alcohol dehydrogenase [Fragaria x
  misc_feature (1)..(303): Homolog of NCBI NO: 33519154 NR Description: 10-hydroxygeraniol oxidoreductase [Camptotheca
  misc_feature (1)..(303): Homolog of NCBI NO: 10720090 NR Description: Probable mannitol dehydrogenase (NAD-dependent
  misc_feature (1)..(302): Homolog of NCBI NO: 14279694 NR Description: sinapyl alcohol dehydrogenase [Populus
  misc_feature (1)..(305): Homolog of NCBI NO: 7430935 NR Description: probable cinnamyl-alcohol dehydrogenase (EC
  misc_feature (1)..(302): Homolog of NCBI NO: 25815120 NR Description: alcohol NADP+ oxidoreductase [Solanum tuberosum]
MVKNEWGMSTYPLVPGHEIVGVVTEVGAKVTKFKTGEKVGVGCLVSSCGSCDSCTEGMENYCPKSIQTYGFPYYDNTITYGGYSDHMVCEEGFVIRIPDNLPLDAAAPLLCAGITVYSPMKYHGLDKPGMHIGVVGLGGLGHVGVKFAKAMGTKVTVISTSEKKRDEAINRLGADAFLVSRDPKQIKDAMGTMDGIIDTVSATHSLLPLLGLLKHKGKLVMVGAPEKPLELPVMPLIFERKMVMGSMIGGIKETQEMIDMAGKHNITADIELISADYVNTAMERLEKADVRYRFVIDVANTLKPNPNL

SEQ ID NO: 79928 - protein, 301 aa, Arabidopsis thaliana
  peptide (1)..(301): Ceres Seq. ID no. 12653770
  misc_feature (1)..(301): Homolog of NCBI NO: 15233643 NR Description: cinnamyl-alcohol dehydrogenase ELI3-2; protein At4g37990.1, supported by cDNA: gi_13605755 [Arabidopsis >gi|1168730|sp|Q02972|MTD2_ARATH Probable mannitol dehydrogenase
  misc_feature (1)..(299): Homolog of NCBI NO: 16267 NR Description: Eli3-1 [Arabidopsis thaliana]
  misc_feature (1)..(299): Homolog of NCBI NO: 15233642 NR Description: cinnamyl-alcohol dehydrogenase ELI3-1; protein At4g37980.1, supported by cDNA: gi_13430625, supported by cDNA:
  misc_feature (1)..(296): Homolog of NCBI NO: 10720093 NR Description: Probable mannitol dehydrogenase (NAD-dependent dehydrogenase) >gi|4097522|gb|AAD10327.1| cinnamyl alcohol
  misc_feature (1)..(296): Homolog of NCBI NO: 13507210 NR Description: cinnamyl alcohol dehydrogenase [Fragaria x
  misc_feature (1)..(296): Homolog of NCBI NO: 33519154 NR Description: 10-hydroxygeraniol oxidoreductase [Camptotheca
  misc_feature (1)..(296): Homolog of NCBI NO: 10720090 NR Description: Probable mannitol dehydrogenase (NAD-dependent
  misc_feature (1)..(295): Homolog of NCBI NO: 14279694 NR Description: sinapyl alcohol dehydrogenase [Populus
  misc_feature (1)..(298): Homolog of NCBI NO: 7430935 NR Description: probable cinnamyl-alcohol dehydrogenase (EC
  misc_feature (1)..(295): Homolog of NCBI NO: 25815120 NR Description: alcohol NADP+ oxidoreductase [Solanum tuberosum]
MSTYPLVPGHEIVGVVTEVGAKVTKFKTGEKVGVGCLVSSCGSCDSCTEGMENYCPKSIQTYGFPYYDNTITYGGYSDHMVCEEGFVIRIPDNLPLDAAAPLLCAGITVYSPMKYHGLDKPGMHIGVVGLGGLGHVGVKFAKAMGTKVTVISTSEKKRDEAINRLGADAFLVSRDPKQIKDAMGTMDGIIDTVSATHSLLPLLGLLKHKGKLVMVGAPEKPLELPVMPLIFERKMVMGSMIGGIKETQEMIDMAGKHNITADIELISADYVNTAMERLEKADVRYRFVIDVANTLKPNPNL

SEQ ID NO: 79929 - DNA, 1455 bp, Arabidopsis thaliana
  misc_feature (1)..(1455): Ceres Seq. ID no. 12653777
  misc_feature: MA Experiment ID: 20000180 Result: Up-regulated in Transcription
  misc_feature: MA Experiment 20000180 PARAMETER Experiment Name: At_Germinating_Seeds_P Parameter: Age (hr) Value: 24 vs. 0
  misc_feature: MA Experiment 20000180 PARAMETER Experiment Name: At_Germinating_Seeds_P Parameter: Tissue Value: Germinating Seeds
  misc_feature: MA Experiment ID: 20000185 Result: Up-regulated in Transcription
  misc_feature: MA Experiment 20000185 PARAMETER Experiment Name: At_Roots__P Parameter: Age (day) Value: 7 vs. 21
  misc_feature: MA Experiment 20000185 PARAMETER Experiment Name: At_Roots__P Parameter: Organism Value: A. thaliana
  misc_feature: MA Experiment 20000185 PARAMETER Experiment Name: At_Roots__P Parameter: Tissue Value: Roots vs. Whole Plant
  misc_feature: MA Experiment ID: 20000227 Result: Up-regulated in Transcription
  misc_feature: MA Experiment 20000227 PARAMETER Experiment Name: At_Root-Tips-vs-Tops_P Parameter: Tissue Value: Root Tips vs. Root Tops
  misc_feature: MA Experiment ID: 20000234 Result: Up-regulated in Transcription
  misc_feature: MA Experiment 20000234 PARAMETER Experiment Name: At_Siliques_P Parameter: Age (day) Value: 21
  misc_feature: MA Experiment 20000234 PARAMETER Experiment Name: At_Siliques_P Parameter: Organism Value: A. thaliana
  misc_feature: MA Experiment 20000234 PARAMETER Experiment Name: At_Siliques_P Parameter: Plant Line Value: WS
  misc_feature: MA Experiment 20000234 PARAMETER Experiment Name: At_Siliques_P Parameter: Tissue Value: Less Than 5mm Siliques vs. Whole Plant
  misc_feature: MA Experiment ID: 20000235 Result: Up-regulated in Transcription
  misc_feature: MA Experiment 20000235 PARAMETER Experiment Name: At_Siliques_P Parameter: Age (day) Value: 21
  misc_feature: MA Experiment 20000235 PARAMETER Experiment Name: At_Siliques_P Parameter: Organism Value: A. thaliana
  misc_feature: MA Experiment 20000235 PARAMETER Experiment Name: At_Siliques_P Parameter: Plant Line Value: WS
  misc_feature: MA Experiment 20000235 PARAMETER Experiment Name: At_Siliques_P Parameter: Tissue Value: 5-10mm Siliques vs. Whole Plant
  misc_feature: MA Experiment ID: 20000264 Result: Up-regulated in Transcription
  misc_feature: MA Experiment 20000264 PARAMETER Experiment Name: At_Open_Flower_P Parameter: Age (day) Value: 21
  misc_feature: MA Experiment 20000264 PARAMETER Experiment Name: At_Open_Flower_P Parameter: Plant Line Value: WS
  misc_feature: MA Experiment 20000264 PARAMETER Experiment Name: At_Open_Flower_P Parameter: Tissue Value: Open Flower vs. Whole Plant
  misc_feature: MA Experiment ID: 20000265 Result: Up-regulated in Transcription
  misc_feature: MA Experiment 20000265 PARAMETER Experiment Name: At_Open_Flower_P Parameter: Age (day) Value: 21
  misc_feature: MA Experiment 20000265 PARAMETER Experiment Name: At_Open_Flower_P Parameter: Plant Line Value: WS
  misc_feature: MA Experiment 20000265 PARAMETER Experiment Name: At_Open_Flower_P Parameter: Tissue Value: Closed Flower vs. Whole Plant
  misc_feature: MA Experiment ID: 20000286 Result: Up-regulated in Transcription
  misc_feature: MA Experiment 20000286 PARAMETER Experiment Name: At_Open_Flower_P Parameter: Age (day) Value: 21
  misc_feature: MA Experiment 20000286 PARAMETER Experiment Name: At_Open_Flower_P Parameter: Plant Line Value: WS
  misc_feature: MA Experiment 20000286 PARAMETER Experiment Name: At_Open_Flower_P Parameter: Tissue Value: Half Open vs. Whole Plant
  misc_feature: MA Experiment ID: 20000437 Result: Up-regulated in Transcription
  misc_feature: MA Experiment 20000437 PARAMETER Experiment Name: At_Drought_P Parameter: Age (day) Value: 8
  misc_feature: MA Experiment 20000437 PARAMETER Experiment Name: At_Drought_P Parameter: Organism Value: A. thaliana
  misc_feature: MA Experiment 20000437 PARAMETER Experiment Name: At_Drought_P Parameter: Plant Line Value: WS
  misc_feature: MA Experiment 20000437 PARAMETER Experiment Name: At_Drought_P Parameter: Timepoint (hr) Value: 24
  misc_feature: MA Experiment 20000437 PARAMETER Experiment Name: At_Drought_P Parameter: Tissue Value: Whole Plant
  misc_feature: MA Experiment 20000437 PARAMETER Experiment Name: At_Drought_P Parameter: Treatment Value: Drought vs. No Drought
  misc_feature: MA Experiment ID: 20000439 Result: Up-regulated in Transcription
  misc_feature: MA Experiment 20000439 PARAMETER Experiment Name: At_Roots__P Parameter: Age (day) Value: 14 vs. 21
  misc_feature: MA Experiment 20000439 PARAMETER Experiment Name: At_Roots__P Parameter: Organism Value: A. thaliana
  misc_feature: MA Experiment 20000439 PARAMETER Experiment Name: At_Roots__P Parameter: Tissue Value: Roots vs. Whole Plant
  misc_feature: MA Experiment ID: 20000794 Result: Up-regulated in Transcription
  misc_feature: MA Experiment 20000794 PARAMETER Experiment Name: At_Petals_P Parameter: Age (day) Value: 23-25 days
  misc_feature: MA Experiment 20000794 PARAMETER Experiment Name: At_Petals_P Parameter: Plant Line Value: WS
  misc_feature: MA Experiment 20000794 PARAMETER Experiment Name: At_Petals_P Parameter: Tissue Value: Petals vs. Whole plant
  misc_feature: MA Experiment ID: 20001757 Result: Down-regulated in Transcription
  misc_feature: MA Experiment 20001757 PARAMETER Experiment Name: At_50mM_NH4NO3_L-to-H_P Parameter: Timepoint (hr) Value: 6
  misc_feature: MA Experiment 20001757 PARAMETER Experiment Name: At_50mM_NH4NO3_L-to-H_P Parameter: Tissue Value: Leaf
  misc_feature: MA Experiment 20001757 PARAMETER Experiment Name: At_50mM_NH4NO3_L-to-H_P Parameter: Treatment Value: 50mM NH4NO3 vs 100mM Mannitol
  misc_feature: MA Experiment ID: 20001910 Result: Up-regulated in Transcription
  misc_feature: MA Experiment 20001910 PARAMETER Experiment Name: At_Drought_Reproduction_P Parameter: Age (day) Value: 37
  misc_feature: MA Experiment 20001910 PARAMETER Experiment Name: At_Drought_Reproduction_P Parameter: Organism Value: A. thaliana
  misc_feature: MA Experiment 20001910 PARAMETER Experiment Name: At_Drought_Reproduction_P Parameter: Plant Line Value: WS
  misc_feature: MA Experiment 20001910 PARAMETER Experiment Name: At_Drought_Reproduction_P Parameter: Timepoint (day) Value: 7
  misc_feature: MA Experiment 20001910 PARAMETER Experiment Name: At_Drought_Reproduction_P Parameter: Tissue Value: Flowers
  misc_feature: MA Experiment 20001910 PARAMETER Experiment Name: At_Drought_Reproduction_P Parameter: Treatment Value: Drought vs. No Drought
  misc_feature: MA Experiment ID: 20001911 Result: Up-regulated in Transcription
  misc_feature: MA Experiment 20001911 PARAMETER Experiment Name: At_Drought_Reproduction_P Parameter: Age (day) Value: 40
  misc_feature: MA Experiment 20001911 PARAMETER Experiment Name: At_Drought_Reproduction_P Parameter: Organism Value: A. thaliana
  misc_feature: MA Experiment 20001911 PARAMETER Experiment Name: At_Drought_Reproduction_P Parameter: Plant Line Value: WS
  misc_feature: MA Experiment 20001911 PARAMETER Experiment Name: At_Drought_Reproduction_P Parameter: Timepoint (day) Value: 10
  misc_feature: MA Experiment 20001911 PARAMETER Experiment Name: At_Drought_Reproduction_P Parameter: Tissue Value: Flowers
  misc_feature: MA Experiment 20001911 PARAMETER Experiment Name: At_Drought_Reproduction_P Parameter: Treatment Value: Drought vs. No Drought
atgaagcacagcggtgggaaccaagcctgctatgttcttggtcaaaagaccccaagcatccgagatctctactcgttgggacacaaactaggtcaaggacagtttgggacgacttacatgtgcaaagagatctcaacagggcgtgaatacgcatgcaagtctataacaaaacgaaagttgatatcaaaggaagatgtggaagacgtacgcagggaaattcaaatcatgcaccatctggctggctacaagaacattgtcaccattaaaggtgcttacgaggatccattgtatgttcacatcgtgatggagctttgctcaggtggggaattgtttgacagaattatccagagaggacattacagcgagagaaaagcagctgagctgataaagatcatcgttggtgttgttgaggcttgccattcgcttggtgtcatgcatagagatctaaagcccgaaaatttcttgttggttaacaaggacgacgacttctctctcaaagccattgattttgggctttccgtgttcttcaaaccaggtcaaatattcgaggatgtggttggaagtccgtattatgttgctcctgaggttctgctcaagcactacggacccgaggctgatgtgtggaccgcaggggtcatactgtacatattggtgagcggagtccctccgttctgggcagaaacacagcaagggatatttgatgcagtgctgaagggacatattgactttgactccgacccttggcccctaatatccgactctgcaaaaaacttgatccgtggcatgctatgttcccggccctctgagcgactgacagctcatcaagtattgcgccatccttggatctgtgaaaatggagttgcgccagacagagcactagatcctgctgtgctttctcgtcttaaacagttctctgcgatgaataaactaaagcagatggctttacgggtaatagctgagagtctctcggaggaagaaattgctggactgaaggaaatgttcaaagcaatggacacggataacagtggagcgattacgtttgacgagctgaaagccgggttgcgaagatatggttcaaccctcaaggatactgagattcgtgaccttatggaggctgcagatattgacaagagtgggaccatagattatggtgaattcattgctgcaacaatccatctgaacaaattagagcgtgaagaacatcttctgtcagccttcaggtactttgacaaagatgggagcggttacatcactatcgatgagctacagcacgcatgtgctgaacagggaatgagtgatgtctttctagaagatgtgatcaaggaagtcgaccaagacaatgatggaaggattgactacggggagtttgtagctatgatgcagaaaggcattgttggaagaacaatgaggaaaagcataaacatgagcatcaggaacaatgccgtctcgcagtga

SEQ ID NO: 79930 - protein, 484 aa, Arabidopsis thaliana
  peptide (1)..(484): Ceres Seq. ID no. 12653778
  misc_feature (24)..(282): Pfam Name: Protein kinase domain Pfam Description: Protein kinase domain
  misc_feature (1)..(484): Homolog of NCBI NO: 15233737 NR Description: calcium-dependent protein kinase -like protein;
  misc_feature (1)..(484): Homolog of NCBI NO: 7428003 NR Description: calcium-dependent protein kinase (EC 2.7.1.-) -
MKHSGGNQACYVLGQKTPSIRDLYSLGHKLGQGQFGTTYMCKEISTGREYACKSITKRKLISKEDVEDVRREIQIMHHLAGYKNIVTIKGAYEDPLYVHIVMELCSGGELFDRIIQRGHYSERKAAELIKIIVGVVEACHSLGVMHRDLKPENFLLVNKDDDFSLKAIDFGLSVFFKPGQIFEDVVGSPYYVAPEVLLKHYGPEADVWTAGVILYILVSGVPPFWAETQQGIFDAVLKGHIDFDSDPWPLISDSAKNLIRGMLCSRPSERLTAHQVLRHPWICENGVAPDRALDPAVLSRLKQFSAMNKLKQMALRVIAESLSEEEIAGLKEMFKAMDTDNSGAITFDELKAGLRRYGSTLKDTEIRDLMEAADIDKSGTIDYGEFIAATIHLNKLEREEHLLSAFRYFDKDGSGYITIDELQHACAEQGMSDVFLEDVIKEVDQDNDGRIDYGEFVAMMQKGIVGRTMRKSINMSIRNNAVSQ

SEQ ID NO: 79931 - protein, 445 aa, Arabidopsis thaliana
  peptide (1)..(445): Ceres Seq. ID no. 12653779
  misc_feature (1)..(243): Pfam Name: Protein kinase domain Pfam Description: Protein kinase domain
  misc_feature (1)..(445): Homolog of NCBI NO: 15233737 NR Description: calcium-dependent protein kinase -like protein;
  misc_feature (1)..(445): Homolog of NCBI NO: 7428003 NR Description: calcium-dependent protein kinase (EC 2.7.1.-) -
MCKEISTGREYACKSITKRKLISKEDVEDVRREIQIMHHLAGYKNIVTIKGAYEDPLYVHIVMELCSGGELFDRIIQRGHYSERKAAELIKIIVGVVEACHSLGVMHRDLKPENFLLVNKDDDFSLKAIDFGLSVFFKPGQIFEDVVGSPYYVAPEVLLKHYGPEADVWTAGVILYILVSGVPPFWAETQQGIFDAVLKGHIDFDSDPWPLISDSAKNLIRGMLCSRPSERLTAHQVLRHPWICENGVAPDRALDPAVLSRLKQFSAMNKLKQMALRVIAESLSEEEIAGLKEMFKAMDTDNSGAITFDELKAGLRRYGSTLKDTEIRDLMEAADIDKSGTIDYGEFIAATIHLNKLEREEHLLSAFRYFDKDGSGYITIDELQHACAEQGMSDVFLEDVIKEVDQDNDGRIDYGEFVAMMQKGIVGRTMRKSINMSIRNNAVSQ

SEQ ID NO: 79932 - protein, 409 aa, Arabidopsis thaliana
  peptide (1)..(409): Ceres Seq. ID no. 12653780
  misc_feature (1)..(207): Pfam Name: Protein kinase domain Pfam Description: Protein kinase domain
  misc_feature (1)..(409): Homolog of NCBI NO: 15233737 NR Description: calcium-dependent protein kinase -like protein;
  misc_feature (1)..(409): Homolog of NCBI NO: 7428003 NR Description: calcium-dependent protein kinase (EC 2.7.1.-) -
MHHLAGYKNIVTIKGAYEDPLYVHIVMELCSGGELFDRIIQRGHYSERKAAELIKIIVGVVEACHSLGVMHRDLKPENFLLVNKDDDFSLKAIDFGLSVFFKPGQIFEDVVGSPYYVAPEVLLKHYGPEADVWTAGVILYILVSGVPPFWAETQQGIFDAVLKGHIDFDSDPWPLISDSAKNLIRGMLCSRPSERLTAHQVLRHPWICENGVAPDRALDPAVLSRLKQFSAMNKLKQMALRVIAESLSEEEIAGLKEMFKAMDTDNSGAITFDELKAGLRRYGSTLKDTEIRDLMEAADIDKSGTIDYGEFIAATIHLNKLEREEHLLSAFRYFDKDGSGYITIDELQHACAEQGMSDVFLEDVIKEVDQDNDGRIDYGEFVAMMQKGIVGRTMRKSINMSIRNNAVSQ

SEQ ID NO: 79933 - DNA, 1014 bp, Arabidopsis thaliana
  misc_feature (1)..(1014): Ceres Seq. ID no. 12653781
  misc_feature: MA Experiment ID: 20000182 Result: Up-regulated in Transcription
  misc_feature: MA Experiment 20000182 PARAMETER Experiment Name: At_2mM_SA_P Parameter: Age (day) Value: 14
  misc_feature: MA Experiment 20000182 PARAMETER Experiment Name: At_2mM_SA_P Parameter: Organism Value: A. thaliana
  misc_feature: MA Experiment 20000182 PARAMETER Experiment Name: At_2mM_SA_P Parameter: Plant Line Value: WS
  misc_feature: MA Experiment 20000182 PARAMETER Experiment Name: At_2mM_SA_P Parameter: Timepoint (hr) Value: 6
  misc_feature: MA Experiment 20000182 PARAMETER Experiment Name: At_2mM_SA_P Parameter: Tissue Value: Aerial
  misc_feature: MA Experiment 20000182 PARAMETER Experiment Name: At_2mM_SA_P Parameter: Treatment Value: 2mM SA vs. No Treatment
  misc_feature: MA Experiment ID: 20001558 Result: Down-regulated in Transcription
  misc_feature: MA Experiment 20001558 PARAMETER Experiment Name: At_Drought_Soil_Dry_P Parameter: Age (day) Value: 27
  misc_feature: MA Experiment 20001558 PARAMETER Experiment Name: At_Drought_Soil_Dry_P Parameter: Organism Value: A. thaliana
  misc_feature: MA Experiment 20001558 PARAMETER Experiment Name: At_Drought_Soil_Dry_P Parameter: Plant Line Value: WS
  misc_feature: MA Experiment 20001558 PARAMETER Experiment Name: At_Drought_Soil_Dry_P Parameter: Post Timepoint (hr) Value: 6
  misc_feature: MA Experiment 20001558 PARAMETER Experiment Name: At_Drought_Soil_Dry_P Parameter: Post-Treatment Value: Re-Water vs. No Drought
  misc_feature: MA Experiment 20001558 PARAMETER Experiment Name: At_Drought_Soil_Dry_P Parameter: Timepoint (day) Value: 13
  misc_feature: MA Experiment 20001558 PARAMETER Experiment Name: At_Drought_Soil_Dry_P Parameter: Treatment Value: Drought vs. No Drought
  misc_feature: MA Experiment ID: 20001560 Result: Down-regulated in Transcription
  misc_feature: MA Experiment 20001560 PARAMETER Experiment Name: At_Drought_Soil_Dry_P Parameter: Age (day) Value: 28
  misc_feature: MA Experiment 20001560 PARAMETER Experiment Name: At_Drought_Soil_Dry_P Parameter: Organism Value: A. thaliana
  misc_feature: MA Experiment 20001560 PARAMETER Experiment Name: At_Drought_Soil_Dry_P Parameter: Plant Line Value: WS
  misc_feature: MA Experiment 20001560 PARAMETER Experiment Name: At_Drought_Soil_Dry_P Parameter: Post Timepoint (hr) Value: None
  misc_feature: MA Experiment 20001560 PARAMETER Experiment Name: At_Drought_Soil_Dry_P Parameter: Post-Treatment Value: None
  misc_feature: MA Experiment 20001560 PARAMETER Experiment Name: At_Drought_Soil_Dry_P Parameter: Timepoint (day) Value: 14
  misc_feature: MA Experiment 20001560 PARAMETER Experiment Name: At_Drought_Soil_Dry_P Parameter: Treatment Value: Drought vs. No Drought
gacgacgactttgattagagcagagagatggttggttcgttggttcgtcggaggagaagagaatgtgcatagcagtatttctgtggcaatcgcatccgctgtacccttttcttctatttctcaacagagatgaagatcacaacagggcgacagaggcgctgcgttggtgggaagacggagagacggtgggaggaagagaccttgttggcggcgggacgtggctgggctgcacgaggcatggccgtctggctttcctcaccaatttcaaggaagcctcctccttccctgctgctaaatcccgtggagatctgcctcttcgttacttgcagagcgaaaagagtccggccgagtttgccgaggagatccaagacgaaatttcactctacaatggctttaacctggttgtcgctcatgtcttgtccaaatccatgatttacattaccaaccgaccaccccacggtgacaagctcgtgacgcaagtctctcccgggatccatgtcctttccaacgccaacctcgactccccttggcccaagtgtctgaggctgagggagggtttccaacagcttctggctgagaacgggagcggtgaattcccggtgaagaccatggtggaggaggtgatgaccaatactgtcaaggacgaagaaaccgagctacctcacgttttcacaccagagacggaataccatctcagctccatcttcgtcgacatgcagagaccaactgggcgttatgggaccagaagcatctctgcgatcatcgtcaagtcccatggagatggtggtggtgatggtgagatttgcttctacgagaggcatcttgaagaaggcgattcatggaaggaacacactcaacagtttgtaataatacaaaaccaaagcatttgattagctagccaggcttatttcgcgagcttcccttgcttgtaacattgagaaatcaaaactctcacatatgttgtacatgtaaacacaaaacagaagacagagctgatctcttttattccaaacc

SEQ ID NO: 79934 - protein, 275 aa, Arabidopsis thaliana
  peptide (1)..(275): Ceres Seq. ID no. 12653782
  misc_feature (35)..(267): Pfam Name: Protein of unknown function (DUF833) Pfam Description: Protein of unknown function (DUF833)
  misc_feature (1)..(275): Homolog of NCBI NO: 18420207 NR Description: putative protein; protein id: At4g38260.1,
  misc_feature (35)..(275): Homolog of NCBI NO: 15451202 NR Description: putative protein [Arabidopsis thaliana]
  misc_feature (30)..(275): Homolog of NCBI NO: 7485957 NR Description: hypothetical protein F22I13.30 - Arabidopsis >gi|4539334|emb|CAB37482.1| putative protein [Arabidopsis >gi|7270810|emb|CAB80491.1| putative protein [Arabidopsis
  misc_feature (30)..(273): Homolog of NCBI NO: 38345399 NR Description: OSJNBa0017B10.5 [Oryza sativa (japonica
  misc_feature (1)..(272): Homolog of NCBI NO: 23098506 NR Description: hypothetical protein [Oceanobacillus iheyensis >gi|22776732|dbj|BAC13007.1| hypothetical conserved protein
  misc_feature (1)..(239): Homolog of NCBI NO: 39995898 NR Description: conserved hypothetical protein [Geobacter PCA] >gi|39982662|gb|AAR34122.1| conserved hypothetical protein
  misc_feature (1)..(240): Homolog of NCBI NO: 22983384 NR Description: hypothetical protein [Burkholderia fungorum]
  misc_feature (1)..(240): Homolog of NCBI NO: 15614290 NR Description: BH1727~unknown conserved protein in others
  misc_feature (1)..(255): Homolog of NCBI NO: 22977012 NR Description: hypothetical protein [Ralstonia metallidurans]
  misc_feature (1)..(244): Homolog of NCBI NO: 33593621 NR Description: conserved hypothetical protein [Bordetella >gi|33563694|emb|CAE42927.1| conserved hypothetical protein
MCIAVFLWQSHPLYPFLLFLNRDEDHNRATEALRWWEDGETVGGRDLVGGGTWLGCTRHGRLAFLTNFKEASSFPAAKSRGDLPLRYLQSEKSPAEFAEEIQDEISLYNGFNLVVAHVLSKSMIYITNRPPHGDKLVTQVSPGIHVLSNANLDSPWPKCLRLREGFQQLLAENGSGEFPVKTMVEEVMTNTVKDEETELPHVFTPETEYHLSSIFVDMQRPTGRYGTRSISAIIVKSHGDGGGDGEICFYERHLEEGDSWKEHTQQFVIIQNQSI

SEQ ID NO: 79935 - protein, 153 aa, Arabidopsis thaliana
  peptide (1)..(153): Ceres Seq. ID no. 12653783
  misc_feature (1)..(145): Pfam Name: Protein of unknown function (DUF833) Pfam Description: Protein of unknown function (DUF833)
  misc_feature (1)..(153): Homolog of NCBI NO: 18420207 NR Description: putative protein; protein id: At4g38260.1,
  misc_feature (1)..(153): Homolog of NCBI NO: 15451202 NR Description: putative protein [Arabidopsis thaliana]
  misc_feature (1)..(153): Homolog of NCBI NO: 7485957 NR Description: hypothetical protein F22I13.30 - Arabidopsis >gi|4539334|emb|CAB37482.1| putative protein [Arabidopsis >gi|7270810|emb|CAB80491.1| putative protein [Arabidopsis
  misc_feature (1)..(151): Homolog of NCBI NO: 38345399 NR Description: OSJNBa0017B10.5 [Oryza sativa (japonica
  misc_feature (1)..(150): Homolog of NCBI NO: 23098506 NR Description: hypothetical protein [Oceanobacillus iheyensis >gi|22776732|dbj|BAC13007.1| hypothetical conserved protein
  misc_feature (1)..(117): Homolog of NCBI NO: 39995898 NR Description: conserved hypothetical protein [Geobacter PCA] >gi|39982662|gb|AAR34122.1| conserved hypothetical protein
  misc_feature (1)..(118): Homolog of NCBI NO: 22983384 NR Description: hypothetical protein [Burkholderia fungorum]
  misc_feature (1)..(118): Homolog of NCBI NO: 15614290 NR Description: BH1727~unknown conserved protein in others
  misc_feature (1)..(133): Homolog of NCBI NO: 22977012 NR Description: hypothetical protein [Ralstonia metallidurans]
  misc_feature (1)..(122): Homolog of NCBI NO: 33593621 NR Description: conserved hypothetical protein [Bordetella >gi|33563694|emb|CAE42927.1| conserved hypothetical protein
MIYITNRPPHGDKLVTQVSPGIHVLSNANLDSPWPKCLRLREGFQQLLAENGSGEFPVKTMVEEVMTNTVKDEETELPHVFTPETEYHLSSIFVDMQRPTGRYGTRSISAIIVKSHGDGGGDGEICFYERHLEEGDSWKEHTQQFVIIQNQSI

SEQ ID NO: 79936 - DNA, 1656 bp, Arabidopsis thaliana
  misc_feature (1)..(1656): Ceres Seq. ID no. 12653795
  misc_feature: MA Experiment ID: 20000185 Result: Up-regulated in Transcription
  misc_feature: MA Experiment 20000185 PARAMETER Experiment Name: At_Roots__P Parameter: Age (day) Value: 7 vs. 21
  misc_feature: MA Experiment 20000185 PARAMETER Experiment Name: At_Roots__P Parameter: Organism Value: A. thaliana
  misc_feature: MA Experiment 20000185 PARAMETER Experiment Name: At_Roots__P Parameter: Tissue Value: Roots vs. Whole Plant
  misc_feature: MA Experiment ID: 20000439 Result: Up-regulated in Transcription
  misc_feature: MA Experiment 20000439 PARAMETER Experiment Name: At_Roots__P Parameter: Age (day) Value: 14 vs. 21
  misc_feature: MA Experiment 20000439 PARAMETER Experiment Name: At_Roots__P Parameter: Organism Value: A. thaliana
  misc_feature: MA Experiment 20000439 PARAMETER Experiment Name: At_Roots__P Parameter: Tissue Value: Roots vs. Whole Plant
  misc_feature: MA Experiment ID: 20001248 Result: Up-regulated in Transcription
  misc_feature: MA Experiment 20001248 PARAMETER Experiment Name: At_Far-red-induction_P Parameter: Age (day) Value: 7
  misc_feature: MA Experiment 20001248 PARAMETER Experiment Name: At_Far-red-induction_P Parameter: Light Value: Far-red vs. White
  misc_feature: MA Experiment 20001248 PARAMETER Experiment Name: At_Far-red-induction_P Parameter: Organism Value: A. thaliana
  misc_feature: MA Experiment 20001248 PARAMETER Experiment Name: At_Far-red-induction_P Parameter: Plant Line Value: Columbia
  misc_feature: MA Experiment 20001248 PARAMETER Experiment Name: At_Far-red-induction_P Parameter: Timepoint (hr) Value: 4
  misc_feature: MA Experiment 20001248 PARAMETER Experiment Name: At_Far-red-induction_P Parameter: Tissue Value: Whole Plant
atggcctctttgaagttgaagaaaagggataatggcgctgaacccgacaagaaaaagctggtcatcgccggtattcgccaccagttactccttctccttcgccgccgtcaccgtctatttccgctggtatctgccgtctccggctgtctcctcctcatcctcttctcattctccaccctctctcctcctccattgatccatcataacaatcaagtggccgtcgaacccaatccaaccactccatttcgtgtacccgaaaatggcggaaggtcggatcgccagttatggagctcgagattgtccaacttgtactatgcctgcagtaatgcaactgacacctttcaagttacggatacgagaagccaaaccaatcggtatttactgatcgcaacaagcggagggttaaaccaacagcggacagggataatagatgctgtagtagcggcatacattctaaacgccactcttgtggtccctaaacttgaccagaagtcgtactggaaggacaccagcaactttgaggatatatttgatgttgattggttcatatcgcatctctccaaagacgtgaagatcatcaaggagcttcctaaagaagagcagtcaagaatatccaccagcctacagtcaatgcgtgtcccaaggaagtgcacgccttcttgctacttgcagcgtgttttgcccattcttactaagaaacatgttgtacaactctccaaattcgattacaggctgtccaacgctcttgatacagagctccagaaactgcgttgtagagtcaactaccatgccgtcaggtatacagagtctatcaacaggatgggccaattgttggttgaccggatgagaaaaaaggccaaacattttgttgcccttcatctcagattcgaacctgatatgctggccttctccggatgctattacggcggtggtcaaaaggagagactcgaactcggagctatgagaagaaggtggaaaacgttacatgcggcaaaccctgaaaaggtacggcggcacgggagatgtcccctgacgccagaggagattggtctgatgctcagaggcttaggttttgggaaagaggttcacttgtacgttgcatcaggcgaggtatacggaggggaggatacattggcacctttaagagctctgtttccgaatcttcatacaaaagagacactgacctccaagaaagaactggctccgtttgcaaacttctcatcacgcatggctgctcttgacttcattgtctgtgataagagcgacgcatttgtcacaaacaacaacggcaacatggctcgaatcttagctgggagaaggagatacttgggacacaaagtaaccatccgtccaaacgccaagaaactctacgaaatcttcaaaaatagacacaacatgacatggggtgagttctcatcgaaggtcagaagataccagacgggtttcatgggggagccagatgaaatgaaaccaggagagggggagttccatgagaacccagcctcctgcatttgtcgaacctctgaagcaagagtcaaagaaaaagcaaaacatgtaaatgaagatgactcatcggagtactcagagattggtaatgtccccatatccagtagaagcgatttggatcactcacaatttgatgaagtgatcttctga

SEQ ID NO: 79937 - protein, 551 aa, Arabidopsis thaliana
  peptide (1)..(551): Ceres Seq. ID no. 12653796
  misc_feature (128)..(471): Pfam Name: Plant protein family Pfam Description: Plant protein family
  misc_feature (1)..(551): Homolog of NCBI NO: 15233840 NR Description: putative growth regulator protein; protein id: [Arabidopsis thaliana] >gi|7488119|pir||T05667 probable growth
  misc_feature (8)..(541): Homolog of NCBI NO: 322752 NR Description: auxin-independent growth promoter - common
  misc_feature (35)..(547): Homolog of NCBI NO: 8886957 NR Description: F2D10.3 [Arabidopsis thaliana]
  misc_feature (35)..(513): Homolog of NCBI NO: 25406439 NR Description: hypothetical protein F15M4.23 [imported] -
  misc_feature (35)..(513): Homolog of NCBI NO: 18411065 NR Description: putative auxin-independent growth promoter; id: At1g76270.1, supported by cDNA: gi_15292904 [Arabidopsis
  misc_feature (35)..(547): Homolog of NCBI NO: 8778600 NR Description: F5M15.13 [Arabidopsis thaliana]
  misc_feature (61)..(545): Homolog of NCBI NO: 38345930 NR Description: OSJNBb0078D11.5 [Oryza sativa (japonica
  misc_feature (266)..(547): Homolog of NCBI NO: 30686880 NR Description: axi 1 protein -related [Arabidopsis thaliana]
  misc_feature (35)..(257): Homolog of NCBI NO: 30686880 NR Description: axi 1 protein -related [Arabidopsis thaliana]
  misc_feature (121)..(513): Homolog of NCBI NO: 6573718 NR Description: T23E18.20 [Arabidopsis thaliana]
MASLKLKKRDNGAEPDKKKLVIAGIRHQLLLLLRRRHRLFPLVSAVSGCLLLILFSFSTLSPPPLIHHNNQVAVEPNPTTPFRVPENGGRSDRQLWSSRLSNLYYACSNATDTFQVTDTRSQTNRYLLIATSGGLNQQRTGIIDAVVAAYILNATLVVPKLDQKSYWKDTSNFEDIFDVDWFISHLSKDVKIIKELPKEEQSRISTSLQSMRVPRKCTPSCYLQRVLPILTKKHVVQLSKFDYRLSNALDTELQKLRCRVNYHAVRYTESINRMGQLLVDRMRKKAKHFVALHLRFEPDMLAFSGCYYGGGQKERLELGAMRRRWKTLHAANPEKVRRHGRCPLTPEEIGLMLRGLGFGKEVHLYVASGEVYGGEDTLAPLRALFPNLHTKETLTSKKELAPFANFSSRMAALDFIVCDKSDAFVTNNNGNMARILAGRRRYLGHKVTIRPNAKKLYEIFKNRHNMTWGEFSSKVRRYQTGFMGEPDEMKPGEGEFHENPASCICRTSEARVKEKAKHVNEDDSSEYSEIGNVPISSRSDLDHSQFDEVIF

SEQ ID NO: 79938 - protein, 341 aa, Arabidopsis thaliana
  peptide (1)..(341): Ceres Seq. ID no. 12653797
  misc_feature (1)..(261): Pfam Name: Plant protein family Pfam Description: Plant protein family
  misc_feature (1)..(341): Homolog of NCBI NO: 15233840 NR Description: putative growth regulator protein; protein id: [Arabidopsis thaliana] >gi|7488119|pir||T05667 probable growth
  misc_feature (1)..(331): Homolog of NCBI NO: 322752 NR Description: auxin-independent growth promoter - common
  misc_feature (1)..(337): Homolog of NCBI NO: 8886957 NR Description: F2D10.3 [Arabidopsis thaliana]
  misc_feature (1)..(303): Homolog of NCBI NO: 25406439 NR Description: hypothetical protein F15M4.23 [imported] -
  misc_feature (1)..(303): Homolog of NCBI NO: 18411065 NR Description: putative auxin-independent growth promoter; id: At1g76270.1, supported by cDNA: gi_15292904 [Arabidopsis
  misc_feature (1)..(337): Homolog of NCBI NO: 8778600 NR Description: F5M15.13 [Arabidopsis thaliana]
  misc_feature (1)..(335): Homolog of NCBI NO: 38345930 NR Description: OSJNBb0078D11.5 [Oryza sativa (japonica
  misc_feature (56)..(337): Homolog of NCBI NO: 30686880 NR Description: axi 1 protein -related [Arabidopsis thaliana]
  misc_feature (1)..(47): Homolog of NCBI NO: 30686880 NR Description: axi 1 protein -related [Arabidopsis thaliana]
  misc_feature (1)..(303): Homolog of NCBI NO: 6573718 NR Description: T23E18.20 [Arabidopsis thaliana]
MRVPRKCTPSCYLQRVLPILTKKHVVQLSKFDYRLSNALDTELQKLRCRVNYHAVRYTESINRMGQLLVDRMRKKAKHFVALHLRFEPDMLAFSGCYYGGGQKERLELGAMRRRWKTLHAANPEKVRRHGRCPLTPEEIGLMLRGLGFGKEVHLYVASGEVYGGEDTLAPLRALFPNLHTKETLTSKKELAPFANFSSRMAALDFIVCDKSDAFVTNNNGNMARILAGRRRYLGHKVTIRPNAKKLYEIFKNRHNMTWGEFSSKVRRYQTGFMGEPDEMKPGEGEFHENPASCICRTSEARVKEKAKHVNEDDSSEYSEIGNVPISSRSDLDHSQFDEVIF

SEQ ID NO: 79939 - protein, 278 aa, Arabidopsis thaliana
  peptide (1)..(278): Ceres Seq. ID no. 12653798
  misc_feature (1)..(198): Pfam Name: Plant protein family Pfam Description: Plant protein family
  misc_feature (1)..(278): Homolog of NCBI NO: 15233840 NR Description: putative growth regulator protein; protein id: [Arabidopsis thaliana] >gi|7488119|pir||T05667 probable growth
  misc_feature (1)..(268): Homolog of NCBI NO: 322752 NR Description: auxin-independent growth promoter - common
  misc_feature (1)..(274): Homolog of NCBI NO: 8886957 NR Description: F2D10.3 [Arabidopsis thaliana]
  misc_feature (1)..(240): Homolog of NCBI NO: 25406439 NR Description: hypothetical protein F15M4.23 [imported] -
  misc_feature (1)..(240): Homolog of NCBI NO: 18411065 NR Description: putative auxin-independent growth promoter; id: At1g76270.1, supported by cDNA: gi_15292904 [Arabidopsis
  misc_feature (1)..(274): Homolog of NCBI NO: 8778600 NR Description: F5M15.13 [Arabidopsis thaliana]
  misc_feature (1)..(272): Homolog of NCBI NO: 38345930 NR Description: OSJNBb0078D11.5 [Oryza sativa (japonica
  misc_feature (1)..(274): Homolog of NCBI NO: 30686880 NR Description: axi 1 protein -related [Arabidopsis thaliana]
  misc_feature (1)..(240): Homolog of NCBI NO: 6573718 NR Description: T23E18.20 [Arabidopsis thaliana]
  misc_feature (1)..(233): Homolog of NCBI NO: 38345464 NR Description: OSJNBa0010H02.2 [Oryza sativa (japonica
MGQLLVDRMRKKAKHFVALHLRFEPDMLAFSGCYYGGGQKERLELGAMRRRWKTLHAANPEKVRRHGRCPLTPEEIGLMLRGLGFGKEVHLYVASGEVYGGEDTLAPLRALFPNLHTKETLTSKKELAPFANFSSRMAALDFIVCDKSDAFVTNNNGNMARILAGRRRYLGHKVTIRPNAKKLYEIFKNRHNMTWGEFSSKVRRYQTGFMGEPDEMKPGEGEFHENPASCICRTSEARVKEKAKHVNEDDSSEYSEIGNVPISSRSDLDHSQFDEVIF

SEQ ID NO: 79940 - DNA, 1728 bp, Arabidopsis thaliana
  misc_feature (1)..(1728): Ceres Seq. ID no. 12653811
  misc_feature: MA Experiment ID: 20000328 Result: Down-regulated in Transcription
  misc_feature: MA Experiment 20000328 PARAMETER Experiment Name: At_42deg_Heat_Sub_P Parameter: Age (day) Value: 14
  misc_feature: MA Experiment 20000328 PARAMETER Experiment Name: At_42deg_Heat_Sub_P Parameter: Organism Value: A. thaliana
  misc_feature: MA Experiment 20000328 PARAMETER Experiment Name: At_42deg_Heat_Sub_P Parameter: Plant Line Value: WS
  misc_feature: MA Experiment 20000328 PARAMETER Experiment Name: At_42deg_Heat_Sub_P Parameter: Temperature (deg C) Value: 42 vs. 22
  misc_feature: MA Experiment 20000328 PARAMETER Experiment Name: At_42deg_Heat_Sub_P Parameter: Timepoint (hr) Value: 6
  misc_feature: MA Experiment 20000328 PARAMETER Experiment Name: At_42deg_Heat_Sub_P Parameter: Tissue Value: Aerial
  misc_feature: MA Experiment ID: 20000329 Result: Down-regulated in Transcription
  misc_feature: MA Experiment 20000329 PARAMETER Experiment Name: At_4deg_Cold_Sub_P Parameter: Age (day) Value: 14
  misc_feature: MA Experiment 20000329 PARAMETER Experiment Name: At_4deg_Cold_Sub_P Parameter: Organism Value: A. thaliana
  misc_feature: MA Experiment 20000329 PARAMETER Experiment Name: At_4deg_Cold_Sub_P Parameter: Plant Line Value: WS
  misc_feature: MA Experiment 20000329 PARAMETER Experiment Name: At_4deg_Cold_Sub_P Parameter: Temperature (deg C) Value: 4 vs. 22
  misc_feature: MA Experiment 20000329 PARAMETER Experiment Name: At_4deg_Cold_Sub_P Parameter: Timepoint (hr) Value: 6
  misc_feature: MA Experiment 20000329 PARAMETER Experiment Name: At_4deg_Cold_Sub_P Parameter: Tissue Value: Aerial
  misc_feature: MA Experiment ID: 20000355 Result: Down-regulated in Transcription
  misc_feature: MA Experiment 20000355 PARAMETER Experiment Name: At_Siliques_Sub_P Parameter: Age (day) Value: 21
  misc_feature: MA Experiment 20000355 PARAMETER Experiment Name: At_Siliques_Sub_P Parameter: Organism Value: A. thaliana
  misc_feature: MA Experiment 20000355 PARAMETER Experiment Name: At_Siliques_Sub_P Parameter: Plant Line Value: WS
  misc_feature: MA Experiment 20000355 PARAMETER Experiment Name: At_Siliques_Sub_P Parameter: Tissue Value: Less Than 5mm Siliques vs. Whole Plant
  misc_feature: MA Experiment ID: 20001807 Result: Up-regulated in Transcription
  misc_feature: MA Experiment 20001807 PARAMETER Experiment Name: At_50mM_NH4NO3_L-to-H_Sub_P Parameter: Timepoint (hr) Value: 6
  misc_feature: MA Experiment 20001807 PARAMETER Experiment Name: At_50mM_NH4NO3_L-to-H_Sub_P Parameter: Tissue Value: Leaf
  misc_feature: MA Experiment 20001807 PARAMETER Experiment Name: At_50mM_NH4NO3_L-to-H_Sub_P Parameter: Treatment Value: 50mM NH4NO3 vs 100mM Mannitol
atggtgatggaggacaacgagagttgcgctagtagagttattttcgacgccttacctacctcccaggccactatggaccgccgtgagcgcatcaaaatggaggtcttcgatgaggttctccgccgtctccgtcaatcggacattgaagacgcccatctccctggtttcgaagacgacctctggaatcacttcaatcgcctccctgccaggtatgctttggatgtgaatgtggagagggctgaagacgtcttgatgcacaagcgattgctgcattctgcttacgatccccagaatcggcctgctatcgaagttcatctcgtccaggttcaacctgccgggatctctgctgacttggactctacttctaatgatgctggtcattcttctcctacccgaaaaagcattcatccgccgcctgcctttggttcatcccctaatcttgaagcacttgcacttgcagctagtttatcccaagacgaggatgcagacaactctgttcataacaattcactctattcacggcccttgcatgagataaccttttccacagaagacaagcctaaactcctttttcagttaactgccttgcttgctgagcttgggctgaacattcaagaggcacatgctttctctacaactgatggctactcactagatgtttttgttgttgatggctggccgtacgaggaaacagagagacttaggatatcattggagaaagaagcagcaaagatcgagttgcagagccaaagctggcctatgcagcaatccttctctccggaaaaggaaaatgggcaaacaggtgccagaacgcatgttccaatacccaatgacggaactgatgtttgggaaatcaaccttaaacacctaaaatttgggcataaaatagcgtctggttcttatggagatctgtataaaggtacatactgtagccaggaagttgctatcaaagtcctaaagccagagcgtctagactcagatctagagaaagagtttgcccaagaagtctttattatgaggaaagttagacacaaaaatgttgttcagttcattggtgcttgcaccaagcctccacatctgtgtatcgttacagaattcatgcccggtggaagtgtatatgactatctacacaagcaaaagggcgtctttaagcttccaactttgtttaaagtagctatagatatttgcaaagggatgagctacttacaccaaaataacataattcacagagatttgaaggctgccaacctcttaatggacgaaaatgaggtggttaaggttgcagactttggggtggctagagtgaaagcacaaactggagttatgacagctgaaactggaacatatcgctggatggctccagaggtgatagaacacaagccatatgatcacaaggctgacgtattcagctacgggattgtgctatgggagttgttgactgggaagcttccatatgaatacatgacgccgttgcaggcagcagtaggggttgtccaaaagggattaaggccaacaataccaaagaacacgcatccgaaattggcagagctattggagagattgtgggagcatgattcgacgcagagaccagacttctcagagatcatagagcagcttcaagagatagccaaggaggtaggagaagagggagaggagaagaaaaagtcgtcaacaggactaggagggggtatatttgcagccctgaggagaagcaccacacatcattga

SEQ ID NO: 79941 - protein, 575 aa, Arabidopsis thaliana
  peptide (1)..(575): Ceres Seq. ID no. 12653812
  misc_feature (290)..(539): Pfam Name: Protein kinase domain Pfam Description: Protein kinase domain
  misc_feature (1)..(575): Homolog of NCBI NO: 18420244 NR Description: protein kinase like protein; protein id:
  misc_feature (305)..(482): Homolog of NCBI NO: 7485889 NR Description: hypothetical protein F20M13.30 - Arabidopsis >gi|4467134|emb|CAB37503.1| protein kinase like protein thaliana] >gi|7270830|emb|CAB80511.1| protein kinase like protein
  misc_feature (107)..(247): Homolog of NCBI NO: 7485889 NR Description: hypothetical protein F20M13.30 - Arabidopsis >gi|4467134|emb|CAB37503.1| protein kinase like protein thaliana] >gi|7270830|emb|CAB80511.1| protein kinase like protein
  misc_feature (1)..(108): Homolog of NCBI NO: 7485889 NR Description: hypothetical protein F20M13.30 - Arabidopsis >gi|4467134|emb|CAB37503.1| protein kinase like protein thaliana] >gi|7270830|emb|CAB80511.1| protein kinase like protein
  misc_feature (4)..(570): Homolog of NCBI NO: 22329194 NR Description: putative protein; protein id: At4g35780.1, by cDNA: gi_20260235 [Arabidopsis thaliana] putative protein [Arabidopsis thaliana]
  misc_feature (2)..(546): Homolog of NCBI NO: 15227883 NR Description: putative protein kinase; protein id: At2g17700.1, by cDNA: gi_17979170, supported by cDNA: gi_20465914 [Arabidopsis >gi|25411811|pir||D84555 probable protein kinase putative protein
  misc_feature (4)..(555): Homolog of NCBI NO: 7486654 NR Description: hypothetical protein F8D20.290 - Arabidopsis >gi|3367596|emb|CAA20048.1| putative protein [Arabidopsis >gi|7270530|emb|CAB81487.1| putative protein [Arabidopsis
  misc_feature (466)..(575): Homolog of NCBI NO: 7485889 NR Description: hypothetical protein F20M13.30 - Arabidopsis >gi|4467134|emb|CAB37503.1| protein kinase like protein thaliana] >gi|7270830|emb|CAB80511.1| protein kinase like protein
  misc_feature (4)..(378): Homolog of NCBI NO: 7486398 NR Description: hypothetical protein F4B14.50 - Arabidopsis
  misc_feature (391)..(482): Homolog of NCBI NO: 7486398 NR Description: hypothetical protein F4B14.50 - Arabidopsis
MVMEDNESCASRVIFDALPTSQATMDRRERIKMEVFDEVLRRLRQSDIEDAHLPGFEDDLWNHFNRLPARYALDVNVERAEDVLMHKRLLHSAYDPQNRPAIEVHLVQVQPAGISADLDSTSNDAGHSSPTRKSIHPPPAFGSSPNLEALALAASLSQDEDADNSVHNNSLYSRPLHEITFSTEDKPKLLFQLTALLAELGLNIQEAHAFSTTDGYSLDVFVVDGWPYEETERLRISLEKEAAKIELQSQSWPMQQSFSPEKENGQTGARTHVPIPNDGTDVWEINLKHLKFGHKIASGSYGDLYKGTYCSQEVAIKVLKPERLDSDLEKEFAQEVFIMRKVRHKNVVQFIGACTKPPHLCIVTEFMPGGSVYDYLHKQKGVFKLPTLFKVAIDICKGMSYLHQNNIIHRDLKAANLLMDENEVVKVADFGVARVKAQTGVMTAETGTYRWMAPEVIEHKPYDHKADVFSYGIVLWELLTGKLPYEYMTPLQAAVGVVQKGLRPTIPKNTHPKLAELLERLWEHDSTQRPDFSEIIEQLQEIAKEVGEEGEEKKKSSTGLGGGIFAALRRSTTHH

SEQ ID NO: 79942 - protein, 573 aa, Arabidopsis thaliana
  peptide (1)..(573): Ceres Seq. ID no. 12653813
  misc_feature (288)..(537): Pfam Name: Protein kinase domain Pfam Description: Protein kinase domain
  misc_feature (1)..(573): Homolog of NCBI NO: 18420244 NR Description: protein kinase like protein; protein id:
  misc_feature (303)..(480): Homolog of NCBI NO: 7485889 NR Description: hypothetical protein F20M13.30 - Arabidopsis >gi|4467134|emb|CAB37503.1| protein kinase like protein thaliana] >gi|7270830|emb|CAB80511.1| protein kinase like protein
  misc_feature (105)..(245): Homolog of NCBI NO: 7485889 NR Description: hypothetical protein F20M13.30 - Arabidopsis >gi|4467134|emb|CAB37503.1| protein kinase like protein thaliana] >gi|7270830|emb|CAB80511.1| protein kinase like protein
  misc_feature (1)..(106): Homolog of NCBI NO: 7485889 NR Description: hypothetical protein F20M13.30 - Arabidopsis >gi|4467134|emb|CAB37503.1| protein kinase like protein thaliana] >gi|7270830|emb|CAB80511.1| protein kinase like protein
  misc_feature (2)..(568): Homolog of NCBI NO: 22329194 NR Description: putative protein; protein id: At4g35780.1, by cDNA: gi_20260235 [Arabidopsis thaliana] putative protein [Arabidopsis thaliana]
  misc_feature (1)..(544): Homolog of NCBI NO: 15227883 NR Description: putative protein kinase; protein id: At2g17700.1, by cDNA: gi_17979170, supported by cDNA: gi_20465914 [Arabidopsis >gi|25411811|pir||D84555 probable protein kinase putative protein
  misc_feature (2)..(553): Homolog of NCBI NO: 7486654 NR Description: hypothetical protein F8D20.290 - Arabidopsis >gi|3367596|emb|CAA20048.1| putative protein [Arabidopsis >gi|7270530|emb|CAB81487.1| putative protein [Arabidopsis
  misc_feature (464)..(573): Homolog of NCBI NO: 7485889 NR Description: hypothetical protein F20M13.30 - Arabidopsis >gi|4467134|emb|CAB37503.1| protein kinase like protein thaliana] >gi|7270830|emb|CAB80511.1| protein kinase like protein
  misc_feature (2)..(376): Homolog of NCBI NO: 7486398 NR Description: hypothetical protein F4B14.50 - Arabidopsis
  misc_feature (389)..(480): Homolog of NCBI NO: 7486398 NR Description: hypothetical protein F4B14.50 - Arabidopsis
MEDNESCASRVIFDALPTSQATMDRRERIKMEVFDEVLRRLRQSDIEDAHLPGFEDDLWNHFNRLPARYALDVNVERAEDVLMHKRLLHSAYDPQNRPAIEVHLVQVQPAGISADLDSTSNDAGHSSPTRKSIHPPPAFGSSPNLEALALAASLSQDEDADNSVHNNSLYSRPLHEITFSTEDKPKLLFQLTALLAELGLNIQEAHAFSTTDGYSLDVFVVDGWPYEETERLRISLEKEAAKIELQSQSWPMQQSFSPEKENGQTGARTHVPIPNDGTDVWEINLKHLKFGHKIASGSYGDLYKGTYCSQEVAIKVLKPERLDSDLEKEFAQEVFIMRKVRHKNVVQFIGACTKPPHLCIVTEFMPGGSVYDYLHKQKGVFKLPTLFKVAIDICKGMSYLHQNNIIHRDLKAANLLMDENEVVKVADFGVARVKAQTGVMTAETGTYRWMAPEVIEHKPYDHKADVFSYGIVLWELLTGKLPYEYMTPLQAAVGVVQKGLRPTIPKNTHPKLAELLERLWEHDSTQRPDFSEIIEQLQEIAKEVGEEGEEKKKSSTGLGGGIFAALRRSTTHH

SEQ ID NO: 79943 - protein, 551 aa, Arabidopsis thaliana
  peptide (1)..(551): Ceres Seq. ID no. 12653814
  misc_feature (266)..(515): Pfam Name: Protein kinase domain Pfam Description: Protein kinase domain
  misc_feature (1)..(551): Homolog of NCBI NO: 18420244 NR Description: protein kinase like protein; protein id:
  misc_feature (281)..(458): Homolog of NCBI NO: 7485889 NR Description: hypothetical protein F20M13.30 - Arabidopsis >gi|4467134|emb|CAB37503.1| protein kinase like protein thaliana] >gi|7270830|emb|CAB80511.1| protein kinase like protein
  misc_feature (83)..(223): Homolog of NCBI NO: 7485889 NR Description: hypothetical protein F20M13.30 - Arabidopsis >gi|4467134|emb|CAB37503.1| protein kinase like protein thaliana] >gi|7270830|emb|CAB80511.1| protein kinase like protein
  misc_feature (1)..(84): Homolog of NCBI NO: 7485889 NR Description: hypothetical protein F20M13.30 - Arabidopsis >gi|4467134|emb|CAB37503.1| protein kinase like protein thaliana] >gi|7270830|emb|CAB80511.1| protein kinase like protein
  misc_feature (1)..(546): Homolog of NCBI NO: 22329194 NR Description: putative protein; protein id: At4g35780.1, by cDNA: gi_20260235 [Arabidopsis thaliana] putative protein [Arabidopsis thaliana]
  misc_feature (1)..(522): Homolog of NCBI NO: 15227883 NR Description: putative protein kinase; protein id: At2g17700.1, by cDNA: gi_17979170, supported by cDNA: gi_20465914 [Arabidopsis >gi|25411811|pir||D84555 probable protein kinase putative protein
  misc_feature (1)..(531): Homolog of NCBI NO: 7486654 NR Description: hypothetical protein F8D20.290 - Arabidopsis >gi|3367596|emb|CAA20048.1| putative protein [Arabidopsis >gi|7270530|emb|CAB81487.1| putative protein [Arabidopsis
  misc_feature (442)..(551): Homolog of NCBI NO: 7485889 NR Description: hypothetical protein F20M13.30 - Arabidopsis >gi|4467134|emb|CAB37503.1| protein kinase like protein thaliana] >gi|7270830|emb|CAB80511.1| protein kinase like protein
  misc_feature (1)..(354): Homolog of NCBI NO: 7486398 NR Description: hypothetical protein F4B14.50 - Arabidopsis
  misc_feature (367)..(458): Homolog of NCBI NO: 7486398 NR Description: hypothetical protein F4B14.50 - Arabidopsis
MDRRERIKMEVFDEVLRRLRQSDIEDAHLPGFEDDLWNHFNRLPARYALDVNVERAEDVLMHKRLLHSAYDPQNRPAIEVHLVQVQPAGISADLDSTSNDAGHSSPTRKSIHPPPAFGSSPNLEALALAASLSQDEDADNSVHNNSLYSRPLHEITFSTEDKPKLLFQLTALLAELGLNIQEAHAFSTTDGYSLDVFVVDGWPYEETERLRISLEKEAAKIELQSQSWPMQQSFSPEKENGQTGARTHVPIPNDGTDVWEINLKHLKFGHKIASGSYGDLYKGTYCSQEVAIKVLKPERLDSDLEKEFAQEVFIMRKVRHKNVVQFIGACTKPPHLCIVTEFMPGGSVYDYLHKQKGVFKLPTLFKVAIDICKGMSYLHQNNIIHRDLKAANLLMDENEVVKVADFGVARVKAQTGVMTAETGTYRWMAPEVIEHKPYDHKADVFSYGIVLWELLTGKLPYEYMTPLQAAVGVVQKGLRPTIPKNTHPKLAELLERLWEHDSTQRPDFSEIIEQLQEIAKEVGEEGEEKKKSSTGLGGGIFAALRRSTTHH

SEQ ID NO: 79944 - DNA, 2967 bp, Arabidopsis thaliana
  misc_feature (1)..(2967): Ceres Seq. ID no. 12653831
  misc_feature: MA Experiment ID: 20000179 Result: Down-regulated in Transcription
  misc_feature: MA Experiment 20000179 PARAMETER Experiment Name: At_Germinating_Seeds_P Parameter: Age (hr) Value: 6 vs. 0
  misc_feature: MA Experiment 20000179 PARAMETER Experiment Name: At_Germinating_Seeds_P Parameter: Tissue Value: Germinating Seeds
  misc_feature: MA Experiment ID: 20000180 Result: Down-regulated in Transcription
  misc_feature: MA Experiment 20000180 PARAMETER Experiment Name: At_Germinating_Seeds_P Parameter: Age (hr) Value: 24 vs. 0
  misc_feature: MA Experiment 20000180 PARAMETER Experiment Name: At_Germinating_Seeds_P Parameter: Tissue Value: Germinating Seeds
atgtggcccagtatcattgacaaagctagaattgggggacttaacaccatccaaacttatgttttctggaatgtccatgagcctgaacaaggcaagtatgatttcaaggggagatttgacttggtgaaattcatcaaactaatccacgagaaaggtctctatgtcactctcagactcggaccctttatccaagccgaatggaaccacggagggttgccgtactggctacgcgaggtcccagatgtttacttccgtacaaataatgaaccttttaaggaacatacagagagatatgtgaggaaaatacttgggatgatgaaggaagagaagctgttcgcttcacaaggaggtcccatcatcttgggacagatagagaatgagtacaacgcggttcagctagcctacaaggagaatggagagaagtatataaaatgggcagcaaatttggtggagtcaatgaatctgggaatcccctgggttatgtgcaaacaaaacgatgctcctggcaatctgattaatgcttgtaatggaaggcattgcggagatactttcccaggaccaaacagacacgataagccctccttatggaccgagaattggactactcagtttcgagtttttggggatcctccaacacagagaacagtcgaagatattgcattctcagtcgctagatacttctctaagaacggatcccatgtcaactactacatgtaccatggcggaacaaacttcggacgcacgtctgctcatttcgttaccactcgttactatgacgatgcgccacttgacgaatttggtttggagaaagctccaaaatacggtcacctaaaacatgtgcacagagcacttagattgtgcaagaaggcacttttttggggtcaacttcgcgcccagacacttggtcccgataccgaggttaggtactacgagcagccagggacaaaagtgtgtgcggctttcttatcgaacaataacacaagagatactaatacgattaaattcaaaggtcaagattacgttttaccgtctcgttctatcagcatcttaccggattgtaaaacagtcgtttacaatactgcacagattgtagcccaacacagttggagagattttgtcaagtcagagaagacaagcaaaggtctcaaatttgagatgtttagtgaaaatattccttccttacttgacggtgattctttgattccgggggagctttattacttaactaaagacaaaacagattatgcttggtataccacaagcgtaaagattgacgaagatgactttccagaccaaaaaggtctgaagactatactgagagtagcgagtcttggtcacgcactgatcgtttacgttaacggagagtacgcagggaaagcacatggacgccatgaaatgaagagtttcgagtttgcaaaaccagtgaactttaaaaccggagataatcgcatttcaattttgggtgtactaaccggattaccagacagtggatcatacatggaacacaggtttgctggtccacgtgctatttcaatcatcggtttaaagtcaggaacgcgagatttgaccgagaacaatgaatggggacacttggccggtttggaaggtgaaaagaaagaggtgtacacagaggaaggatctaagaaggtgaaatgggagaaagatggtaaacgtaagcctcttacgtggtacaagacctactttgagacaccagagggagtgaacgcggtcgcgattaggatgaaagcaatggggaagggattgatttgggttaatggaattggcgtagggagatattggatgtctttcctttctccactgggagagccaactcaaacggagtaccatataccgagatctttcatgaagggggagaagaagaagaacatgctggtgattctcgaggaagaaccaggggtgaagttagagtctattgatttcgtgttggtgaatagagacacaatctgtagtaatgtcggggaggattacccagtatcggtgaaatcgtggaagagagaagggccaaagatagtttcgagaagcaaagatatgaggctaaaggcagtgatgaggtgtccaccggagaaacaaatggtggaagtacaatttgcaagcttcggagatccgacaggaacttgtggtaacttcacaatggggaagtgctctgcatctaagtcaaaggaggtggtcgagaaggagtgtttgggtaggaattattgttccatagtagtagcgagggagacttttggggacaaagggtgtccggagatagtgaagacattggcagtgcaagtcaagtgtgagaagaaagaaggaaaacaagatgagaagaagaagaaagaagataaagacgaagaggaagaggacgatgaagatgatgatgaagaagaagaagaagaagacaaagagaacaaagatacaaaggatatggagaacaaaaatcaagatattcttgattccgattctgccctggtgtcggatctaggttttggccctttctctacggtagttgttaatgtccctctaatcggtggagcggctccgcctcagccccgcttcaatttaatgcctccgtcaaactatgtcgctggtttgggtcgtggggctgcagggtttactacccgctccgatattggtcctgctcgtgctaatggcgatggaaacgctgacgtgaatcacaagtttgatgattttgaagggcatgatgccggattgttcgctaatgccgagagtgatgaccaagacaaagaggctgatgctatttgggacgcaattgataggaggatggattcgaggaggaaagacagaagagaagcgaagctcaagcaagaaatcgagaattacagagcctccaaccctaaagtttctgggcagtttgtggatttgacgagaaagttgcatactttgtctgaggatgaatgggatagtattccagagattgggaattactcgcatagattgtattag

SEQ ID NO: 79945 - protein, 988 aa, Arabidopsis thaliana
  peptide (1)..(988): Ceres Seq. ID no. 12653832
  misc_feature (690)..(767): Pfam Name: Galactose binding lectin domain Pfam Description: Galactose binding lectin domain
  misc_feature (1)..(770): Homolog of NCBI NO: 25326168 NR Description: probable beta-galactosidase [imported] -
  misc_feature (1)..(770): Homolog of NCBI NO: 30679742 NR Description: glycosyl hydrolase family 35 (beta-galactosidase)
  misc_feature (1)..(775): Homolog of NCBI NO: 18418558 NR Description: glycosyl hydrolase family 35 protein id: At4g35010.1 [Arabidopsis thaliana]
  misc_feature (123)..(775): Homolog of NCBI NO: 7484826 NR Description: beta-galactosidase homolog M4E13.70 - Arabidopsis
  misc_feature (1)..(89): Homolog of NCBI NO: 7484826 NR Description: beta-galactosidase homolog M4E13.70 - Arabidopsis
  misc_feature (1)..(654): Homolog of NCBI NO: 10862896 NR Description: putative beta-galactosidase [Nicotiana tabacum]
  misc_feature (1)..(767): Homolog of NCBI NO: 30699255 NR Description: glycosyl hydrolase family 35 (beta-galactosidase)
  misc_feature (1)..(750): Homolog of NCBI NO: 26451843 NR Description: unknown protein [Arabidopsis thaliana]
  misc_feature (1)..(603): Homolog of NCBI NO: 15081596 NR Description: putative beta-galactosidase BG1 [Vitis vinifera]
  misc_feature (558)..(767): Homolog of NCBI NO: 15081596 NR Description: putative beta-galactosidase BG1 [Vitis vinifera]
MWPSIIDKARIGGLNTIQTYVFWNVHEPEQGKYDFKGRFDLVKFIKLIHEKGLYVTLRLGPFIQAEWNHGGLPYWLREVPDVYFRTNNEPFKEHTERYVRKILGMMKEEKLFASQGGPIILGQIENEYNAVQLAYKENGEKYIKWAANLVESMNLGIPWVMCKQNDAPGNLINACNGRHCGDTFPGPNRHDKPSLWTENWTTQFRVFGDPPTQRTVEDIAFSVARYFSKNGSHVNYYMYHGGTNFGRTSAHFVTTRYYDDAPLDEFGLEKAPKYGHLKHVHRALRLCKKALFWGQLRAQTLGPDTEVRYYEQPGTKVCAAFLSNNNTRDTNTIKFKGQDYVLPSRSISILPDCKTVVYNTAQIVAQHSWRDFVKSEKTSKGLKFEMFSENIPSLLDGDSLIPGELYYLTKDKTDYAWYTTSVKIDEDDFPDQKGLKTILRVASLGHALIVYVNGEYAGKAHGRHEMKSFEFAKPVNFKTGDNRISILGVLTGLPDSGSYMEHRFAGPRAISIIGLKSGTRDLTENNEWGHLAGLEGEKKEVYTEEGSKKVKWEKDGKRKPLTWYKTYFETPEGVNAVAIRMKAMGKGLIWVNGIGVGRYWMSFLSPLGEPTQTEYHIPRSFMKGEKKKNMLVILEEEPGVKLESIDFVLVNRDTICSNVGEDYPVSVKSWKREGPKIVSRSKDMRLKAVMRCPPEKQMVEVQFASFGDPTGTCGNFTMGKCSASKSKEVVEKECLGRNYCSIVVARETFGDKGCPEIVKTLAVQVKCEKKEGKQDEKKKKEDKDEEEEDDEDDDEEEEEEDKENKDTKDMENKNQDILDSDSALVSDLGFGPFSTVVVNVPLIGGAAPPQPRFNLMPPSNYVAGLGRGAAGFTTRSDIGPARANGDGNADVNHKFDDFEGHDAGLFANAESDDQDKEADAIWDAIDRRMDSRRKDRREAKLKQEIENYRASNPKVSGQFVDLTRKLHTLSEDEWDSIPEIGNYSHRLY

SEQ ID NO: 79946 - protein, 884 aa, Arabidopsis thaliana
  peptide (1)..(884): Ceres Seq. ID no. 12653833
  misc_feature (586)..(663): Pfam Name: Galactose binding lectin domain Pfam Description: Galactose binding lectin domain
  misc_feature (1)..(666): Homolog of NCBI NO: 25326168 NR Description: probable beta-galactosidase [imported] -
  misc_feature (1)..(666): Homolog of NCBI NO: 30679742 NR Description: glycosyl hydrolase family 35 (beta-galactosidase)
  misc_feature (1)..(671): Homolog of NCBI NO: 18418558 NR Description: glycosyl hydrolase family 35 protein id: At4g35010.1 [Arabidopsis thaliana]
  misc_feature (19)..(671): Homolog of NCBI NO: 7484826 NR Description: beta-galactosidase homolog M4E13.70 - Arabidopsis
  misc_feature (1)..(550): Homolog of NCBI NO: 10862896 NR Description: putative beta-galactosidase [Nicotiana tabacum]
  misc_feature (1)..(663): Homolog of NCBI NO: 30699255 NR Description: glycosyl hydrolase family 35 (beta-galactosidase)
  misc_feature (1)..(646): Homolog of NCBI NO: 26451843 NR Description: unknown protein [Arabidopsis thaliana]
  misc_feature (1)..(499): Homolog of NCBI NO: 15081596 NR Description: putative beta-galactosidase BG1 [Vitis vinifera]
  misc_feature (454)..(663): Homolog of NCBI NO: 15081596 NR Description: putative beta-galactosidase BG1 [Vitis vinifera]
  misc_feature (1)..(496): Homolog of NCBI NO: 7939621 NR Description: beta-galactosidase [Lycopersicon esculentum]
MMKEEKLFASQGGPIILGQIENEYNAVQLAYKENGEKYIKWAANLVESMNLGIPWVMCKQNDAPGNLINACNGRHCGDTFPGPNRHDKPSLWTENWTTQFRVFGDPPTQRTVEDIAFSVARYFSKNGSHVNYYMYHGGTNFGRTSAHFVTTRYYDDAPLDEFGLEKAPKYGHLKHVHRALRLCKKALFWGQLRAQTLGPDTEVRYYEQPGTKVCAAFLSNNNTRDTNTIKFKGQDYVLPSRSISILPDCKTVVYNTAQIVAQHSWRDFVKSEKTSKGLKFEMFSENIPSLLDGDSLIPGELYYLTKDKTDYAWYTTSVKIDEDDFPDQKGLKTILRVASLGHALIVYVNGEYAGKAHGRHEMKSFEFAKPVNFKTGDNRISILGVLTGLPDSGSYMEHRFAGPRAISIIGLKSGTRDLTENNEWGHLAGLEGEKKEVYTEEGSKKVKWEKDGKRKPLTWYKTYFETPEGVNAVAIRMKAMGKGLIWVNGIGVGRYWMSFLSPLGEPTQTEYHIPRSFMKGEKKKNMLVILEEEPGVKLESIDFVLVNRDTICSNVGEDYPVSVKSWKREGPKIVSRSKDMRLKAVMRCPPEKQMVEVQFASFGDPTGTCGNFTMGKCSASKSKEVVEKECLGRNYCSIVVARETFGDKGCPEIVKTLAVQVKCEKKEGKQDEKKKKEDKDEEEEDDEDDDEEEEEEDKENKDTKDMENKNQDILDSDSALVSDLGFGPFSTVVVNVPLIGGAAPPQPRFNLMPPSNYVAGLGRGAAGFTTRSDIGPARANGDGNADVNHKFDDFEGHDAGLFANAESDDQDKEADAIWDAIDRRMDSRRKDRREAKLKQEIENYRASNPKVSGQFVDLTRKLHTLSEDEWDSIPEIGNYSHRLY

SEQ ID NO: 79947 - protein, 883 aa, Arabidopsis thaliana
  peptide (1)..(883): Ceres Seq. ID no. 12653834
  misc_feature (585)..(662): Pfam Name: Galactose binding lectin domain Pfam Description: Galactose binding lectin domain
  misc_feature (1)..(665): Homolog of NCBI NO: 25326168 NR Description: probable beta-galactosidase [imported] -
  misc_feature (1)..(665): Homolog of NCBI NO: 30679742 NR Description: glycosyl hydrolase family 35 (beta-galactosidase)
  misc_feature (1)..(670): Homolog of NCBI NO: 18418558 NR Description: glycosyl hydrolase family 35 protein id: At4g35010.1 [Arabidopsis thaliana]
  misc_feature (18)..(670): Homolog of NCBI NO: 7484826 NR Description: beta-galactosidase homolog M4E13.70 - Arabidopsis
  misc_feature (1)..(549): Homolog of NCBI NO: 10862896 NR Description: putative beta-galactosidase [Nicotiana tabacum]
  misc_feature (1)..(662): Homolog of NCBI NO: 30699255 NR Description: glycosyl hydrolase family 35 (beta-galactosidase)
  misc_feature (1)..(645): Homolog of NCBI NO: 26451843 NR Description: unknown protein [Arabidopsis thaliana]
  misc_feature (1)..(498): Homolog of NCBI NO: 15081596 NR Description: putative beta-galactosidase BG1 [Vitis vinifera]
  misc_feature (453)..(662): Homolog of NCBI NO: 15081596 NR Description: putative beta-galactosidase BG1 [Vitis vinifera]
  misc_feature (1)..(495): Homolog of NCBI NO: 7939621 NR Description: beta-galactosidase [Lycopersicon esculentum]
MKEEKLFASQGGPIILGQIENEYNAVQLAYKENGEKYIKWAANLVESMNLGIPWVMCKQNDAPGNLINACNGRHCGDTFPGPNRHDKPSLWTENWTTQFRVFGDPPTQRTVEDIAFSVARYFSKNGSHVNYYMYHGGTNFGRTSAHFVTTRYYDDAPLDEFGLEKAPKYGHLKHVHRALRLCKKALFWGQLRAQTLGPDTEVRYYEQPGTKVCAAFLSNNNTRDTNTIKFKGQDYVLPSRSISILPDCKTVVYNTAQIVAQHSWRDFVKSEKTSKGLKFEMFSENIPSLLDGDSLIPGELYYLTKDKTDYAWYTTSVKIDEDDFPDQKGLKTILRVASLGHALIVYVNGEYAGKAHGRHEMKSFEFAKPVNFKTGDNRISILGVLTGLPDSGSYMEHRFAGPRAISIIGLKSGTRDLTENNEWGHLAGLEGEKKEVYTEEGSKKVKWEKDGKRKPLTWYKTYFETPEGVNAVAIRMKAMGKGLIWVNGIGVGRYWMSFLSPLGEPTQTEYHIPRSFMKGEKKKNMLVILEEEPGVKLESIDFVLVNRDTICSNVGEDYPVSVKSWKREGPKIVSRSKDMRLKAVMRCPPEKQMVEVQFASFGDPTGTCGNFTMGKCSASKSKEVVEKECLGRNYCSIVVARETFGDKGCPEIVKTLAVQVKCEKKEGKQDEKKKKEDKDEEEEDDEDDDEEEEEEDKENKDTKDMENKNQDILDSDSALVSDLGFGPFSTVVVNVPLIGGAAPPQPRFNLMPPSNYVAGLGRGAAGFTTRSDIGPARANGDGNADVNHKFDDFEGHDAGLFANAESDDQDKEADAIWDAIDRRMDSRRKDRREAKLKQEIENYRASNPKVSGQFVDLTRKLHTLSEDEWDSIPEIGNYSHRLY

SEQ ID NO: 79948 - DNA, 1302 bp, Arabidopsis thaliana
  misc_feature (1)..(1302): Ceres Seq. ID no. 12653835
  misc_feature: MA Experiment ID: 20000264 Result: Up-regulated in Transcription
  misc_feature: MA Experiment 20000264 PARAMETER Experiment Name: At_Open_Flower_P Parameter: Age (day) Value: 21
  misc_feature: MA Experiment 20000264 PARAMETER Experiment Name: At_Open_Flower_P Parameter: Plant Line Value: WS
  misc_feature: MA Experiment 20000264 PARAMETER Experiment Name: At_Open_Flower_P Parameter: Tissue Value: Open Flower vs. Whole Plant
  misc_feature: MA Experiment ID: 20000265 Result: Up-regulated in Transcription
  misc_feature: MA Experiment 20000265 PARAMETER Experiment Name: At_Open_Flower_P Parameter: Age (day) Value: 21
  misc_feature: MA Experiment 20000265 PARAMETER Experiment Name: At_Open_Flower_P Parameter: Plant Line Value: WS
  misc_feature: MA Experiment 20000265 PARAMETER Experiment Name: At_Open_Flower_P Parameter: Tissue Value: Closed Flower vs. Whole Plant
  misc_feature: MA Experiment ID: 20000286 Result: Up-regulated in Transcription
  misc_feature: MA Experiment 20000286 PARAMETER Experiment Name: At_Open_Flower_P Parameter: Age (day) Value: 21
  misc_feature: MA Experiment 20000286 PARAMETER Experiment Name: At_Open_Flower_P Parameter: Plant Line Value: WS
  misc_feature: MA Experiment 20000286 PARAMETER Experiment Name: At_Open_Flower_P Parameter: Tissue Value: Half Open vs. Whole Plant
  misc_feature: MA Experiment ID: 20000496 Result: Up-regulated in Transcription
  misc_feature: MA Experiment 20000496 PARAMETER Experiment Name: At_Guard_Cells_P Parameter: Harvest Date Value: 7/19/2002
  misc_feature: MA Experiment 20000496 PARAMETER Experiment Name: At_Guard_Cells_P Parameter: Organism Value: Canola
  misc_feature: MA Experiment 20000496 PARAMETER Experiment Name: At_Guard_Cells_P Parameter: Tissue Value: Guard Cells vs. Leaves
  misc_feature: MA Experiment ID: 20000794 Result: Up-regulated in Transcription
  misc_feature: MA Experiment 20000794 PARAMETER Experiment Name: At_Petals_P Parameter: Age (day) Value: 23-25 days
  misc_feature: MA Experiment 20000794 PARAMETER Experiment Name: At_Petals_P Parameter: Plant Line Value: WS
  misc_feature: MA Experiment 20000794 PARAMETER Experiment Name: At_Petals_P Parameter: Tissue Value: Petals vs. Whole plant
  misc_feature: MA Experiment ID: 20001248 Result: Up-regulated in Transcription
  misc_feature: MA Experiment 20001248 PARAMETER Experiment Name: At_Far-red-induction_P Parameter: Age (day) Value: 7
  misc_feature: MA Experiment 20001248 PARAMETER Experiment Name: At_Far-red-induction_P Parameter: Light Value: Far-red vs. White
  misc_feature: MA Experiment 20001248 PARAMETER Experiment Name: At_Far-red-induction_P Parameter: Organism Value: A. thaliana
  misc_feature: MA Experiment 20001248 PARAMETER Experiment Name: At_Far-red-induction_P Parameter: Plant Line Value: Columbia
  misc_feature: MA Experiment 20001248 PARAMETER Experiment Name: At_Far-red-induction_P Parameter: Timepoint (hr) Value: 4
  misc_feature: MA Experiment 20001248 PARAMETER Experiment Name: At_Far-red-induction_P Parameter: Tissue Value: Whole Plant
atggttgctggtctttcctcaaaggaggattccttcttgattctccttacatcagaggacgatggtaagatccaattacaagtgacgagtgcctctcttcagccattcacgcaggagcaatggaggaacaaccaagattacttcataaataccgtaatacacacactaatttctaacgcgagaaaacgagcagtgacaattcacgtgtcaaaagaaaacggagagagcgttgaaggagcagaggtgacagtagagcagatctctaaagacttctccattggatctgccatctccaaaactatccttggaaacattccttaccaagaatggttcgtcaagagattcgacgccacggtattcgagaacgagctgaaatggtacgcgacggagcccgatcaaggcaaactcaactacacattggctgataagatgatgaatttcgtcagagccaacagaatcatcgctcgcggtcacaacatattctgggaggatcccaaatacaatcccgattgggttcgtaatctaaccggcgaagatctccggtcggcggttaaccggcgaatcaagagtctgatgactcggtacagaggagagttcgtgcattgggacgtgagcaacgagatgcttcactttgacttctacgagactcgactggggaagaacgcgtcgtacggattcttcgccgcggctcgtgagattgactcattggcgactctgttcttcaatgatttcaacgtggtggagacttgcagcgacgagaagtcaacggttgacgaatacatcgcgagggtgagggaactccaacggtacgacggcgtaaggatggacggaataggtctcgagggtcacttcacgacgccaaacgtagcgctgatgagagccatcctcgataaactcgctacgctccagctcccaatctggctcaccgagattgatatcagcagcagcctcgaccaccgctctcaggcgatttatttggagcaagtgttacgtgaaggattctcgcacccatcggtaaacggtataatgctatggaccgcacttcacccaaacggctgttaccaaatgtgcctcactgacgataaattccggaaccttccagccggagacgtggtggatcagaagcttctagaatggaagactggtgaagttaaggcgacgacagatgaccatggttcctttagcttcttcggctttttgggagagtatagagttggcatcatgtaccaaggtaagacggttaattcgtctttctcgttatctcaaggccctgagaccaaacatgtgaggcttcaaatctaa

SEQ ID NO: 79949 - protein, 433 aa, Arabidopsis thaliana
  peptide (1)..(433): Ceres Seq. ID no. 12653836
  misc_feature (82)..(376): Pfam Name: Glycosyl hydrolase family 10 Pfam Description: Glycosyl hydrolase family 10
  misc_feature (1)..(433): Homolog of NCBI NO: 15233983 NR Description: glycosyl hydrolase family 10; protein id:
  misc_feature (9)..(433): Homolog of NCBI NO: 28416709 NR Description: At4g38650 [Arabidopsis thaliana]
  misc_feature (60)..(322): Homolog of NCBI NO: 15233783 NR Description: glycosyl hydrolase family 10; protein id:
  misc_feature (4)..(430): Homolog of NCBI NO: 15235131 NR Description: glycosyl hydrolase family 10; protein id:
  misc_feature (20)..(431): Homolog of NCBI NO: 23429644 NR Description: endoxylanase [Carica papaya]
  misc_feature (16)..(421): Homolog of NCBI NO: 15235134 NR Description: glycosyl hydrolase family 10; protein id:
  misc_feature (4)..(421): Homolog of NCBI NO: 7485619 NR Description: hypothetical protein F17I5.30 - Arabidopsis >gi|3297808|emb|CAA19866.1| putative protein [Arabidopsis >gi|7270333|emb|CAB80101.1| putative protein [Arabidopsis
  misc_feature (4)..(421): Homolog of NCBI NO: 30689830 NR Description: glycosyl hydrolase family 10 [Arabidopsis
  misc_feature (19)..(417): Homolog of NCBI NO: 37533262 NR Description: putative 1,4-beta-xylanase [Oryza sativa
  misc_feature (19)..(409): Homolog of NCBI NO: 37533260 NR Description: putative 1,4-beta-xylanase [Oryza sativa
MVAGLSSKEDSFLILLTSEDDGKIQLQVTSASLQPFTQEQWRNNQDYFINTVIHTLISNARKRAVTIHVSKENGESVEGAEVTVEQISKDFSIGSAISKTILGNIPYQEWFVKRFDATVFENELKWYATEPDQGKLNYTLADKMMNFVRANRIIARGHNIFWEDPKYNPDWVRNLTGEDLRSAVNRRIKSLMTRYRGEFVHWDVSNEMLHFDFYETRLGKNASYGFFAAAREIDSLATLFFNDFNVVETCSDEKSTVDEYIARVRELQRYDGVRMDGIGLEGHFTTPNVALMRAILDKLATLQLPIWLTEIDISSSLDHRSQAIYLEQVLREGFSHPSVNGIMLWTALHPNGCYQMCLTDDKFRNLPAGDVVDQKLLEWKTGEVKATTDDHGSFSFFGFLGEYRVGIMYQGKTVNSSFSLSQGPETKHVRLQI

SEQ ID NO: 79950 - protein, 290 aa, Arabidopsis thaliana
  peptide (1)..(290): Ceres Seq. ID no. 12653837
  misc_feature (1)..(233): Pfam Name: Glycosyl hydrolase family 10 Pfam Description: Glycosyl hydrolase family 10
  misc_feature (1)..(290): Homolog of NCBI NO: 15233983 NR Description: glycosyl hydrolase family 10; protein id:
  misc_feature (1)..(290): Homolog of NCBI NO: 28416709 NR Description: At4g38650 [Arabidopsis thaliana]
  misc_feature (1)..(179): Homolog of NCBI NO: 15233783 NR Description: glycosyl hydrolase family 10; protein id:
  misc_feature (1)..(287): Homolog of NCBI NO: 15235131 NR Description: glycosyl hydrolase family 10; protein id:
  misc_feature (1)..(288): Homolog of NCBI NO: 23429644 NR Description: endoxylanase [Carica papaya]
  misc_feature (1)..(278): Homolog of NCBI NO: 15235134 NR Description: glycosyl hydrolase family 10; protein id:
  misc_feature (1)..(278): Homolog of NCBI NO: 7485619 NR Description: hypothetical protein F17I5.30 - Arabidopsis >gi|3297808|emb|CAA19866.1| putative protein [Arabidopsis >gi|7270333|emb|CAB80101.1| putative protein [Arabidopsis
  misc_feature (1)..(278): Homolog of NCBI NO: 30689830 NR Description: glycosyl hydrolase family 10 [Arabidopsis
  misc_feature (1)..(274): Homolog of NCBI NO: 37533262 NR Description: putative 1,4-beta-xylanase [Oryza sativa
  misc_feature (1)..(266): Homolog of NCBI NO: 37533260 NR Description: putative 1,4-beta-xylanase [Oryza sativa
MMNFVRANRIIARGHNIFWEDPKYNPDWVRNLTGEDLRSAVNRRIKSLMTRYRGEFVHWDVSNEMLHFDFYETRLGKNASYGFFAAAREIDSLATLFFNDFNVVETCSDEKSTVDEYIARVRELQRYDGVRMDGIGLEGHFTTPNVALMRAILDKLATLQLPIWLTEIDISSSLDHRSQAIYLEQVLREGFSHPSVNGIMLWTALHPNGCYQMCLTDDKFRNLPAGDVVDQKLLEWKTGEVKATTDDHGSFSFFGFLGEYRVGIMYQGKTVNSSFSLSQGPETKHVRLQI

SEQ ID NO: 79951 - protein, 289 aa, Arabidopsis thaliana
  peptide (1)..(289): Ceres Seq. ID no. 12653838
  misc_feature (1)..(232): Pfam Name: Glycosyl hydrolase family 10 Pfam Description: Glycosyl hydrolase family 10
  misc_feature (1)..(289): Homolog of NCBI NO: 15233983 NR Description: glycosyl hydrolase family 10; protein id:
  misc_feature (1)..(289): Homolog of NCBI NO: 28416709 NR Description: At4g38650 [Arabidopsis thaliana]
  misc_feature (1)..(178): Homolog of NCBI NO: 15233783 NR Description: glycosyl hydrolase family 10; protein id:
  misc_feature (1)..(286): Homolog of NCBI NO: 15235131 NR Description: glycosyl hydrolase family 10; protein id:
  misc_feature (1)..(287): Homolog of NCBI NO: 23429644 NR Description: endoxylanase [Carica papaya]
  misc_feature (1)..(277): Homolog of NCBI NO: 15235134 NR Description: glycosyl hydrolase family 10; protein id:
  misc_feature (1)..(277): Homolog of NCBI NO: 7485619 NR Description: hypothetical protein F17I5.30 - Arabidopsis >gi|3297808|emb|CAA19866.1| putative protein [Arabidopsis >gi|7270333|emb|CAB80101.1| putative protein [Arabidopsis
  misc_feature (1)..(277): Homolog of NCBI NO: 30689830 NR Description: glycosyl hydrolase family 10 [Arabidopsis
  misc_feature (1)..(273): Homolog of NCBI NO: 37533262 NR Description: putative 1,4-beta-xylanase [Oryza sativa
  misc_feature (1)..(265): Homolog of NCBI NO: 37533260 NR Description: putative 1,4-beta-xylanase [Oryza sativa
MNFVRANRIIARGHNIFWEDPKYNPDWVRNLTGEDLRSAVNRRIKSLMTRYRGEFVHWDVSNEMLHFDFYETRLGKNASYGFFAAAREIDSLATLFFNDFNVVETCSDEKSTVDEYIARVRELQRYDGVRMDGIGLEGHFTTPNVALMRAILDKLATLQLPIWLTEIDISSSLDHRSQAIYLEQVLREGFSHPSVNGIMLWTALHPNGCYQMCLTDDKFRNLPAGDVVDQKLLEWKTGEVKATTDDHGSFSFFGFLGEYRVGIMYQGKTVNSSFSLSQGPETKHVRLQI

SEQ ID NO: 79952 - DNA, 531 bp, Arabidopsis thaliana
  misc_feature (1)..(531): Ceres Seq. ID no. 12653839
  misc_feature: MA Experiment ID: 20000185 Result: Down-regulated in Transcription
  misc_feature: MA Experiment 20000185 PARAMETER Experiment Name: At_Roots__P Parameter: Age (day) Value: 7 vs. 21
  misc_feature: MA Experiment 20000185 PARAMETER Experiment Name: At_Roots__P Parameter: Organism Value: A. thaliana
  misc_feature: MA Experiment 20000185 PARAMETER Experiment Name: At_Roots__P Parameter: Tissue Value: Roots vs. Whole Plant
  misc_feature: MA Experiment ID: 20000234 Result: Up-regulated in Transcription
  misc_feature: MA Experiment 20000234 PARAMETER Experiment Name: At_Siliques_P Parameter: Age (day) Value: 21
  misc_feature: MA Experiment 20000234 PARAMETER Experiment Name: At_Siliques_P Parameter: Organism Value: A. thaliana
  misc_feature: MA Experiment 20000234 PARAMETER Experiment Name: At_Siliques_P Parameter: Plant Line Value: WS
  misc_feature: MA Experiment 20000234 PARAMETER Experiment Name: At_Siliques_P Parameter: Tissue Value: Less Than 5mm Siliques vs. Whole Plant
  misc_feature: MA Experiment ID: 20000235 Result: Up-regulated in Transcription
  misc_feature: MA Experiment 20000235 PARAMETER Experiment Name: At_Siliques_P Parameter: Age (day) Value: 21
  misc_feature: MA Experiment 20000235 PARAMETER Experiment Name: At_Siliques_P Parameter: Organism Value: A. thaliana
  misc_feature: MA Experiment 20000235 PARAMETER Experiment Name: At_Siliques_P Parameter: Plant Line Value: WS
  misc_feature: MA Experiment 20000235 PARAMETER Experiment Name: At_Siliques_P Parameter: Tissue Value: 5-10mm Siliques vs. Whole Plant
  misc_feature: MA Experiment ID: 20001248 Result: Down-regulated in Transcription
  misc_feature: MA Experiment 20001248 PARAMETER Experiment Name: At_Far-red-induction_P Parameter: Age (day) Value: 7
  misc_feature: MA Experiment 20001248 PARAMETER Experiment Name: At_Far-red-induction_P Parameter: Light Value: Far-red vs. White
  misc_feature: MA Experiment 20001248 PARAMETER Experiment Name: At_Far-red-induction_P Parameter: Organism Value: A. thaliana
  misc_feature: MA Experiment 20001248 PARAMETER Experiment Name: At_Far-red-induction_P Parameter: Plant Line Value: Columbia
  misc_feature: MA Experiment 20001248 PARAMETER Experiment Name: At_Far-red-induction_P Parameter: Timepoint (hr) Value: 4
  misc_feature: MA Experiment 20001248 PARAMETER Experiment Name: At_Far-red-induction_P Parameter: Tissue Value: Whole Plant
  misc_feature: MA Experiment ID: 20001556 Result: Down-regulated in Transcription
  misc_feature: MA Experiment 20001556 PARAMETER Experiment Name: At_Drought_Soil_Dry_P Parameter: Age (day) Value: 26
  misc_feature: MA Experiment 20001556 PARAMETER Experiment Name: At_Drought_Soil_Dry_P Parameter: Organism Value: A. thaliana
  misc_feature: MA Experiment 20001556 PARAMETER Experiment Name: At_Drought_Soil_Dry_P Parameter: Plant Line Value: WS
  misc_feature: MA Experiment 20001556 PARAMETER Experiment Name: At_Drought_Soil_Dry_P Parameter: Post Timepoint (hr) Value: None
  misc_feature: MA Experiment 20001556 PARAMETER Experiment Name: At_Drought_Soil_Dry_P Parameter: Post-Treatment Value: None
  misc_feature: MA Experiment 20001556 PARAMETER Experiment Name: At_Drought_Soil_Dry_P Parameter: Timepoint (day) Value: 12
  misc_feature: MA Experiment 20001556 PARAMETER Experiment Name: At_Drought_Soil_Dry_P Parameter: Treatment Value: Drought vs. No Drought
  misc_feature: MA Experiment ID: 20001557 Result: Down-regulated in Transcription
  misc_feature: MA Experiment 20001557 PARAMETER Experiment Name: At_Drought_Soil_Dry_P Parameter: Age (day) Value: 27
  misc_feature: MA Experiment 20001557 PARAMETER Experiment Name: At_Drought_Soil_Dry_P Parameter: Organism Value: A. thaliana
  misc_feature: MA Experiment 20001557 PARAMETER Experiment Name: At_Drought_Soil_Dry_P Parameter: Plant Line Value: WS
  misc_feature: MA Experiment 20001557 PARAMETER Experiment Name: At_Drought_Soil_Dry_P Parameter: Post Timepoint (hr) Value: 3
  misc_feature: MA Experiment 20001557 PARAMETER Experiment Name: At_Drought_Soil_Dry_P Parameter: Post-Treatment Value: Re-Water vs. No Drought
  misc_feature: MA Experiment 20001557 PARAMETER Experiment Name: At_Drought_Soil_Dry_P Parameter: Timepoint (day) Value: 13
  misc_feature: MA Experiment 20001557 PARAMETER Experiment Name: At_Drought_Soil_Dry_P Parameter: Treatment Value: Drought vs. No Drought
  misc_feature: MA Experiment ID: 20001905 Result: Down-regulated in Transcription
  misc_feature: MA Experiment 20001905 PARAMETER Experiment Name: At_Drought_Reproduction_P Parameter: Age (day) Value: 40
  misc_feature: MA Experiment 20001905 PARAMETER Experiment Name: At_Drought_Reproduction_P Parameter: Organism Value: A. thaliana
  misc_feature: MA Experiment 20001905 PARAMETER Experiment Name: At_Drought_Reproduction_P Parameter: Plant Line Value: WS
  misc_feature: MA Experiment 20001905 PARAMETER Experiment Name: At_Drought_Reproduction_P Parameter: Timepoint (day) Value: 10
  misc_feature: MA Experiment 20001905 PARAMETER Experiment Name: At_Drought_Reproduction_P Parameter: Tissue Value: Rosettes
  misc_feature: MA Experiment 20001905 PARAMETER Experiment Name: At_Drought_Reproduction_P Parameter: Treatment Value: Drought vs. No Drought
atggccgttatggcgcgtcacgaatcctactatggcaacaccaaaccggctaaactgaatgaggagaaagtgacacgtgtcagattttatctccatgatactctcagtggccaaaatcctaccgccgttagaatcgcacatgcaaatctaaccggtggctcagcttcgccggtaggttttggaagcctgtttgtgatagacgatccgctcaccgtcgggccggagaaacactcgaaagagatcgggaatggtcaagggatgtatgtctccgggtgcaaagacttgagcaaattcacgatcgtcatgtacgctgatttggctttcacggcagggaagtttaatggaagctcgatcagtatcttctcgaggaatccggtggcggaagaggtcggagagcgagaaatcgcgattgttggtggccgtgggaaattcagaatggcgagaggttttgtcaaagtaaaaacaaataagattgacatgaagactggtgatgctgttctccgatatgatgctactgtttatcattattaa

SEQ ID NO: 79953 - protein, 176 aa, Arabidopsis thaliana
  peptide (1)..(176): Ceres Seq. ID no. 12653840
  misc_feature (1)..(175): Pfam Name: Dirigent-like protein Pfam Description: Dirigent-like protein
  misc_feature (1)..(176): Homolog of NCBI NO: 15234022 NR Description: disease resistance response protein-related; id: At4g38700.1 [Arabidopsis thaliana] >gi|7485886|pir||T05698
  misc_feature (10)..(176): Homolog of NCBI NO: 15226465 NR Description: disease resistance response protein-related; id: At2g21110.1 [Arabidopsis thaliana] >gi|25347082|pir||C84597
  misc_feature (1)..(175): Homolog of NCBI NO: 15238980 NR Description: disease resistance response protein-related; id: At5g42500.1, supported by cDNA: gi_20260391 [Arabidopsis
  misc_feature (22)..(175): Homolog of NCBI NO: 15218836 NR Description: disease resistance response protein-related/
  misc_feature (11)..(175): Homolog of NCBI NO: 15219966 NR Description: disease resistance response protein-related; id: At1g22900.1 [Arabidopsis thaliana] >gi|25347090|pir||A86363
  misc_feature (11)..(175): Homolog of NCBI NO: 15238982 NR Description: disease resistance response protein-related; id: At5g42510.1 [Arabidopsis thaliana] contains similarity to disease resistance response
  misc_feature (21)..(175): Homolog of NCBI NO: 30681257 NR Description: disease resistance response protein-related/
  misc_feature (21)..(172): Homolog of NCBI NO: 25412014 NR Description: probable disease resistance response protein - Arabidopsis thaliana >gi|4803933|gb|AAD29806.1| putative
  misc_feature (21)..(176): Homolog of NCBI NO: 15239779 NR Description: disease resistance response protein-related/
  misc_feature (21)..(176): Homolog of NCBI NO: 15217886 NR Description: disease resistance response protein-related/
MAVMARHESYYGNTKPAKLNEEKVTRVRFYLHDTLSGQNPTAVRIAHANLTGGSASPVGFGSLFVIDDPLTVGPEKHSKEIGNGQGMYVSGCKDLSKFTIVMYADLAFTAGKFNGSSISIFSRNPVAEEVGEREIAIVGGRGKFRMARGFVKVKTNKIDMKTGDAVLRYDATVYHY

SEQ ID NO: 79954 - protein, 173 aa, Arabidopsis thaliana
  peptide (1)..(173): Ceres Seq. ID no. 12653841
  misc_feature (1)..(172): Pfam Name: Dirigent-like protein Pfam Description: Dirigent-like protein
  misc_feature (1)..(173): Homolog of NCBI NO: 15234022 NR Description: disease resistance response protein-related; id: At4g38700.1 [Arabidopsis thaliana] >gi|7485886|pir||T05698
  misc_feature (7)..(173): Homolog of NCBI NO: 15226465 NR Description: disease resistance response protein-related; id: At2g21110.1 [Arabidopsis thaliana] >gi|25347082|pir||C84597
  misc_feature (1)..(172): Homolog of NCBI NO: 15238980 NR Description: disease resistance response protein-related; id: At5g42500.1, supported by cDNA: gi_20260391 [Arabidopsis
  misc_feature (19)..(172): Homolog of NCBI NO: 15218836 NR Description: disease resistance response protein-related/
  misc_feature (8)..(172): Homolog of NCBI NO: 15219966 NR Description: disease resistance response protein-related; id: At1g22900.1 [Arabidopsis thaliana] >gi|25347090|pir||A86363
  misc_feature (8)..(172): Homolog of NCBI NO: 15238982 NR Description: disease resistance response protein-related; id: At5g42510.1 [Arabidopsis thaliana] contains similarity to disease resistance response
  misc_feature (18)..(172): Homolog of NCBI NO: 30681257 NR Description: disease resistance response protein-related/
  misc_feature (18)..(169): Homolog of NCBI NO: 25412014 NR Description: probable disease resistance response protein - Arabidopsis thaliana >gi|4803933|gb|AAD29806.1| putative
  misc_feature (18)..(173): Homolog of NCBI NO: 15239779 NR Description: disease resistance response protein-related/
  misc_feature (18)..(173): Homolog of NCBI NO: 15217886 NR Description: disease resistance response protein-related/
MARHESYYGNTKPAKLNEEKVTRVRFYLHDTLSGQNPTAVRIAHANLTGGSASPVGFGSLFVIDDPLTVGPEKHSKEIGNGQGMYVSGCKDLSKFTIVMYADLAFTAGKFNGSSISIFSRNPVAEEVGEREIAIVGGRGKFRMARGFVKVKTNKIDMKTGDAVLRYDATVYHY

SEQ ID NO: 79955 - protein, 90 aa, Arabidopsis thaliana
  peptide (1)..(90): Ceres Seq. ID no. 12653842
  misc_feature (1)..(89): Pfam Name: Dirigent-like protein Pfam Description: Dirigent-like protein
  misc_feature (1)..(90): Homolog of NCBI NO: 15234022 NR Description: disease resistance response protein-related; id: At4g38700.1 [Arabidopsis thaliana] >gi|7485886|pir||T05698
  misc_feature (1)..(90): Homolog of NCBI NO: 15226465 NR Description: disease resistance response protein-related; id: At2g21110.1 [Arabidopsis thaliana] >gi|25347082|pir||C84597
  misc_feature (1)..(89): Homolog of NCBI NO: 15238980 NR Description: disease resistance response protein-related; id: At5g42500.1, supported by cDNA: gi_20260391 [Arabidopsis
  misc_feature (1)..(89): Homolog of NCBI NO: 15218836 NR Description: disease resistance response protein-related/
  misc_feature (1)..(89): Homolog of NCBI NO: 15219966 NR Description: disease resistance response protein-related; id: At1g22900.1 [Arabidopsis thaliana] >gi|25347090|pir||A86363
  misc_feature (1)..(89): Homolog of NCBI NO: 15238982 NR Description: disease resistance response protein-related; id: At5g42510.1 [Arabidopsis thaliana] contains similarity to disease resistance response
  misc_feature (1)..(89): Homolog of NCBI NO: 30681257 NR Description: disease resistance response protein-related/
  misc_feature (1)..(86): Homolog of NCBI NO: 25412014 NR Description: probable disease resistance response protein - Arabidopsis thaliana >gi|4803933|gb|AAD29806.1| putative
  misc_feature (1)..(90): Homolog of NCBI NO: 15239779 NR Description: disease resistance response protein-related/
  misc_feature (1)..(90): Homolog of NCBI NO: 15217886 NR Description: disease resistance response protein-related/
MYVSGCKDLSKFTIVMYADLAFTAGKFNGSSISIFSRNPVAEEVGEREIAIVGGRGKFRMARGFVKVKTNKIDMKTGDAVLRYDATVYHY

SEQ ID NO: 79956 - DNA, 1998 bp, Arabidopsis thaliana
  misc_feature (1)..(1998): Ceres Seq. ID no. 12653850
  misc_feature: MA Experiment ID: 20001451 Result: Up-regulated in Transcription
  misc_feature: MA Experiment 20001451 PARAMETER Experiment Name: At_Far-red-induction_P Parameter: Age (day) Value: 7
  misc_feature: MA Experiment 20001451 PARAMETER Experiment Name: At_Far-red-induction_P Parameter: Light Value: Far-red vs. White
  misc_feature: MA Experiment 20001451 PARAMETER Experiment Name: At_Far-red-induction_P Parameter: Organism Value: A. thaliana
  misc_feature: MA Experiment 20001451 PARAMETER Experiment Name: At_Far-red-induction_P Parameter: Plant Line Value: Columbia
  misc_feature: MA Experiment 20001451 PARAMETER Experiment Name: At_Far-red-induction_P Parameter: Timepoint (hr) Value: 24
  misc_feature: MA Experiment 20001451 PARAMETER Experiment Name: At_Far-red-induction_P Parameter: Tissue Value: Whole Plant
  misc_feature: MA Experiment ID: 20001557 Result: Up-regulated in Transcription
  misc_feature: MA Experiment 20001557 PARAMETER Experiment Name: At_Drought_Soil_Dry_P Parameter: Age (day) Value: 27
  misc_feature: MA Experiment 20001557 PARAMETER Experiment Name: At_Drought_Soil_Dry_P Parameter: Organism Value: A. thaliana
  misc_feature: MA Experiment 20001557 PARAMETER Experiment Name: At_Drought_Soil_Dry_P Parameter: Plant Line Value: WS
  misc_feature: MA Experiment 20001557 PARAMETER Experiment Name: At_Drought_Soil_Dry_P Parameter: Post Timepoint (hr) Value: 3
  misc_feature: MA Experiment 20001557 PARAMETER Experiment Name: At_Drought_Soil_Dry_P Parameter: Post-Treatment Value: Re-Water vs. No Drought
  misc_feature: MA Experiment 20001557 PARAMETER Experiment Name: At_Drought_Soil_Dry_P Parameter: Timepoint (day) Value: 13
  misc_feature: MA Experiment 20001557 PARAMETER Experiment Name: At_Drought_Soil_Dry_P Parameter: Treatment Value: Drought vs. No Drought
atgttgtctcttcttcttcctctgatctcactcttattccaaatccaatgcttcaccgttaagtcgcaaccggttccgttaaaccaaatatgctcaaacgtcacaggcaacttcaccgttaacaccccttacgccgtcaacctcgaccgcctcatctcctctttatcatctctccgacgtaacgttaacggattttacaacatctcagtgggagactccgatgaaaaagtcaattcaatctcacagtgtagaggcgatgtcaaacttgaagtttgcatcaactgcatcgcaatggctggaaaaagacttgtcacgctgtgtccggttcagaaagaggcgattatttggtatgacaaatgtacgtttagatactcaaaccggacaatcttcaatagattggagatttcccctcacacaagtataacgggaacaagaaacttcaccggagatcgtgatagttgggagaaatctttaaggggtttactcgaagggcttaaaaacagagcctctgttattggtcggagcaagaagaattttgttgtaggcgaaacgagcgggccttcatttcagacattgttcggtctggttcagtgcacaccggatatttcggaagaggattgttcgtattgtttgtctcagggtattgcaaagatcccaagctgttgtgatatgaaaatgggtagttatgtgatgtctcctagctgtatgttggcttatgctccctggagattctatgatccagtggacactgatgatccaagctcagtgcctgcaacgccatcacggccgccaaagaatgagacaagaagtgtcacacaaggggataaaaacagaggtgtacctaaagctttgatctttgcttctgcttcagttgctattgttgtcttatttatagtactcttagtcgttttcctaaagctgagaaggaaggagaacatcagaaattcagaaaacaaacatgaaaatgaaaatattagcacggattccatgaaatttgatttcagtgtattacaagatgcaacaagtcatttttcactagaaaataaacttggagaaggtggattcggagcagtttataagggtgtgctttctgatggacaaaaaatagcggtgaaaaggttgtcgaaaaatgcacaacaaggtgaaaccgaattcaagaacgagttcttgttggtggctaagcttcagcatcgcaatctcgtgaagctcttaggttactcaatagaaggaactgaaaggcttcttgtctatgagttcctcccacacactagtctcgacaagttcatcttcgatccgatccaaggtaatgaattggagtgggaaatacgatacaaaatcattggaggtgtagctcgaggacttctttatcttcatcaagattctcgtctgcggattatacaccgtgatcttaaagctagtaacatattattagacgaggaaatgaccccaaaaatcgcagatttcggaatggctaggcttttcgatatcgaccacacgactcaacgctacacgaataggatcgttgggacttttggatacatggctccagagtatgtaatgcacggacagttctcgttcaagacagatgtttacagtttcggagttttagttcttgagatcatcagtggtaagaaaaacagtggtttcagcagtgaggacagcatgggagatctcatcagcttcgcttggagaaattggaaggaaggcgttgctttgaatcttgtggacaagattttgatgacaatgtcgagttattcatcgaatatgatcatgagatgcataaacattggtcttctttgtgtccaagagaaagttgcagagagaccaagcatggcttctgttgttctgatgttagatggacatactattgctctttcagaaccatcaaaacctgcatttttctcacacagcaatgcggtatcagatagttcttcttctttaggacataatgcaaaaacttcaaactataattccaacactgagttgtatcctcggtga

SEQ ID NO: 79957 - protein, 665 aa, Arabidopsis thaliana
  peptide (1)..(665): Ceres Seq. ID no. 12653851
  misc_feature (8)..(665): Homolog of NCBI NO: 4530126 NR Description: receptor-like protein kinase homolog RK20-1
  misc_feature (36)..(665): Homolog of NCBI NO: 22328852 NR Description: serine threonine kinase - like protein; protein At4g21410.1, supported by cDNA: gi_18650593 [Arabidopsis >gi|18650594|gb|AAL75897.1| AT4g21410/T6K22_140 [Arabidopsis
  misc_feature (24)..(430): Homolog of NCBI NO: 15234434 NR Description: serine threonine protein kinase - like protein; id: At4g21400.1 [Arabidopsis thaliana] >gi|7488245|pir||T05148
  misc_feature (438)..(665): Homolog of NCBI NO: 15234434 NR Description: serine threonine protein kinase - like protein; id: At4g21400.1 [Arabidopsis thaliana] >gi|7488245|pir||T05148
  misc_feature (8)..(655): Homolog of NCBI NO: 18076585 NR Description: putative receptor-like serine-threonine protein
  misc_feature (8)..(665): Homolog of NCBI NO: 18076589 NR Description: putative receptor-like serine-threonine protein
  misc_feature (8)..(655): Homolog of NCBI NO: 18076583 NR Description: putative receptor-like serine-threonine protein
  misc_feature (152)..(655): Homolog of NCBI NO: 18076587 NR Description: putative receptor-like serine-threonine protein
  misc_feature (8)..(118): Homolog of NCBI NO: 18076587 NR Description: putative receptor-like serine-threonine protein
  misc_feature (12)..(642): Homolog of NCBI NO: 30686087 NR Description: serine/threonine kinase -related protein
MLSLLLPLISLLFQIQCFTVKSQPVPLNQICSNVTGNFTVNTPYAVNLDRLISSLSSLRRNVNGFYNISVGDSDEKVNSISQCRGDVKLEVCINCIAMAGKRLVTLCPVQKEAIIWYDKCTFRYSNRTIFNRLEISPHTSITGTRNFTGDRDSWEKSLRGLLEGLKNRASVIGRSKKNFVVGETSGPSFQTLFGLVQCTPDISEEDCSYCLSQGIAKIPSCCDMKMGSYVMSPSCMLAYAPWRFYDPVDTDDPSSVPATPSRPPKNETRSVTQGDKNRGVPKALIFASASVAIVVLFIVLLVVFLKLRRKENIRNSENKHENENISTDSMKFDFSVLQDATSHFSLENKLGEGGFGAVYKGVLSDGQKIAVKRLSKNAQQGETEFKNEFLLVAKLQHRNLVKLLGYSIEGTERLLVYEFLPHTSLDKFIFDPIQGNELEWEIRYKIIGGVARGLLYLHQDSRLRIIHRDLKASNILLDEEMTPKIADFGMARLFDIDHTTQRYTNRIVGTFGYMAPEYVMHGQFSFKTDVYSFGVLVLEIISGKKNSGFSSEDSMGDLISFAWRNWKEGVALNLVDKILMTMSSYSSNMIMRCINIGLLCVQEKVAERPSMASVVLMLDGHTIALSEPSKPAFFSHSNAVSDSSSSLGHNAKTSNYNSNTELYPR

SEQ ID NO: 79958 - protein, 568 aa, Arabidopsis thaliana
  peptide (1)..(568): Ceres Seq. ID no. 12653852
  misc_feature (1)..(568): Homolog of NCBI NO: 4530126 NR Description: receptor-like protein kinase homolog RK20-1
  misc_feature (1)..(568): Homolog of NCBI NO: 22328852 NR Description: serine threonine kinase - like protein; protein At4g21410.1, supported by cDNA: gi_18650593 [Arabidopsis >gi|18650594|gb|AAL75897.1| AT4g21410/T6K22_140 [Arabidopsis
  misc_feature (1)..(333): Homolog of NCBI NO: 15234434 NR Description: serine threonine protein kinase - like protein; id: At4g21400.1 [Arabidopsis thaliana] >gi|7488245|pir||T05148
  misc_feature (341)..(568): Homolog of NCBI NO: 15234434 NR Description: serine threonine protein kinase - like protein; id: At4g21400.1 [Arabidopsis thaliana] >gi|7488245|pir||T05148
  misc_feature (1)..(558): Homolog of NCBI NO: 18076585 NR Description: putative receptor-like serine-threonine protein
  misc_feature (1)..(568): Homolog of NCBI NO: 18076589 NR Description: putative receptor-like serine-threonine protein
  misc_feature (1)..(558): Homolog of NCBI NO: 18076583 NR Description: putative receptor-like serine-threonine protein
  misc_feature (55)..(558): Homolog of NCBI NO: 18076587 NR Description: putative receptor-like serine-threonine protein
  misc_feature (1)..(21): Homolog of NCBI NO: 18076587 NR Description: putative receptor-like serine-threonine protein
  misc_feature (1)..(545): Homolog of NCBI NO: 30686087 NR Description: serine/threonine kinase -related protein
MAGKRLVTLCPVQKEAIIWYDKCTFRYSNRTIFNRLEISPHTSITGTRNFTGDRDSWEKSLRGLLEGLKNRASVIGRSKKNFVVGETSGPSFQTLFGLVQCTPDISEEDCSYCLSQGIAKIPSCCDMKMGSYVMSPSCMLAYAPWRFYDPVDTDDPSSVPATPSRPPKNETRSVTQGDKNRGVPKALIFASASVAIVVLFIVLLVVFLKLRRKENIRNSENKHENENISTDSMKFDFSVLQDATSHFSLENKLGEGGFGAVYKGVLSDGQKIAVKRLSKNAQQGETEFKNEFLLVAKLQHRNLVKLLGYSIEGTERLLVYEFLPHTSLDKFIFDPIQGNELEWEIRYKIIGGVARGLLYLHQDSRLRIIHRDLKASNILLDEEMTPKIADFGMARLFDIDHTTQRYTNRIVGTFGYMAPEYVMHGQFSFKTDVYSFGVLVLEIISGKKNSGFSSEDSMGDLISFAWRNWKEGVALNLVDKILMTMSSYSSNMIMRCINIGLLCVQEKVAERPSMASVVLMLDGHTIALSEPSKPAFFSHSNAVSDSSSSLGHNAKTSNYNSNTELYPR

SEQ ID NO: 79959 - protein, 442 aa, Arabidopsis thaliana
  peptide (1)..(442): Ceres Seq. ID no. 12653853
  misc_feature (1)..(442): Homolog of NCBI NO: 4530126 NR Description: receptor-like protein kinase homolog RK20-1
  misc_feature (1)..(442): Homolog of NCBI NO: 22328852 NR Description: serine threonine kinase - like protein; protein At4g21410.1, supported by cDNA: gi_18650593 [Arabidopsis >gi|18650594|gb|AAL75897.1| AT4g21410/T6K22_140 [Arabidopsis
  misc_feature (1)..(207): Homolog of NCBI NO: 15234434 NR Description: serine threonine protein kinase - like protein; id: At4g21400.1 [Arabidopsis thaliana] >gi|7488245|pir||T05148
  misc_feature (215)..(442): Homolog of NCBI NO: 15234434 NR Description: serine threonine protein kinase - like protein; id: At4g21400.1 [Arabidopsis thaliana] >gi|7488245|pir||T05148
  misc_feature (1)..(432): Homolog of NCBI NO: 18076585 NR Description: putative receptor-like serine-threonine protein
  misc_feature (1)..(442): Homolog of NCBI NO: 18076589 NR Description: putative receptor-like serine-threonine protein
  misc_feature (1)..(432): Homolog of NCBI NO: 18076583 NR Description: putative receptor-like serine-threonine protein
  misc_feature (1)..(432): Homolog of NCBI NO: 18076587 NR Description: putative receptor-like serine-threonine protein
  misc_feature (1)..(419): Homolog of NCBI NO: 30686087 NR Description: serine/threonine kinase -related protein
  misc_feature (81)..(442): Homolog of NCBI NO: 15236415 NR Description: putative protein; protein id: At4g23160.1
MKMGSYVMSPSCMLAYAPWRFYDPVDTDDPSSVPATPSRPPKNETRSVTQGDKNRGVPKALIFASASVAIVVLFIVLLVVFLKLRRKENIRNSENKHENENISTDSMKFDFSVLQDATSHFSLENKLGEGGFGAVYKGVLSDGQKIAVKRLSKNAQQGETEFKNEFLLVAKLQHRNLVKLLGYSIEGTERLLVYEFLPHTSLDKFIFDPIQGNELEWEIRYKIIGGVARGLLYLHQDSRLRIIHRDLKASNILLDEEMTPKIADFGMARLFDIDHTTQRYTNRIVGTFGYMAPEYVMHGQFSFKTDVYSFGVLVLEIISGKKNSGFSSEDSMGDLISFAWRNWKEGVALNLVDKILMTMSSYSSNMIMRCINIGLLCVQEKVAERPSMASVVLMLDGHTIALSEPSKPAFFSHSNAVSDSSSSLGHNAKTSNYNSNTELYPR

SEQ ID NO: 79960 - DNA, 1632 bp, Arabidopsis thaliana
  misc_feature (1)..(1632): Ceres Seq. ID no. 12653877
  misc_feature: MA Experiment ID: 20000171 Result: Down-regulated in Transcription
  misc_feature: MA Experiment 20000171 PARAMETER Experiment Name: At_42deg_Heat_P Parameter: Age (day) Value: 14
  misc_feature: MA Experiment 20000171 PARAMETER Experiment Name: At_42deg_Heat_P Parameter: Organism Value: A. thaliana
  misc_feature: MA Experiment 20000171 PARAMETER Experiment Name: At_42deg_Heat_P Parameter: Plant Line Value: WS
  misc_feature: MA Experiment 20000171 PARAMETER Experiment Name: At_42deg_Heat_P Parameter: Temperature (deg C) Value: 42 vs. 22
  misc_feature: MA Experiment 20000171 PARAMETER Experiment Name: At_42deg_Heat_P Parameter: Timepoint (hr) Value: 1
  misc_feature: MA Experiment 20000171 PARAMETER Experiment Name: At_42deg_Heat_P Parameter: Tissue Value: Aerial
  misc_feature: MA Experiment ID: 20000173 Result: Down-regulated in Transcription
  misc_feature: MA Experiment 20000173 PARAMETER Experiment Name: At_42deg_Heat_P Parameter: Age (day) Value: 14
  misc_feature: MA Experiment 20000173 PARAMETER Experiment Name: At_42deg_Heat_P Parameter: Organism Value: A. thaliana
  misc_feature: MA Experiment 20000173 PARAMETER Experiment Name: At_42deg_Heat_P Parameter: Plant Line Value: WS
  misc_feature: MA Experiment 20000173 PARAMETER Experiment Name: At_42deg_Heat_P Parameter: Temperature (deg C) Value: 42 vs. 22
  misc_feature: MA Experiment 20000173 PARAMETER Experiment Name: At_42deg_Heat_P Parameter: Timepoint (hr) Value: 6
  misc_feature: MA Experiment 20000173 PARAMETER Experiment Name: At_42deg_Heat_P Parameter: Tissue Value: Aerial
  misc_feature: MA Experiment ID: 20000179 Result: Up-regulated in Transcription
  misc_feature: MA Experiment 20000179 PARAMETER Experiment Name: At_Germinating_Seeds_P Parameter: Age (hr) Value: 6 vs. 0
  misc_feature: MA Experiment 20000179 PARAMETER Experiment Name: At_Germinating_Seeds_P Parameter: Tissue Value: Germinating Seeds
  misc_feature: MA Experiment ID: 20000180 Result: Up-regulated in Transcription
  misc_feature: MA Experiment 20000180 PARAMETER Experiment Name: At_Germinating_Seeds_P Parameter: Age (hr) Value: 24 vs. 0
  misc_feature: MA Experiment 20000180 PARAMETER Experiment Name: At_Germinating_Seeds_P Parameter: Tissue Value: Germinating Seeds
  misc_feature: MA Experiment ID: 20000184 Result: Down-regulated in Transcription
  misc_feature: MA Experiment 20000184 PARAMETER Experiment Name: At_Shoots__P Parameter: Age (day) Value: 7
  misc_feature: MA Experiment 20000184 PARAMETER Experiment Name: At_Shoots__P Parameter: Tissue Value: Shoots vs. Whole Plant
  misc_feature: MA Experiment ID: 20000185 Result: Up-regulated in Transcription
  misc_feature: MA Experiment 20000185 PARAMETER Experiment Name: At_Roots__P Parameter: Age (day) Value: 7 vs. 21
  misc_feature: MA Experiment 20000185 PARAMETER Experiment Name: At_Roots__P Parameter: Organism Value: A. thaliana
  misc_feature: MA Experiment 20000185 PARAMETER Experiment Name: At_Roots__P Parameter: Tissue Value: Roots vs. Whole Plant
  misc_feature: MA Experiment ID: 20000438 Result: Down-regulated in Transcription
  misc_feature: MA Experiment 20000438 PARAMETER Experiment Name: At_Shoots__P Parameter: Age (day) Value: 14
  misc_feature: MA Experiment 20000438 PARAMETER Experiment Name: At_Shoots__P Parameter: Tissue Value: Shoots vs. Whole Plant
  misc_feature: MA Experiment ID: 20000439 Result: Up-regulated in Transcription
  misc_feature: MA Experiment 20000439 PARAMETER Experiment Name: At_Roots__P Parameter: Age (day) Value: 14 vs. 21
  misc_feature: MA Experiment 20000439 PARAMETER Experiment Name: At_Roots__P Parameter: Organism Value: A. thaliana
  misc_feature: MA Experiment 20000439 PARAMETER Experiment Name: At_Roots__P Parameter: Tissue Value: Roots vs. Whole Plant
  misc_feature: MA Experiment ID: 20000527 Result: Down-regulated in Transcription
  misc_feature: MA Experiment 20000527 PARAMETER Experiment Name: At_10percent_PEG_P Parameter: Age (day) Value: 20
  misc_feature: MA Experiment 20000527 PARAMETER Experiment Name: At_10percent_PEG_P Parameter: Organism Value: A. thaliana
  misc_feature: MA Experiment 20000527 PARAMETER Experiment Name: At_10percent_PEG_P Parameter: Plant Line Value: WS
  misc_feature: MA Experiment 20000527 PARAMETER Experiment Name: At_10percent_PEG_P Parameter: Timepoint (day) Value: 20
  misc_feature: MA Experiment 20000527 PARAMETER Experiment Name: At_10percent_PEG_P Parameter: Tissue Value: Whole Plant
  misc_feature: MA Experiment 20000527 PARAMETER Experiment Name: At_10percent_PEG_P Parameter: Treatment Value: 10percent PEG vs. No Treatment
  misc_feature: MA Experiment ID: 20000606 Result: Up-regulated in Transcription
  misc_feature: MA Experiment 20000606 PARAMETER Experiment Name: At_CS8548_Mutant_P Parameter: Age (day) Value: 14
  misc_feature: MA Experiment 20000606 PARAMETER Experiment Name: At_CS8548_Mutant_P Parameter: Plant Line Value: CS8548 vs. wt
  misc_feature: MA Experiment 20000606 PARAMETER Experiment Name: At_CS8548_Mutant_P Parameter: Tissue Value: Whole Plant
  misc_feature: MA Experiment ID: 20001450 Result: Down-regulated in Transcription
  misc_feature: MA Experiment 20001450 PARAMETER Experiment Name: At_Far-red-induction_P Parameter: Age (day) Value: 7
  misc_feature: MA Experiment 20001450 PARAMETER Experiment Name: At_Far-red-induction_P Parameter: Light Value: Far-red vs. White
  misc_feature: MA Experiment 20001450 PARAMETER Experiment Name: At_Far-red-induction_P Parameter: Organism Value: A. thaliana
  misc_feature: MA Experiment 20001450 PARAMETER Experiment Name: At_Far-red-induction_P Parameter: Plant Line Value: Columbia
  misc_feature: MA Experiment 20001450 PARAMETER Experiment Name: At_Far-red-induction_P Parameter: Timepoint (hr) Value: 8
  misc_feature: MA Experiment 20001450 PARAMETER Experiment Name: At_Far-red-induction_P Parameter: Tissue Value: Whole Plant
  misc_feature: MA Experiment ID: 20001451 Result: Down-regulated in Transcription
  misc_feature: MA Experiment 20001451 PARAMETER Experiment Name: At_Far-red-induction_P Parameter: Age (day) Value: 7
  misc_feature: MA Experiment 20001451 PARAMETER Experiment Name: At_Far-red-induction_P Parameter: Light Value: Far-red vs. White
  misc_feature: MA Experiment 20001451 PARAMETER Experiment Name: At_Far-red-induction_P Parameter: Organism Value: A. thaliana
  misc_feature: MA Experiment 20001451 PARAMETER Experiment Name: At_Far-red-induction_P Parameter: Plant Line Value: Columbia
  misc_feature: MA Experiment 20001451 PARAMETER Experiment Name: At_Far-red-induction_P Parameter: Timepoint (hr) Value: 24
  misc_feature: MA Experiment 20001451 PARAMETER Experiment Name: At_Far-red-induction_P Parameter: Tissue Value: Whole Plant
  misc_feature: MA Experiment ID: 20001558 Result: Down-regulated in Transcription
  misc_feature: MA Experiment 20001558 PARAMETER Experiment Name: At_Drought_Soil_Dry_P Parameter: Age (day) Value: 27
  misc_feature: MA Experiment 20001558 PARAMETER Experiment Name: At_Drought_Soil_Dry_P Parameter: Organism Value: A. thaliana
  misc_feature: MA Experiment 20001558 PARAMETER Experiment Name: At_Drought_Soil_Dry_P Parameter: Plant Line Value: WS
  misc_feature: MA Experiment 20001558 PARAMETER Experiment Name: At_Drought_Soil_Dry_P Parameter: Post Timepoint (hr) Value: 6
  misc_feature: MA Experiment 20001558 PARAMETER Experiment Name: At_Drought_Soil_Dry_P Parameter: Post-Treatment Value: Re-Water vs. No Drought
  misc_feature: MA Experiment 20001558 PARAMETER Experiment Name: At_Drought_Soil_Dry_P Parameter: Timepoint (day) Value: 13
  misc_feature: MA Experiment 20001558 PARAMETER Experiment Name: At_Drought_Soil_Dry_P Parameter: Treatment Value: Drought vs. No Drought
  misc_feature: MA Experiment ID: 20001560 Result: Down-regulated in Transcription
  misc_feature: MA Experiment 20001560 PARAMETER Experiment Name: At_Drought_Soil_Dry_P Parameter: Age (day) Value: 28
  misc_feature: MA Experiment 20001560 PARAMETER Experiment Name: At_Drought_Soil_Dry_P Parameter: Organism Value: A. thaliana
  misc_feature: MA Experiment 20001560 PARAMETER Experiment Name: At_Drought_Soil_Dry_P Parameter: Plant Line Value: WS
  misc_feature: MA Experiment 20001560 PARAMETER Experiment Name: At_Drought_Soil_Dry_P Parameter: Post Timepoint (hr) Value: None
  misc_feature: MA Experiment 20001560 PARAMETER Experiment Name: At_Drought_Soil_Dry_P Parameter: Post-Treatment Value: None
  misc_feature: MA Experiment 20001560 PARAMETER Experiment Name: At_Drought_Soil_Dry_P Parameter: Timepoint (day) Value: 14
  misc_feature: MA Experiment 20001560 PARAMETER Experiment Name: At_Drought_Soil_Dry_P Parameter: Treatment Value: Drought vs. No Drought
  misc_feature: MA Experiment ID: 20001904 Result: Down-regulated in Transcription
  misc_feature: MA Experiment 20001904 PARAMETER Experiment Name: At_Drought_Reproduction_P Parameter: Age (day) Value: 37
  misc_feature: MA Experiment 20001904 PARAMETER Experiment Name: At_Drought_Reproduction_P Parameter: Organism Value: A. thaliana
  misc_feature: MA Experiment 20001904 PARAMETER Experiment Name: At_Drought_Reproduction_P Parameter: Plant Line Value: WS
  misc_feature: MA Experiment 20001904 PARAMETER Experiment Name: At_Drought_Reproduction_P Parameter: Timepoint (day) Value: 7
  misc_feature: MA Experiment 20001904 PARAMETER Experiment Name: At_Drought_Reproduction_P Parameter: Tissue Value: Rosettes
  misc_feature: MA Experiment 20001904 PARAMETER Experiment Name: At_Drought_Reproduction_P Parameter: Treatment Value: Drought vs. No Drought
atgctaatcaaatcccaaagattgactcttttctctcctctcttgtccaaaacaagacggatcccggttaactcccaccaaacactggtcgcagaatcggtgataactcggagaacactcggtgcgatcaccgcaactccgagttttcataaaaatccggtggtgattcgacggaggatcaaattagagagagttacgaggaactgcgtcagaattgatcgggaaatcgacgaagaagaagaagaagaggagaaggagagaggggatctggtgaaacagagcatatgggaacagatgaaagagatagtgaagttcacaggtccggcgatggggatgtggatttgtggaccgttgatgagtctcatcgacacggtcgtcatcggccaaggaagctccatcgaactcgctgctcttggaccgggaacagtactatgcgaccacatgagttatgtcttcatgttcctctccgtggctacatccaatatggttgctacttctcttgccaaacaggacaagaaagaagcgcaacatcaaatctctgttttactctttattggattggtttgtggactaatgatgcttctgctcacaagattattcggtccttgggctgttactgcttttacaagggggaagaacattgagattgtccctgcagctaataagtatattcagattcgaggcttagcgtggccgtttatccttgttggattggttgctcaaagtgcaagtcttggaatgaagaactcatggggacctcttaaagcattagctgcagcaacgatcattaacggtcttggcgatacaatcctatgcttgtttcttggacaaggtatcgctggagctgcttgggcaacaactgcttcacagattgtttcggcttatatgatgatggattctctgaacaaagaaggctacaatgcttactcttttgcgatcccttcaccgcaagaactatggaagatctctgcactcgctgcacctgtttttatctccattttctccaagattgctttctactctttcataatttactgtgctacttccatgggaactcacgttttagccgctcatcaggtgatggctcagacgtataggatgtgcaatgtatggggtgagccactctctcaaacggctcagtcatttatgccagagatgttatatggtgcgaaccgtaatcttcccaaggctagaacgttgcttaagtccctgatgattattggagccacgcttggattagtcttgggagttatcggaacagcggttccaggcctgtttcctggtgtctacacacatgataaagtcatcatatccgagatgcatagactgcttatacctttcttcatggcgttgtctgcattgcccatgacagtatccctcgagggtacattgctggcgggacgtgatctcaaattcgtcagctcagtgatgagttcaagcttcataattggttgtctcacactaatgttcgtgacaagaagtggctatggtttactcggctgctggttcgttctcgtcggatttcaatggggccggtttggtctatatctacgacggcttctttcgcctggaggcatacttaattcagatgggccgagtccatacacggtggagaagattaaatccatttaa

SEQ ID NO: 79961 - protein, 543 aa, Arabidopsis thaliana
  peptide (1)..(543): Ceres Seq. ID no. 12653878
  misc_feature (1)..(543): Homolog of NCBI NO: 22329250 NR Description: putative protein; protein id: At4g39030.1, by cDNA: gi_16589069 [Arabidopsis thaliana] Enhanced disease susceptibility 5 (Eds5) (Salicylic acid
  misc_feature (1)..(452): Homolog of NCBI NO: 7485793 NR Description: hypothetical protein F19H22.130 - Arabidopsis >gi|4539322|emb|CAB38823.1| putative protein [Arabidopsis >gi|7270886|emb|CAB80566.1| putative protein [Arabidopsis
  misc_feature (76)..(542): Homolog of NCBI NO: 21554183 NR Description: enhanced disease susceptibility 5 [Arabidopsis
  misc_feature (76)..(542): Homolog of NCBI NO: 17065002 NR Description: Unknown protein [Arabidopsis thaliana]
  misc_feature (76)..(542): Homolog of NCBI NO: 18399664 NR Description: expressed protein; protein id: At2g21340.1, by cDNA: 20834., supported by cDNA: gi_17065001 [Arabidopsis >gi|20197910|gb|AAD23682.2| expressed protein [Arabidopsis
  misc_feature (225)..(441): Homolog of NCBI NO: 25412030 NR Description: hypothetical protein At2g21340 [imported] -
  misc_feature (76)..(307): Homolog of NCBI NO: 25412030 NR Description: hypothetical protein At2g21340 [imported] -
  misc_feature (100)..(502): Homolog of NCBI NO: 29830828 NR Description: putative DNA-damage-inducible protein F
  misc_feature (100)..(502): Homolog of NCBI NO: 21222317 NR Description: putative membrane protein [Streptomyces
  misc_feature (100)..(508): Homolog of NCBI NO: 19553186 NR Description: Na+-driven multidrug efflux pump [Corynebacterium
MLIKSQRLTLFSPLLSKTRRIPVNSHQTLVAESVITRRTLGAITATPSFHKNPVVIRRRIKLERVTRNCVRIDREIDEEEEEEEKERGDLVKQSIWEQMKEIVKFTGPAMGMWICGPLMSLIDTVVIGQGSSIELAALGPGTVLCDHMSYVFMFLSVATSNMVATSLAKQDKKEAQHQISVLLFIGLVCGLMMLLLTRLFGPWAVTAFTRGKNIEIVPAANKYIQIRGLAWPFILVGLVAQSASLGMKNSWGPLKALAAATIINGLGDTILCLFLGQGIAGAAWATTASQIVSAYMMMDSLNKEGYNAYSFAIPSPQELWKISALAAPVFISIFSKIAFYSFIIYCATSMGTHVLAAHQVMAQTYRMCNVWGEPLSQTAQSFMPEMLYGANRNLPKARTLLKSLMIIGATLGLVLGVIGTAVPGLFPGVYTHDKVIISEMHRLLIPFFMALSALPMTVSLEGTLLAGRDLKFVSSVMSSSFIIGCLTLMFVTRSGYGLLGCWFVLVGFQWGRFGLYLRRLLSPGGILNSDGPSPYTVEKIKSI

SEQ ID NO: 79962 - protein, 445 aa, Arabidopsis thaliana
  peptide (1)..(445): Ceres Seq. ID no. 12653879
  misc_feature (1)..(445): Homolog of NCBI NO: 22329250 NR Description: putative protein; protein id: At4g39030.1, by cDNA: gi_16589069 [Arabidopsis thaliana] Enhanced disease susceptibility 5 (Eds5) (Salicylic acid
  misc_feature (1)..(354): Homolog of NCBI NO: 7485793 NR Description: hypothetical protein F19H22.130 - Arabidopsis >gi|4539322|emb|CAB38823.1| putative protein [Arabidopsis >gi|7270886|emb|CAB80566.1| putative protein [Arabidopsis
  misc_feature (1)..(444): Homolog of NCBI NO: 21554183 NR Description: enhanced disease susceptibility 5 [Arabidopsis
  misc_feature (1)..(444): Homolog of NCBI NO: 17065002 NR Description: Unknown protein [Arabidopsis thaliana]
  misc_feature (1)..(444): Homolog of NCBI NO: 18399664 NR Description: expressed protein; protein id: At2g21340.1, by cDNA: 20834., supported by cDNA: gi_17065001 [Arabidopsis >gi|20197910|gb|AAD23682.2| expressed protein [Arabidopsis
  misc_feature (127)..(343): Homolog of NCBI NO: 25412030 NR Description: hypothetical protein At2g21340 [imported] -
  misc_feature (1)..(209): Homolog of NCBI NO: 25412030 NR Description: hypothetical protein At2g21340 [imported] -
  misc_feature (2)..(404): Homolog of NCBI NO: 29830828 NR Description: putative DNA-damage-inducible protein F
  misc_feature (2)..(404): Homolog of NCBI NO: 21222317 NR Description: putative membrane protein [Streptomyces
  misc_feature (2)..(410): Homolog of NCBI NO: 19553186 NR Description: Na+-driven multidrug efflux pump [Corynebacterium
MKEIVKFTGPAMGMWICGPLMSLIDTVVIGQGSSIELAALGPGTVLCDHMSYVFMFLSVATSNMVATSLAKQDKKEAQHQISVLLFIGLVCGLMMLLLTRLFGPWAVTAFTRGKNIEIVPAANKYIQIRGLAWPFILVGLVAQSASLGMKNSWGPLKALAAATIINGLGDTILCLFLGQGIAGAAWATTASQIVSAYMMMDSLNKEGYNAYSFAIPSPQELWKISALAAPVFISIFSKIAFYSFIIYCATSMGTHVLAAHQVMAQTYRMCNVWGEPLSQTAQSFMPEMLYGANRNLPKARTLLKSLMIIGATLGLVLGVIGTAVPGLFPGVYTHDKVIISEMHRLLIPFFMALSALPMTVSLEGTLLAGRDLKFVSSVMSSSFIIGCLTLMFVTRSGYGLLGCWFVLVGFQWGRFGLYLRRLLSPGGILNSDGPSPYTVEKIKSI

SEQ ID NO: 79963 - protein, 434 aa, Arabidopsis thaliana
  peptide (1)..(434): Ceres Seq. ID no. 12653880
  misc_feature (1)..(434): Homolog of NCBI NO: 22329250 NR Description: putative protein; protein id: At4g39030.1, by cDNA: gi_16589069 [Arabidopsis thaliana] Enhanced disease susceptibility 5 (Eds5) (Salicylic acid
  misc_feature (1)..(343): Homolog of NCBI NO: 7485793 NR Description: hypothetical protein F19H22.130 - Arabidopsis >gi|4539322|emb|CAB38823.1| putative protein [Arabidopsis >gi|7270886|emb|CAB80566.1| putative protein [Arabidopsis
  misc_feature (1)..(433): Homolog of NCBI NO: 21554183 NR Description: enhanced disease susceptibility 5 [Arabidopsis
  misc_feature (1)..(433): Homolog of NCBI NO: 17065002 NR Description: Unknown protein [Arabidopsis thaliana]
  misc_feature (1)..(433): Homolog of NCBI NO: 18399664 NR Description: expressed protein; protein id: At2g21340.1, by cDNA: 20834., supported by cDNA: gi_17065001 [Arabidopsis >gi|20197910|gb|AAD23682.2| expressed protein [Arabidopsis
  misc_feature (116)..(332): Homolog of NCBI NO: 25412030 NR Description: hypothetical protein At2g21340 [imported] -
  misc_feature (1)..(198): Homolog of NCBI NO: 25412030 NR Description: hypothetical protein At2g21340 [imported] -
  misc_feature (1)..(393): Homolog of NCBI NO: 29830828 NR Description: putative DNA-damage-inducible protein F
  misc_feature (1)..(393): Homolog of NCBI NO: 21222317 NR Description: putative membrane protein [Streptomyces
  misc_feature (1)..(399): Homolog of NCBI NO: 19553186 NR Description: Na+-driven multidrug efflux pump [Corynebacterium
MGMWICGPLMSLIDTVVIGQGSSIELAALGPGTVLCDHMSYVFMFLSVATSNMVATSLAKQDKKEAQHQISVLLFIGLVCGLMMLLLTRLFGPWAVTAFTRGKNIEIVPAANKYIQIRGLAWPFILVGLVAQSASLGMKNSWGPLKALAAATIINGLGDTILCLFLGQGIAGAAWATTASQIVSAYMMMDSLNKEGYNAYSFAIPSPQELWKISALAAPVFISIFSKIAFYSFIIYCATSMGTHVLAAHQVMAQTYRMCNVWGEPLSQTAQSFMPEMLYGANRNLPKARTLLKSLMIIGATLGLVLGVIGTAVPGLFPGVYTHDKVIISEMHRLLIPFFMALSALPMTVSLEGTLLAGRDLKFVSSVMSSSFIIGCLTLMFVTRSGYGLLGCWFVLVGFQWGRFGLYLRRLLSPGGILNSDGPSPYTVEKIKSI

SEQ ID NO: 79964 - DNA, 2637 bp, Arabidopsis thaliana
  misc_feature (1)..(2637): Ceres Seq. ID no. 12653883
  misc_feature: MA Experiment ID: 20000264 Result: Up-regulated in Transcription
  misc_feature: MA Experiment 20000264 PARAMETER Experiment Name: At_Open_Flower_P Parameter: Age (day) Value: 21
  misc_feature: MA Experiment 20000264 PARAMETER Experiment Name: At_Open_Flower_P Parameter: Plant Line Value: WS
  misc_feature: MA Experiment 20000264 PARAMETER Experiment Name: At_Open_Flower_P Parameter: Tissue Value: Open Flower vs. Whole Plant
  misc_feature: MA Experiment ID: 20000286 Result: Up-regulated in Transcription
  misc_feature: MA Experiment 20000286 PARAMETER Experiment Name: At_Open_Flower_P Parameter: Age (day) Value: 21
  misc_feature: MA Experiment 20000286 PARAMETER Experiment Name: At_Open_Flower_P Parameter: Plant Line Value: WS
  misc_feature: MA Experiment 20000286 PARAMETER Experiment Name: At_Open_Flower_P Parameter: Tissue Value: Half Open vs. Whole Plant
  misc_feature: MA Experiment ID: 20000794 Result: Up-regulated in Transcription
  misc_feature: MA Experiment 20000794 PARAMETER Experiment Name: At_Petals_P Parameter: Age (day) Value: 23-25 days
  misc_feature: MA Experiment 20000794 PARAMETER Experiment Name: At_Petals_P Parameter: Plant Line Value: WS
  misc_feature: MA Experiment 20000794 PARAMETER Experiment Name: At_Petals_P Parameter: Tissue Value: Petals vs. Whole plant
  misc_feature: MA Experiment ID: 20001910 Result: Up-regulated in Transcription
  misc_feature: MA Experiment 20001910 PARAMETER Experiment Name: At_Drought_Reproduction_P Parameter: Age (day) Value: 37
  misc_feature: MA Experiment 20001910 PARAMETER Experiment Name: At_Drought_Reproduction_P Parameter: Organism Value: A. thaliana
  misc_feature: MA Experiment 20001910 PARAMETER Experiment Name: At_Drought_Reproduction_P Parameter: Plant Line Value: WS
  misc_feature: MA Experiment 20001910 PARAMETER Experiment Name: At_Drought_Reproduction_P Parameter: Timepoint (day) Value: 7
  misc_feature: MA Experiment 20001910 PARAMETER Experiment Name: At_Drought_Reproduction_P Parameter: Tissue Value: Flowers
  misc_feature: MA Experiment 20001910 PARAMETER Experiment Name: At_Drought_Reproduction_P Parameter: Treatment Value: Drought vs. No Drought
atggagataagaaagaaaccaaacatattcacggttctcgtcattgatttttcttcaaagccttccatggctctccttctggctattctccttttcctctcaggcccttctgcatctgcggtagctgcagctgctgtgggacctgctactggttttaaaccggcagatgatattctcattgattgtggaagcaaatcgtcatcaaaaacccctgatggaagagtctttaagagtgaccaagaaacaatccaatacatagaagccaaggaagatattcaggtctcagccccgccttcagacaaggtcgcatctcctatctacctaactgcaaggatcttccgtgaggaagccacctacaaattccatttgactcgacctggttggcattgggttcgcctgcatttcttggccttccctaatgacaagttcgatctccaacaagcaaccttttccgttttaacggagaaatatgtgctgcttcataacttcaaaataagtaacaacaacaatgatagtcaagctgctgttcagaaggagtatctcgtcaacatgacagatgctcaattcgccctcaggttcagacctatgaaaagctctgcagcgttcatcaacgctatcgaagtcgtgtcagctccagacgaactgatctctgattctggcactgcccttttccctgtcattgggttctcgggtctgtctgactacgcttaccagtctgtttatagagtcaatgtcggcggtcccttgatcatgcctcagaatgatacattaggaagaacctggatacccgataaggaattcttgaaagatgagaacttggcaaaggacgttaaaacaaccccttcggcaatcaagtacccaccggaagttacacctttgattgctccacagacggtttatgcaacagctgtagaaatggctaattctctcaccatagaccctaattttaacgtctcctggaatttcccctccaacccatcgtttaactaccttatccggcttcatttctgtgatatcgttagcaagtctctcaatgacctgtactttaatgtgtacattaacgggaaaactgccatttctggactggatttgtccactgtcgctgggaatctagctgctccttactacaaagacatcgttgtgaacgcaacacttatgggccctgagctccaagtccagattggtcccatgggagaagatacagggaccaaaaacgcgatcttgaacggtgttgaggttctgaagatgagcaattccgtgaacagccttgatggagagtttggagtggatggtagaaccactggcatggggaagcatggtatggtagcaaccgcggggtttgtgatgatgtttggagctttcattggtctgggagccatggtttacaagtggaagaagaggccacaagattggcagaagagaaatagtttctcctcttggttgctaccaatacatgctggtgatagcactttcatgacaagcaaaggtggttctcagaaatccaacttctacaactcaacacttggtctcggccgctatttctccctttcagagcttcaagaagccacaaagaactttgaagcatcccagattatcggtgttggaggattcggtaacgtctacattggaaccctcgacgatggaaccaaagtcgctgtcaaaagaggtaatccacagtctgaacaaggaatcactgagtttcagacagagatccagatgctttctaagctcagacacagacacttggtctccttgattggttactgtgacgagaactctgagatgatcttagtctatgagttcatgtccaatggtccattcagggaccacttgtatggaaagaaccttgctcctctaacctggaaacaaagactcgagatatgtatcggatctgcacgtgggcttcactacttacacacaggaacagctcaggggattatccaccgtgatgtcaaatccaccaacattcttctcgatgaagctttagttgcaaaagtcgctgactttggtctttctaaagatgtagcttttggacaaaaccatgtcagcacggccgtgaaaggaagtttcgggtacttagacccggagtactttagaagacaacaacttaccgacaaatccgatgtttattcctttggtgtcgttcttctagaagctctgtgcgcaagaccagccatcaatcctcagctaccaagagagcaggttaacttagctgaatgggcgatgcaatggaaacgaaaaggacttcttgaaaagatcattgatcctcatttggctggaacgattaatcctgaatcgatgaagaagtttgctgaagctgcagagaagtgtttagaagactacggtgtcgataggccaacaatgggagatgttctgtggaacttggagtatgctcttcagcttcaagaggcattcactcagggcaaagcagaagagaccgagaacgctaagcctgatgtggtgacacctggctcggtgcctgtgtctgatccatctccgatcactccctcagtcaccaccaacgaagcggctactgttccggttcctgctaaggtggaagagaacagtggcacggccgtggatgaacactctggaacagccatgtttactcagtttgctaaccttaacggaagataa

SEQ ID NO: 79965 - protein, 878 aa, Arabidopsis thaliana
  peptide (1)..(878): Ceres Seq. ID no. 12653884
  misc_feature (306)..(878): Homolog of NCBI NO: 4539330 NR Description: putative receptor-like protein kinase (fragment)
  misc_feature (24)..(843): Homolog of NCBI NO: 25553554 NR Description: OSJNBa0038F22.1 [Oryza sativa (japonica
  misc_feature (24)..(843): Homolog of NCBI NO: 34898020 NR Description: Similar to putative receptor-like protein kinase
  misc_feature (46)..(515): Homolog of NCBI NO: 15240228 NR Description: receptor-like protein kinase precursor - like; id: At5g61350.1 [Arabidopsis thaliana]
  misc_feature (489)..(836): Homolog of NCBI NO: 15240228 NR Description: receptor-like protein kinase precursor - like; id: At5g61350.1 [Arabidopsis thaliana]
  misc_feature (26)..(803): Homolog of NCBI NO: 14488367 NR Description: putative protein kinase [Oryza sativa (japonica
  misc_feature (26)..(878): Homolog of NCBI NO: 15239630 NR Description: receptor-protein kinase-like protein; protein id:
  misc_feature (51)..(878): Homolog of NCBI NO: 15231393 NR Description: receptor protein kinase -like; protein id:
  misc_feature (66)..(878): Homolog of NCBI NO: 15238498 NR Description: receptor-like protein kinase precursor - like;
  misc_feature (41)..(431): Homolog of NCBI NO: 15230520 NR Description: receptor-protein kinase-like protein; protein id:
MEIRKKPNIFTVLVIDFSSKPSMALLLAILLFLSGPSASAVAAAAVGPATGFKPADDILIDCGSKSSSKTPDGRVFKSDQETIQYIEAKEDIQVSAPPSDKVASPIYLTARIFREEATYKFHLTRPGWHWVRLHFLAFPNDKFDLQQATFSVLTEKYVLLHNFKISNNNNDSQAAVQKEYLVNMTDAQFALRFRPMKSSAAFINAIEVVSAPDELISDSGTALFPVIGFSGLSDYAYQSVYRVNVGGPLIMPQNDTLGRTWIPDKEFLKDENLAKDVKTTPSAIKYPPEVTPLIAPQTVYATAVEMANSLTIDPNFNVSWNFPSNPSFNYLIRLHFCDIVSKSLNDLYFNVYINGKTAISGLDLSTVAGNLAAPYYKDIVVNATLMGPELQVQIGPMGEDTGTKNAILNGVEVLKMSNSVNSLDGEFGVDGRTTGMGKHGMVATAGFVMMFGAFIGLGAMVYKWKKRPQDWQKRNSFSSWLLPIHAGDSTFMTSKGGSQKSNFYNSTLGLGRYFSLSELQEATKNFEASQIIGVGGFGNVYIGTLDDGTKVAVKRGNPQSEQGITEFQTEIQMLSKLRHRHLVSLIGYCDENSEMILVYEFMSNGPFRDHLYGKNLAPLTWKQRLEICIGSARGLHYLHTGTAQGIIHRDVKSTNILLDEALVAKVADFGLSKDVAFGQNHVSTAVKGSFGYLDPEYFRRQQLTDKSDVYSFGVVLLEALCARPAINPQLPREQVNLAEWAMQWKRKGLLEKIIDPHLAGTINPESMKKFAEAAEKCLEDYGVDRPTMGDVLWNLEYALQLQEAFTQGKAEETENAKPDVVTPGSVPVSDPSPITPSVTTNEAATVPVPAKVEENSGTAVDEHSGTAMFTQFANLNGR

SEQ ID NO: 79966 - protein, 856 aa, Arabidopsis thaliana
  peptide (1)..(856): Ceres Seq. ID no. 12653885
  misc_feature (284)..(856): Homolog of NCBI NO: 4539330 NR Description: putative receptor-like protein kinase (fragment)
  misc_feature (2)..(821): Homolog of NCBI NO: 25553554 NR Description: OSJNBa0038F22.1 [Oryza sativa (japonica
  misc_feature (2)..(821): Homolog of NCBI NO: 34898020 NR Description: Similar to putative receptor-like protein kinase
  misc_feature (24)..(493): Homolog of NCBI NO: 15240228 NR Description: receptor-like protein kinase precursor - like; id: At5g61350.1 [Arabidopsis thaliana]
  misc_feature (467)..(814): Homolog of NCBI NO: 15240228 NR Description: receptor-like protein kinase precursor - like; id: At5g61350.1 [Arabidopsis thaliana]
  misc_feature (4)..(781): Homolog of NCBI NO: 14488367 NR Description: putative protein kinase [Oryza sativa (japonica
  misc_feature (4)..(856): Homolog of NCBI NO: 15239630 NR Description: receptor-protein kinase-like protein; protein id:
  misc_feature (29)..(856): Homolog of NCBI NO: 15231393 NR Description: receptor protein kinase -like; protein id:
  misc_feature (44)..(856): Homolog of NCBI NO: 15238498 NR Description: receptor-like protein kinase precursor - like;
  misc_feature (19)..(409): Homolog of NCBI NO: 15230520 NR Description: receptor-protein kinase-like protein; protein id:
MALLLAILLFLSGPSASAVAAAAVGPATGFKPADDILIDCGSKSSSKTPDGRVFKSDQETIQYIEAKEDIQVSAPPSDKVASPIYLTARIFREEATYKFHLTRPGWHWVRLHFLAFPNDKFDLQQATFSVLTEKYVLLHNFKISNNNNDSQAAVQKEYLVNMTDAQFALRFRPMKSSAAFINAIEVVSAPDELISDSGTALFPVIGFSGLSDYAYQSVYRVNVGGPLIMPQNDTLGRTWIPDKEFLKDENLAKDVKTTPSAIKYPPEVTPLIAPQTVYATAVEMANSLTIDPNFNVSWNFPSNPSFNYLIRLHFCDIVSKSLNDLYFNVYINGKTAISGLDLSTVAGNLAAPYYKDIVVNATLMGPELQVQIGPMGEDTGTKNAILNGVEVLKMSNSVNSLDGEFGVDGRTTGMGKHGMVATAGFVMMFGAFIGLGAMVYKWKKRPQDWQKRNSFSSWLLPIHAGDSTFMTSKGGSQKSNFYNSTLGLGRYFSLSELQEATKNFEASQIIGVGGFGNVYIGTLDDGTKVAVKRGNPQSEQGITEFQTEIQMLSKLRHRHLVSLIGYCDENSEMILVYEFMSNGPFRDHLYGKNLAPLTWKQRLEICIGSARGLHYLHTGTAQGIIHRDVKSTNILLDEALVAKVADFGLSKDVAFGQNHVSTAVKGSFGYLDPEYFRRQQLTDKSDVYSFGVVLLEALCARPAINPQLPREQVNLAEWAMQWKRKGLLEKIIDPHLAGTINPESMKKFAEAAEKCLEDYGVDRPTMGDVLWNLEYALQLQEAFTQGKAEETENAKPDVVTPGSVPVSDPSPITPSVTTNEAATVPVPAKVEENSGTAVDEHSGTAMFTQFANLNGR

SEQ ID NO: 79967 - protein, 695 aa, Arabidopsis thaliana
  peptide (1)..(695): Ceres Seq. ID no. 12653886
  misc_feature (123)..(695): Homolog of NCBI NO: 4539330 NR Description: putative receptor-like protein kinase (fragment)
  misc_feature (1)..(660): Homolog of NCBI NO: 25553554 NR Description: OSJNBa0038F22.1 [Oryza sativa (japonica
  misc_feature (1)..(660): Homolog of NCBI NO: 34898020 NR Description: Similar to putative receptor-like protein kinase
  misc_feature (1)..(332): Homolog of NCBI NO: 15240228 NR Description: receptor-like protein kinase precursor - like; id: At5g61350.1 [Arabidopsis thaliana]
  misc_feature (306)..(653): Homolog of NCBI NO: 15240228 NR Description: receptor-like protein kinase precursor - like; id: At5g61350.1 [Arabidopsis thaliana]
  misc_feature (1)..(620): Homolog of NCBI NO: 14488367 NR Description: putative protein kinase [Oryza sativa (japonica
  misc_feature (1)..(695): Homolog of NCBI NO: 15239630 NR Description: receptor-protein kinase-like protein; protein id:
  misc_feature (1)..(695): Homolog of NCBI NO: 15231393 NR Description: receptor protein kinase -like; protein id:
  misc_feature (1)..(695): Homolog of NCBI NO: 15238498 NR Description: receptor-like protein kinase precursor - like;
  misc_feature (1)..(248): Homolog of NCBI NO: 15230520 NR Description: receptor-protein kinase-like protein; protein id:
MTDAQFALRFRPMKSSAAFINAIEVVSAPDELISDSGTALFPVIGFSGLSDYAYQSVYRVNVGGPLIMPQNDTLGRTWIPDKEFLKDENLAKDVKTTPSAIKYPPEVTPLIAPQTVYATAVEMANSLTIDPNFNVSWNFPSNPSFNYLIRLHFCDIVSKSLNDLYFNVYINGKTAISGLDLSTVAGNLAAPYYKDIVVNATLMGPELQVQIGPMGEDTGTKNAILNGVEVLKMSNSVNSLDGEFGVDGRTTGMGKHGMVATAGFVMMFGAFIGLGAMVYKWKKRPQDWQKRNSFSSWLLPIHAGDSTFMTSKGGSQKSNFYNSTLGLGRYFSLSELQEATKNFEASQIIGVGGFGNVYIGTLDDGTKVAVKRGNPQSEQGITEFQTEIQMLSKLRHRHLVSLIGYCDENSEMILVYEFMSNGPFRDHLYGKNLAPLTWKQRLEICIGSARGLHYLHTGTAQGIIHRDVKSTNILLDEALVAKVADFGLSKDVAFGQNHVSTAVKGSFGYLDPEYFRRQQLTDKSDVYSFGVVLLEALCARPAINPQLPREQVNLAEWAMQWKRKGLLEKIIDPHLAGTINPESMKKFAEAAEKCLEDYGVDRPTMGDVLWNLEYALQLQEAFTQGKAEETENAKPDVVTPGSVPVSDPSPITPSVTTNEAATVPVPAKVEENSGTAVDEHSGTAMFTQFANLNGR

SEQ ID NO: 79968 - DNA, 3096 bp, Arabidopsis thaliana
  misc_feature (1)..(3096): Ceres Seq. ID no. 12653902
  misc_feature: MA Experiment ID: 20000314 Result: Up-regulated in Transcription
  misc_feature: MA Experiment 20000314 PARAMETER Experiment Name: At_14day_Shoots-Roots_Sub_P Parameter: Age (day) Value: 14
  misc_feature: MA Experiment 20000314 PARAMETER Experiment Name: At_14day_Shoots-Roots_Sub_P Parameter: Organism Value: A. thaliana
  misc_feature: MA Experiment 20000314 PARAMETER Experiment Name: At_14day_Shoots-Roots_Sub_P Parameter: Plant Line Value: WS
  misc_feature: MA Experiment 20000314 PARAMETER Experiment Name: At_14day_Shoots-Roots_Sub_P Parameter: Tissue Value: Roots vs. Whole Plant
  misc_feature: MA Experiment ID: 20000315 Result: Down-regulated in Transcription
  misc_feature: MA Experiment 20000315 PARAMETER Experiment Name: At_14day_Shoots-Roots_Sub_P Parameter: Age (day) Value: 14
  misc_feature: MA Experiment 20000315 PARAMETER Experiment Name: At_14day_Shoots-Roots_Sub_P Parameter: Organism Value: A. thaliana
  misc_feature: MA Experiment 20000315 PARAMETER Experiment Name: At_14day_Shoots-Roots_Sub_P Parameter: Plant Line Value: WS
  misc_feature: MA Experiment 20000315 PARAMETER Experiment Name: At_14day_Shoots-Roots_Sub_P Parameter: Tissue Value: Shoots vs. Whole Plant
  misc_feature: MA Experiment ID: 20000328 Result: Down-regulated in Transcription
  misc_feature: MA Experiment 20000328 PARAMETER Experiment Name: At_42deg_Heat_Sub_P Parameter: Age (day) Value: 14
  misc_feature: MA Experiment 20000328 PARAMETER Experiment Name: At_42deg_Heat_Sub_P Parameter: Organism Value: A. thaliana
  misc_feature: MA Experiment 20000328 PARAMETER Experiment Name: At_42deg_Heat_Sub_P Parameter: Plant Line Value: WS
  misc_feature: MA Experiment 20000328 PARAMETER Experiment Name: At_42deg_Heat_Sub_P Parameter: Temperature (deg C) Value: 42 vs. 22
  misc_feature: MA Experiment 20000328 PARAMETER Experiment Name: At_42deg_Heat_Sub_P Parameter: Timepoint (hr) Value: 6
  misc_feature: MA Experiment 20000328 PARAMETER Experiment Name: At_42deg_Heat_Sub_P Parameter: Tissue Value: Aerial
  misc_feature: MA Experiment ID: 20000347 Result: Up-regulated in Transcription
  misc_feature: MA Experiment 20000347 PARAMETER Experiment Name: At_2mM_SA_Sub_P Parameter: Age (day) Value: 14
  misc_feature: MA Experiment 20000347 PARAMETER Experiment Name: At_2mM_SA_Sub_P Parameter: Organism Value: A. thaliana
  misc_feature: MA Experiment 20000347 PARAMETER Experiment Name: At_2mM_SA_Sub_P Parameter: Plant Line Value: WS
  misc_feature: MA Experiment 20000347 PARAMETER Experiment Name: At_2mM_SA_Sub_P Parameter: Timepoint (hr) Value: 6
  misc_feature: MA Experiment 20000347 PARAMETER Experiment Name: At_2mM_SA_Sub_P Parameter: Tissue Value: Aerial
  misc_feature: MA Experiment 20000347 PARAMETER Experiment Name: At_2mM_SA_Sub_P Parameter: Treatment Value: 2mM SA vs. No Treatment
  misc_feature: MA Experiment ID: 20000355 Result: Down-regulated in Transcription
  misc_feature: MA Experiment 20000355 PARAMETER Experiment Name: At_Siliques_Sub_P Parameter: Age (day) Value: 21
  misc_feature: MA Experiment 20000355 PARAMETER Experiment Name: At_Siliques_Sub_P Parameter: Organism Value: A. thaliana
  misc_feature: MA Experiment 20000355 PARAMETER Experiment Name: At_Siliques_Sub_P Parameter: Plant Line Value: WS
  misc_feature: MA Experiment 20000355 PARAMETER Experiment Name: At_Siliques_Sub_P Parameter: Tissue Value: Less Than 5mm Siliques vs. Whole Plant
  misc_feature: MA Experiment ID: 20000440 Result: Down-regulated in Transcription
  misc_feature: MA Experiment 20000440 PARAMETER Experiment Name: At_Closed-Flower__Sub_P Parameter: Tissue Value: Closed Flower vs. Whole Plant
agactttccatctttctctctctaaatctaggacaaaaaaaaacatggaagagttagagagagagagaggcagcagaaaatgattggtaaacaacaatgaatcgtttttgattctgaagtgcacagagaaaagtaattgccagagaaagtcgcagaggtaacagagtgaagaaccttttttagtatatatctttgttgaataatcacaaaaagaaagtttcctttattgatcggattcgaaggaaacccaaaaaaaaaagagatttgattatttccataaatcgcgaagcttttttccaattgaatcttaggcaatgaatggctttaagtttttcgaagtactagtcgtcaccagggtttagagaaaccatggtggttctgaggaagacatccttgttggtcttcttcttattcctcctcttgttgttagagtcaacgtttgagcaacagacaagttctctgaatgagaaatcggcgcttctgctgttaaggtcttctcttgggttacgaagcagagattggcctgtaaaaggcaatccttgtctgaactggaacggcatcaaatgtgatcagaatggtagagtaactaagatcaacatttcagggttcagaaggacaaggattgggaatcaaaacccggaattctcagttggttctctcgtcaatctcacccgtctagcttccttcaacgcctcaaggttctatcttccaggtccaatcccggctttgtttggatcgagtctgttgactttagaggtgttggaccttagctcctgttcaatcacaggaaccatccctgaaagtttgactcggttatcacatctcaaagttcttgatctttcaaagaatgcgatcaatggggatattcctctgtctcttacctctcttcagaatctatcaatccttgatctttcctcaaactcggtgtttggttcgattcctgctaatattggggcactctcaaagctccagcgtctgaatctttcgcgtaacaccttgacttcttcaatacctccatcactcggagacctctctgttttaattgaccttgatctcagcttcaacggaatgtcaggttcggttccatcagatttgaaagggctaaggaacttgcagacattggtaattgcgggaaatcgcctttcaggatccctacctcctgatctgtttagtttgctgagtaaacttcagatcattgacttcagaggcagtggtttcataggcgctttaccgtccaggttatggtcgttaccggagctcaagtttctagatatttctggaaatcacttctctgacatgctgcctaataccactgtcagttttgattctactgtctccatgcttaacatatccgggaacatgttttacggcaatctcacacttttactgacaaggttccaagttgttgacctgtcagaaaactattttgaaggtaaaattcctgactttgtgccaaccagagcttcattgagcaacaattgtcttcagggcccagagaagcagcggaagttgtcggattgcactttgttttattcaaaaaagggcttaactttcaacaatttcggacaacatgaagagaagaagagttctaaaacttcctggttaagccacacgaaaatagttatacttgctgcagttggagggtctatattgcttatgctcattctcatagtgttaccaataacagtgagtttctgtgtccgtcgaagaaacagatcatcaacaagtaatcatcctagaggaagacacaacggtgttggcccattacctcctgatgaaacacttccctcaagaggaggagtctctataaactttgggagtcttggatcatcatttacctatcagcagttgctcaatgccaccaaggagttcagtgattcaaacctgatcaagaaaggacaatctggggatcttttcaagggagttctagaaaacggagttcagatcgttgtgaaaagaatcagcttggaatctacaaagaacaacgaagcttatctaaccgagttggatttcttcagccggtttgcgcatccgagaataatcccattcgtagggaagagcttagagagcgcaactcataagttcttggtatacaagtacatgctgaatagggatttaccaagctcattgttctataaatccaattccctagttgacaacggattgagatctctcgattggatcaccagactgaaaatagcattgggagtagcagagggacttgcttacctgcaccatgattgctcaccatccgtcgtccacagggatattcaagcaagtagcattctcttggatgataagtttgaagttaggcttggaagctttagcaaagcttgtcatcaagaaaacaatggccgtccacggaaaatagcccgattgctcagactatcccagtcttctcaagaaagtgttcctgggtctgcagctacagcaacatgtgcctacgatgtgtactgcttcggcaagatacttctggagcttatcacagggaaactcggaatcagctcatgtaaagaaacccaattcaaaaaaatcctaaccgagatcatgccttacatttcatcgcaagagaaagaacccgtaatgaacattctagaccaatctcttctggtcgacgaagacctcttagaagaagtctgggcaatggcaatcgtcgctagatcttgtcttaacccaaaaccaacgagacggccgcttatgagacacatagtacaagccttggagaatccactgagagttgtgagagaagacagcagcgaatctgagagattccgtacgactggatcttcgagaggatcttcgagtagcggtcgaatatttggtagttggagacagagcgtgtctgatcctgtcgcagcgggaacaagtagccttctgtctcaggcggagggtttagcgactggatcgtcagcgagaggaagtagccgtggcgcgtcgagtcgacggagtatgaaagatgtatagaaagaaagacacacacacacacgatcaatatttattttttgacgtcaatttttaattattttttatgtgtggttatgatttgatctcttgttgataaaaaattcccgttaatttataatatttttcgatgat

SEQ ID NO: 79969 - protein, 864 aa, Arabidopsis thaliana
  peptide (1)..(864): Ceres Seq. ID no. 12653903
  misc_feature (2)..(860): Homolog of NCBI NO: 15226721 NR Description: leucine-rich repeat transmembrane protein kinase, protein id: At2g16250.1 [Arabidopsis thaliana]
  misc_feature (234)..(864): Homolog of NCBI NO: 34394416 NR Description: putative Systemin receptor SR160 precursor [Oryza
  misc_feature (197)..(810): Homolog of NCBI NO: 34915200 NR Description: putative receptor-like protein kinase [Oryza
  misc_feature (17)..(358): Homolog of NCBI NO: 34393421 NR Description: putative OsLRK1(receptor-type protein kinase)
  misc_feature (489)..(784): Homolog of NCBI NO: 34393421 NR Description: putative OsLRK1(receptor-type protein kinase)
  misc_feature (55)..(383): Homolog of NCBI NO: 34395052 NR Description: putative LRR receptor-like kinase [Oryza sativa
  misc_feature (485)..(798): Homolog of NCBI NO: 34395052 NR Description: putative LRR receptor-like kinase [Oryza sativa
  misc_feature (51)..(368): Homolog of NCBI NO: 15229189 NR Description: leucine-rich repeat transmembrane protein kinase, protein id: At3g49670.1 [Arabidopsis thaliana]
  misc_feature (489)..(799): Homolog of NCBI NO: 15229189 NR Description: leucine-rich repeat transmembrane protein kinase, protein id: At3g49670.1 [Arabidopsis thaliana]
  misc_feature (96)..(803): Homolog of NCBI NO: 15241558 NR Description: leucine-rich repeat transmembrane protein kinase,
MVVLRKTSLLVFFLFLLLLLESTFEQQTSSLNEKSALLLLRSSLGLRSRDWPVKGNPCLNWNGIKCDQNGRVTKINISGFRRTRIGNQNPEFSVGSLVNLTRLASFNASRFYLPGPIPALFGSSLLTLEVLDLSSCSITGTIPESLTRLSHLKVLDLSKNAINGDIPLSLTSLQNLSILDLSSNSVFGSIPANIGALSKLQRLNLSRNTLTSSIPPSLGDLSVLIDLDLSFNGMSGSVPSDLKGLRNLQTLVIAGNRLSGSLPPDLFSLLSKLQIIDFRGSGFIGALPSRLWSLPELKFLDISGNHFSDMLPNTTVSFDSTVSMLNISGNMFYGNLTLLLTRFQVVDLSENYFEGKIPDFVPTRASLSNNCLQGPEKQRKLSDCTLFYSKKGLTFNNFGQHEEKKSSKTSWLSHTKIVILAAVGGSILLMLILIVLPITVSFCVRRRNRSSTSNHPRGRHNGVGPLPPDETLPSRGGVSINFGSLGSSFTYQQLLNATKEFSDSNLIKKGQSGDLFKGVLENGVQIVVKRISLESTKNNEAYLTELDFFSRFAHPRIIPFVGKSLESATHKFLVYKYMLNRDLPSSLFYKSNSLVDNGLRSLDWITRLKIALGVAEGLAYLHHDCSPSVVHRDIQASSILLDDKFEVRLGSFSKACHQENNGRPRKIARLLRLSQSSQESVPGSAATATCAYDVYCFGKILLELITGKLGISSCKETQFKKILTEIMPYISSQEKEPVMNILDQSLLVDEDLLEEVWAMAIVARSCLNPKPTRRPLMRHIVQALENPLRVVREDSSESERFRTTGSSRGSSSSGRIFGSWRQSVSDPVAAGTSSLLSQAEGLATGSSARGSSRGASSRRSMKDV

SEQ ID NO: 79970 - protein, 631 aa, Arabidopsis thaliana
  peptide (1)..(631): Ceres Seq. ID no. 12653904
  misc_feature (1)..(627): Homolog of NCBI NO: 15226721 NR Description: leucine-rich repeat transmembrane protein kinase, protein id: At2g16250.1 [Arabidopsis thaliana]
  misc_feature (1)..(631): Homolog of NCBI NO: 34394416 NR Description: putative Systemin receptor SR160 precursor [Oryza
  misc_feature (1)..(577): Homolog of NCBI NO: 34915200 NR Description: putative receptor-like protein kinase [Oryza
  misc_feature (1)..(125): Homolog of NCBI NO: 34393421 NR Description: putative OsLRK1(receptor-type protein kinase)
  misc_feature (256)..(551): Homolog of NCBI NO: 34393421 NR Description: putative OsLRK1(receptor-type protein kinase)
  misc_feature (1)..(150): Homolog of NCBI NO: 34395052 NR Description: putative LRR receptor-like kinase [Oryza sativa
  misc_feature (252)..(565): Homolog of NCBI NO: 34395052 NR Description: putative LRR receptor-like kinase [Oryza sativa
  misc_feature (1)..(135): Homolog of NCBI NO: 15229189 NR Description: leucine-rich repeat transmembrane protein kinase, protein id: At3g49670.1 [Arabidopsis thaliana]
  misc_feature (256)..(566): Homolog of NCBI NO: 15229189 NR Description: leucine-rich repeat transmembrane protein kinase, protein id: At3g49670.1 [Arabidopsis thaliana]
  misc_feature (1)..(570): Homolog of NCBI NO: 15241558 NR Description: leucine-rich repeat transmembrane protein kinase,
MSGSVPSDLKGLRNLQTLVIAGNRLSGSLPPDLFSLLSKLQIIDFRGSGFIGALPSRLWSLPELKFLDISGNHFSDMLPNTTVSFDSTVSMLNISGNMFYGNLTLLLTRFQVVDLSENYFEGKIPDFVPTRASLSNNCLQGPEKQRKLSDCTLFYSKKGLTFNNFGQHEEKKSSKTSWLSHTKIVILAAVGGSILLMLILIVLPITVSFCVRRRNRSSTSNHPRGRHNGVGPLPPDETLPSRGGVSINFGSLGSSFTYQQLLNATKEFSDSNLIKKGQSGDLFKGVLENGVQIVVKRISLESTKNNEAYLTELDFFSRFAHPRIIPFVGKSLESATHKFLVYKYMLNRDLPSSLFYKSNSLVDNGLRSLDWITRLKIALGVAEGLAYLHHDCSPSVVHRDIQASSILLDDKFEVRLGSFSKACHQENNGRPRKIARLLRLSQSSQESVPGSAATATCAYDVYCFGKILLELITGKLGISSCKETQFKKILTEIMPYISSQEKEPVMNILDQSLLVDEDLLEEVWAMAIVARSCLNPKPTRRPLMRHIVQALENPLRVVREDSSESERFRTTGSSRGSSSSGRIFGSWRQSVSDPVAAGTSSLLSQAEGLATGSSARGSSRGASSRRSMKDV

SEQ ID NO: 79971 - protein, 555 aa, Arabidopsis thaliana
  peptide (1)..(555): Ceres Seq. ID no. 12653905
  misc_feature (1)..(551): Homolog of NCBI NO: 15226721 NR Description: leucine-rich repeat transmembrane protein kinase, protein id: At2g16250.1 [Arabidopsis thaliana]
  misc_feature (1)..(555): Homolog of NCBI NO: 34394416 NR Description: putative Systemin receptor SR160 precursor [Oryza
  misc_feature (1)..(501): Homolog of NCBI NO: 34915200 NR Description: putative receptor-like protein kinase [Oryza
  misc_feature (1)..(49): Homolog of NCBI NO: 34393421 NR Description: putative OsLRK1(receptor-type protein kinase)
  misc_feature (180)..(475): Homolog of NCBI NO: 34393421 NR Description: putative OsLRK1(receptor-type protein kinase)
  misc_feature (1)..(74): Homolog of NCBI NO: 34395052 NR Description: putative LRR receptor-like kinase [Oryza sativa
  misc_feature (176)..(489): Homolog of NCBI NO: 34395052 NR Description: putative LRR receptor-like kinase [Oryza sativa
  misc_feature (1)..(59): Homolog of NCBI NO: 15229189 NR Description: leucine-rich repeat transmembrane protein kinase, protein id: At3g49670.1 [Arabidopsis thaliana]
  misc_feature (180)..(490): Homolog of NCBI NO: 15229189 NR Description: leucine-rich repeat transmembrane protein kinase, protein id: At3g49670.1 [Arabidopsis thaliana]
  misc_feature (1)..(494): Homolog of NCBI NO: 15241558 NR Description: leucine-rich repeat transmembrane protein kinase,
MLPNTTVSFDSTVSMLNISGNMFYGNLTLLLTRFQVVDLSENYFEGKIPDFVPTRASLSNNCLQGPEKQRKLSDCTLFYSKKGLTFNNFGQHEEKKSSKTSWLSHTKIVILAAVGGSILLMLILIVLPITVSFCVRRRNRSSTSNHPRGRHNGVGPLPPDETLPSRGGVSINFGSLGSSFTYQQLLNATKEFSDSNLIKKGQSGDLFKGVLENGVQIVVKRISLESTKNNEAYLTELDFFSRFAHPRIIPFVGKSLESATHKFLVYKYMLNRDLPSSLFYKSNSLVDNGLRSLDWITRLKIALGVAEGLAYLHHDCSPSVVHRDIQASSILLDDKFEVRLGSFSKACHQENNGRPRKIARLLRLSQSSQESVPGSAATATCAYDVYCFGKILLELITGKLGISSCKETQFKKILTEIMPYISSQEKEPVMNILDQSLLVDEDLLEEVWAMAIVARSCLNPKPTRRPLMRHIVQALENPLRVVREDSSESERFRTTGSSRGSSSSGRIFGSWRQSVSDPVAAGTSSLLSQAEGLATGSSARGSSRGASSRRSMKDV

SEQ ID NO: 79972 - DNA, 1883 bp, Arabidopsis thaliana
  misc_feature (1)..(1883): Ceres Seq. ID no. 12653943
  misc_feature: MA Experiment ID: 20000173 Result: Down-regulated in Transcription
  misc_feature: MA Experiment 20000173 PARAMETER Experiment Name: At_42deg_Heat_P Parameter: Age (day) Value: 14
  misc_feature: MA Experiment 20000173 PARAMETER Experiment Name: At_42deg_Heat_P Parameter: Organism Value: A. thaliana
  misc_feature: MA Experiment 20000173 PARAMETER Experiment Name: At_42deg_Heat_P Parameter: Plant Line Value: WS
  misc_feature: MA Experiment 20000173 PARAMETER Experiment Name: At_42deg_Heat_P Parameter: Temperature (deg C) Value: 42 vs. 22
  misc_feature: MA Experiment 20000173 PARAMETER Experiment Name: At_42deg_Heat_P Parameter: Timepoint (hr) Value: 6
  misc_feature: MA Experiment 20000173 PARAMETER Experiment Name: At_42deg_Heat_P Parameter: Tissue Value: Aerial
  misc_feature: MA Experiment ID: 20000180 Result: Up-regulated in Transcription
  misc_feature: MA Experiment 20000180 PARAMETER Experiment Name: At_Germinating_Seeds_P Parameter: Age (hr) Value: 24 vs. 0
  misc_feature: MA Experiment 20000180 PARAMETER Experiment Name: At_Germinating_Seeds_P Parameter: Tissue Value: Germinating Seeds
  misc_feature: MA Experiment ID: 20000185 Result: Down-regulated in Transcription
  misc_feature: MA Experiment 20000185 PARAMETER Experiment Name: At_Roots__P Parameter: Age (day) Value: 7 vs. 21
  misc_feature: MA Experiment 20000185 PARAMETER Experiment Name: At_Roots__P Parameter: Organism Value: A. thaliana
  misc_feature: MA Experiment 20000185 PARAMETER Experiment Name: At_Roots__P Parameter: Tissue Value: Roots vs. Whole Plant
  misc_feature: MA Experiment ID: 20000234 Result: Down-regulated in Transcription
  misc_feature: MA Experiment 20000234 PARAMETER Experiment Name: At_Siliques_P Parameter: Age (day) Value: 21
  misc_feature: MA Experiment 20000234 PARAMETER Experiment Name: At_Siliques_P Parameter: Organism Value: A. thaliana
  misc_feature: MA Experiment 20000234 PARAMETER Experiment Name: At_Siliques_P Parameter: Plant Line Value: WS
  misc_feature: MA Experiment 20000234 PARAMETER Experiment Name: At_Siliques_P Parameter: Tissue Value: Less Than 5mm Siliques vs. Whole Plant
  misc_feature: MA Experiment ID: 20000235 Result: Down-regulated in Transcription
  misc_feature: MA Experiment 20000235 PARAMETER Experiment Name: At_Siliques_P Parameter: Age (day) Value: 21
  misc_feature: MA Experiment 20000235 PARAMETER Experiment Name: At_Siliques_P Parameter: Organism Value: A. thaliana
  misc_feature: MA Experiment 20000235 PARAMETER Experiment Name: At_Siliques_P Parameter: Plant Line Value: WS
  misc_feature: MA Experiment 20000235 PARAMETER Experiment Name: At_Siliques_P Parameter: Tissue Value: 5-10mm Siliques vs. Whole Plant
  misc_feature: MA Experiment ID: 20000264 Result: Down-regulated in Transcription
  misc_feature: MA Experiment 20000264 PARAMETER Experiment Name: At_Open_Flower_P Parameter: Age (day) Value: 21
  misc_feature: MA Experiment 20000264 PARAMETER Experiment Name: At_Open_Flower_P Parameter: Plant Line Value: WS
  misc_feature: MA Experiment 20000264 PARAMETER Experiment Name: At_Open_Flower_P Parameter: Tissue Value: Open Flower vs. Whole Plant
  misc_feature: MA Experiment ID: 20000265 Result: Down-regulated in Transcription
  misc_feature: MA Experiment 20000265 PARAMETER Experiment Name: At_Open_Flower_P Parameter: Age (day) Value: 21
  misc_feature: MA Experiment 20000265 PARAMETER Experiment Name: At_Open_Flower_P Parameter: Plant Line Value: WS
  misc_feature: MA Experiment 20000265 PARAMETER Experiment Name: At_Open_Flower_P Parameter: Tissue Value: Closed Flower vs. Whole Plant
  misc_feature: MA Experiment ID: 20000286 Result: Down-regulated in Transcription
  misc_feature: MA Experiment 20000286 PARAMETER Experiment Name: At_Open_Flower_P Parameter: Age (day) Value: 21
  misc_feature: MA Experiment 20000286 PARAMETER Experiment Name: At_Open_Flower_P Parameter: Plant Line Value: WS
  misc_feature: MA Experiment 20000286 PARAMETER Experiment Name: At_Open_Flower_P Parameter: Tissue Value: Half Open vs. Whole Plant
  misc_feature: MA Experiment ID: 20000439 Result: Down-regulated in Transcription
  misc_feature: MA Experiment 20000439 PARAMETER Experiment Name: At_Roots__P Parameter: Age (day) Value: 14 vs. 21
  misc_feature: MA Experiment 20000439 PARAMETER Experiment Name: At_Roots__P Parameter: Organism Value: A. thaliana
  misc_feature: MA Experiment 20000439 PARAMETER Experiment Name: At_Roots__P Parameter: Tissue Value: Roots vs. Whole Plant
  misc_feature: MA Experiment ID: 20000496 Result: Up-regulated in Transcription
  misc_feature: MA Experiment 20000496 PARAMETER Experiment Name: At_Guard_Cells_P Parameter: Harvest Date Value: 7/19/2002
  misc_feature: MA Experiment 20000496 PARAMETER Experiment Name: At_Guard_Cells_P Parameter: Organism Value: Canola
  misc_feature: MA Experiment 20000496 PARAMETER Experiment Name: At_Guard_Cells_P Parameter: Tissue Value: Guard Cells vs. Leaves
  misc_feature: MA Experiment ID: 20000794 Result: Down-regulated in Transcription
  misc_feature: MA Experiment 20000794 PARAMETER Experiment Name: At_Petals_P Parameter: Age (day) Value: 23-25 days
  misc_feature: MA Experiment 20000794 PARAMETER Experiment Name: At_Petals_P Parameter: Plant Line Value: WS
  misc_feature: MA Experiment 20000794 PARAMETER Experiment Name: At_Petals_P Parameter: Tissue Value: Petals vs. Whole plant
  misc_feature: MA Experiment ID: 20001554 Result: Down-regulated in Transcription
  misc_feature: MA Experiment 20001554 PARAMETER Experiment Name: At_Drought_Soil_Dry_P Parameter: Age (day) Value: 21
  misc_feature: MA Experiment 20001554 PARAMETER Experiment Name: At_Drought_Soil_Dry_P Parameter: Organism Value: A. thaliana
  misc_feature: MA Experiment 20001554 PARAMETER Experiment Name: At_Drought_Soil_Dry_P Parameter: Plant Line Value: WS
  misc_feature: MA Experiment 20001554 PARAMETER Experiment Name: At_Drought_Soil_Dry_P Parameter: Post Timepoint (hr) Value: None
  misc_feature: MA Experiment 20001554 PARAMETER Experiment Name: At_Drought_Soil_Dry_P Parameter: Post-Treatment Value: None
  misc_feature: MA Experiment 20001554 PARAMETER Experiment Name: At_Drought_Soil_Dry_P Parameter: Timepoint (day) Value: 7
  misc_feature: MA Experiment 20001554 PARAMETER Experiment Name: At_Drought_Soil_Dry_P Parameter: Treatment Value: Drought vs. No Drought
  misc_feature: MA Experiment ID: 20001555 Result: Down-regulated in Transcription
  misc_feature: MA Experiment 20001555 PARAMETER Experiment Name: At_Drought_Soil_Dry_P Parameter: Age (day) Value: 24
  misc_feature: MA Experiment 20001555 PARAMETER Experiment Name: At_Drought_Soil_Dry_P Parameter: Organism Value: A. thaliana
  misc_feature: MA Experiment 20001555 PARAMETER Experiment Name: At_Drought_Soil_Dry_P Parameter: Plant Line Value: WS
  misc_feature: MA Experiment 20001555 PARAMETER Experiment Name: At_Drought_Soil_Dry_P Parameter: Post Timepoint (hr) Value: None
  misc_feature: MA Experiment 20001555 PARAMETER Experiment Name: At_Drought_Soil_Dry_P Parameter: Post-Treatment Value: None
  misc_feature: MA Experiment 20001555 PARAMETER Experiment Name: At_Drought_Soil_Dry_P Parameter: Timepoint (day) Value: 10
  misc_feature: MA Experiment 20001555 PARAMETER Experiment Name: At_Drought_Soil_Dry_P Parameter: Treatment Value: Drought vs. No Drought
  misc_feature: MA Experiment ID: 20001556 Result: Down-regulated in Transcription
  misc_feature: MA Experiment 20001556 PARAMETER Experiment Name: At_Drought_Soil_Dry_P Parameter: Age (day) Value: 26
  misc_feature: MA Experiment 20001556 PARAMETER Experiment Name: At_Drought_Soil_Dry_P Parameter: Organism Value: A. thaliana
  misc_feature: MA Experiment 20001556 PARAMETER Experiment Name: At_Drought_Soil_Dry_P Parameter: Plant Line Value: WS
  misc_feature: MA Experiment 20001556 PARAMETER Experiment Name: At_Drought_Soil_Dry_P Parameter: Post Timepoint (hr) Value: None
  misc_feature: MA Experiment 20001556 PARAMETER Experiment Name: At_Drought_Soil_Dry_P Parameter: Post-Treatment Value: None
  misc_feature: MA Experiment 20001556 PARAMETER Experiment Name: At_Drought_Soil_Dry_P Parameter: Timepoint (day) Value: 12
  misc_feature: MA Experiment 20001556 PARAMETER Experiment Name: At_Drought_Soil_Dry_P Parameter: Treatment Value: Drought vs. No Drought
  misc_feature: MA Experiment ID: 20001557 Result: Down-regulated in Transcription
  misc_feature: MA Experiment 20001557 PARAMETER Experiment Name: At_Drought_Soil_Dry_P Parameter: Age (day) Value: 27
  misc_feature: MA Experiment 20001557 PARAMETER Experiment Name: At_Drought_Soil_Dry_P Parameter: Organism Value: A. thaliana
  misc_feature: MA Experiment 20001557 PARAMETER Experiment Name: At_Drought_Soil_Dry_P Parameter: Plant Line Value: WS
  misc_feature: MA Experiment 20001557 PARAMETER Experiment Name: At_Drought_Soil_Dry_P Parameter: Post Timepoint (hr) Value: 3
  misc_feature: MA Experiment 20001557 PARAMETER Experiment Name: At_Drought_Soil_Dry_P Parameter: Post-Treatment Value: Re-Water vs. No Drought
  misc_feature: MA Experiment 20001557 PARAMETER Experiment Name: At_Drought_Soil_Dry_P Parameter: Timepoint (day) Value: 13
  misc_feature: MA Experiment 20001557 PARAMETER Experiment Name: At_Drought_Soil_Dry_P Parameter: Treatment Value: Drought vs. No Drought
  misc_feature: MA Experiment ID: 20001559 Result: Down-regulated in Transcription
  misc_feature: MA Experiment 20001559 PARAMETER Experiment Name: At_Drought_Soil_Dry_P Parameter: Age (day) Value: 28
  misc_feature: MA Experiment 20001559 PARAMETER Experiment Name: At_Drought_Soil_Dry_P Parameter: Organism Value: A. thaliana
  misc_feature: MA Experiment 20001559 PARAMETER Experiment Name: At_Drought_Soil_Dry_P Parameter: Plant Line Value: WS
  misc_feature: MA Experiment 20001559 PARAMETER Experiment Name: At_Drought_Soil_Dry_P Parameter: Post Timepoint (hr) Value: 29
  misc_feature: MA Experiment 20001559 PARAMETER Experiment Name: At_Drought_Soil_Dry_P Parameter: Post-Treatment Value: Re-Water vs. No Drought
  misc_feature: MA Experiment 20001559 PARAMETER Experiment Name: At_Drought_Soil_Dry_P Parameter: Timepoint (day) Value: 14
  misc_feature: MA Experiment 20001559 PARAMETER Experiment Name: At_Drought_Soil_Dry_P Parameter: Treatment Value: Drought vs. No Drought
  misc_feature: MA Experiment ID: 20001757 Result: Up-regulated in Transcription
  misc_feature: MA Experiment 20001757 PARAMETER Experiment Name: At_50mM_NH4NO3_L-to-H_P Parameter: Timepoint (hr) Value: 6
  misc_feature: MA Experiment 20001757 PARAMETER Experiment Name: At_50mM_NH4NO3_L-to-H_P Parameter: Tissue Value: Leaf
  misc_feature: MA Experiment 20001757 PARAMETER Experiment Name: At_50mM_NH4NO3_L-to-H_P Parameter: Treatment Value: 50mM NH4NO3 vs 100mM Mannitol
  misc_feature: MA Experiment ID: 20001904 Result: Down-regulated in Transcription
  misc_feature: MA Experiment 20001904 PARAMETER Experiment Name: At_Drought_Reproduction_P Parameter: Age (day) Value: 37
  misc_feature: MA Experiment 20001904 PARAMETER Experiment Name: At_Drought_Reproduction_P Parameter: Organism Value: A. thaliana
  misc_feature: MA Experiment 20001904 PARAMETER Experiment Name: At_Drought_Reproduction_P Parameter: Plant Line Value: WS
  misc_feature: MA Experiment 20001904 PARAMETER Experiment Name: At_Drought_Reproduction_P Parameter: Timepoint (day) Value: 7
  misc_feature: MA Experiment 20001904 PARAMETER Experiment Name: At_Drought_Reproduction_P Parameter: Tissue Value: Rosettes
  misc_feature: MA Experiment 20001904 PARAMETER Experiment Name: At_Drought_Reproduction_P Parameter: Treatment Value: Drought vs. No Drought
  misc_feature: MA Experiment ID: 20001905 Result: Up-regulated in Transcription
  misc_feature: MA Experiment 20001905 PARAMETER Experiment Name: At_Drought_Reproduction_P Parameter: Age (day) Value: 40
  misc_feature: MA Experiment 20001905 PARAMETER Experiment Name: At_Drought_Reproduction_P Parameter: Organism Value: A. thaliana
  misc_feature: MA Experiment 20001905 PARAMETER Experiment Name: At_Drought_Reproduction_P Parameter: Plant Line Value: WS
  misc_feature: MA Experiment 20001905 PARAMETER Experiment Name: At_Drought_Reproduction_P Parameter: Timepoint (day) Value: 10
  misc_feature: MA Experiment 20001905 PARAMETER Experiment Name: At_Drought_Reproduction_P Parameter: Tissue Value: Rosettes
  misc_feature: MA Experiment 20001905 PARAMETER Experiment Name: At_Drought_Reproduction_P Parameter: Treatment Value: Drought vs. No Drought
atttgaaacttttgggcagagagtctgaacaatcgctttgttgtcgtcaagaacgatacgtccctataaattagcaatgtcgctggttcgaacagtgacgatcgttctttttataatcgcgtttctgcaaaacgctgcggctcagaaaagacagcaaagtattgttaagtctcgcggtgcggttgcgacagatgatggacggtgttctgttatcgggatgcgtgttcttcgtgaaggaggaaacgcgattgatgcgtctgtggctgctgctctgtgtttgggcgttgtaagtcccgcgtctagcggtataggcggtggagcgtttacagtggttaagatagctggtgggaaagaaattgcttatgattctagagaaaccgctcctctaagagccactgagaatatgtatggaggtaatgttgacctaaagaagaaaggagccttatcagtaggcgttcccggggaagttgcaggtctattcacggcttggaaacaacatgggaagctaccgtggaagcggttagtgactcctgcagagaaacttgcagagggattcaagatttccaagtatctttatatgcagatgaacgcgactagaagcgatatcttagcagacaaaggtctctctgacctatttgtttcaaatggagagctcaagaaaccagggacgatttgccataacccaaaattggctttaaccttgaagctaattggagagtacggtccaaaagcattttacaatggcacagttggggttaacctagcgagagatatcaaaaaatctggaggaataataactttgaaagatctgcaaagttatagagttaagattaaagaaccgttgtctgcagacattcttggatatagagtccttggtatgcctcctccttcatctggtggcgctgcaatgatgcttgttttgaacattctttctcaatatgggattccatcaggtgtttcaggccctctcggtgttcatcgactaatcgaggctctgaaacatgcattcgcagttagaatgaacctcggggatccagatttcactgatgttaccaaggttgtttcggatatgttgtcgccaaagtttgcaaaagacttgaagagcaagataaacgaccaaaaaacttttgatccaaaatattacgggggcatgtggaatcagatcgacgaccacgggacaagtcatttatcgatcatagaccgcgagaggaacgctgtgtctatgactagtacaataaatggttactttggggcattgatgctatctccgagcacaggaatagttctgaacaacgaaatggacgatttctcaatccctatgaaatctaacggtaacttagatgttccaccaccagcaccagctaacttcatccgtcctggaaaacgacctttgtcctctatgtcacccaccattgtactcaaggacggtaaagtgaaagccgctgtgggtgcgagcggaggagccaacattattgccgggacaacggaagtttacttgaatcattttttcctcaagatggatcctctttcttccgtcttagctccaagaatctaccatcagctgataccaaacagagcttcgtacgagaactggacaacagtattcaatgatcatttcgagattcctaaagcaacaagagttgtgttggagaagaaaggtcatgtcctatctcctattgccggagggacgattgctcagttcatagttcaagaatccggtgagaactccggtggaagaagtgagcttgtggcagttagtgatcctcgaaaaggagggttcccttcaggatattgagaattttagatcgagatttattttatgtttttattgtttctttgattattgaaccgaactttgtgatgaatatatttttatttcacta

SEQ ID NO: 79973 - protein, 572 aa, Arabidopsis thaliana
  peptide (1)..(572): Ceres Seq. ID no. 12653944
  misc_feature (48)..(567): Pfam Name: Gamma-glutamyltranspeptidase Pfam Description: Gamma-glutamyltranspeptidase
  misc_feature (1)..(572): Homolog of NCBI NO: 22329258 NR Description: putative gamma-glutamyltransferase; protein id: supported by cDNA: gi_17978921 [Arabidopsis thaliana] AT4g39640/T19P19_30 [Arabidopsis thaliana]
  misc_feature (1)..(572): Homolog of NCBI NO: 7433816 NR Description: probable gamma-glutamyltransferase (EC 2.3.2.2)
  misc_feature (1)..(572): Homolog of NCBI NO: 2129587 NR Description: gamma-glutamyltransferase (EC 2.3.2.2) -
  misc_feature (1)..(572): Homolog of NCBI NO: 28208262 NR Description: gamma-glutamyl transferase [Raphanus sativus]
  misc_feature (1)..(572): Homolog of NCBI NO: 15235951 NR Description: putative gamma-glutamyltransferase; protein id:
  misc_feature (6)..(572): Homolog of NCBI NO: 27348118 NR Description: gamma-glutamyl transferase [Raphanus sativus]
  misc_feature (6)..(572): Homolog of NCBI NO: 38567882 NR Description: OSJNBa0036B21.10 [Oryza sativa (japonica
  misc_feature (29)..(570): Homolog of NCBI NO: 15233493 NR Description: gamma-glutamyltransferase-like protein; protein
  misc_feature (34)..(546): Homolog of NCBI NO: 34895870 NR Description: putative gamma-glutamyltransferase [Oryza sativa
  misc_feature (34)..(413): Homolog of NCBI NO: 34895872 NR Description: putative gamma-glutamyltransferase [Oryza sativa
MSLVRTVTIVLFIIAFLQNAAAQKRQQSIVKSRGAVATDDGRCSVIGMRVLREGGNAIDASVAAALCLGVVSPASSGIGGGAFTVVKIAGGKEIAYDSRETAPLRATENMYGGNVDLKKKGALSVGVPGEVAGLFTAWKQHGKLPWKRLVTPAEKLAEGFKISKYLYMQMNATRSDILADKGLSDLFVSNGELKKPGTICHNPKLALTLKLIGEYGPKAFYNGTVGVNLARDIKKSGGIITLKDLQSYRVKIKEPLSADILGYRVLGMPPPSSGGAAMMLVLNILSQYGIPSGVSGPLGVHRLIEALKHAFAVRMNLGDPDFTDVTKVVSDMLSPKFAKDLKSKINDQKTFDPKYYGGMWNQIDDHGTSHLSIIDRERNAVSMTSTINGYFGALMLSPSTGIVLNNEMDDFSIPMKSNGNLDVPPPAPANFIRPGKRPLSSMSPTIVLKDGKVKAAVGASGGANIIAGTTEVYLNHFFLKMDPLSSVLAPRIYHQLIPNRASYENWTTVFNDHFEIPKATRVVLEKKGHVLSPIAGGTIAQFIVQESGENSGGRSELVAVSDPRKGGFPSGY

SEQ ID NO: 79974 - protein, 525 aa, Arabidopsis thaliana
  peptide (1)..(525): Ceres Seq. ID no. 12653945
  misc_feature (1)..(520): Pfam Name: Gamma-glutamyltranspeptidase Pfam Description: Gamma-glutamyltranspeptidase
  misc_feature (1)..(525): Homolog of NCBI NO: 22329258 NR Description: putative gamma-glutamyltransferase; protein id: supported by cDNA: gi_17978921 [Arabidopsis thaliana] AT4g39640/T19P19_30 [Arabidopsis thaliana]
  misc_feature (1)..(525): Homolog of NCBI NO: 7433816 NR Description: probable gamma-glutamyltransferase (EC 2.3.2.2)
  misc_feature (1)..(525): Homolog of NCBI NO: 2129587 NR Description: gamma-glutamyltransferase (EC 2.3.2.2) -
  misc_feature (1)..(525): Homolog of NCBI NO: 28208262 NR Description: gamma-glutamyl transferase [Raphanus sativus]
  misc_feature (1)..(525): Homolog of NCBI NO: 15235951 NR Description: putative gamma-glutamyltransferase; protein id:
  misc_feature (1)..(525): Homolog of NCBI NO: 27348118 NR Description: gamma-glutamyl transferase [Raphanus sativus]
  misc_feature (1)..(525): Homolog of NCBI NO: 38567882 NR Description: OSJNBa0036B21.10 [Oryza sativa (japonica
  misc_feature (1)..(523): Homolog of NCBI NO: 15233493 NR Description: gamma-glutamyltransferase-like protein; protein
  misc_feature (1)..(499): Homolog of NCBI NO: 34895870 NR Description: putative gamma-glutamyltransferase [Oryza sativa
  misc_feature (1)..(366): Homolog of NCBI NO: 34895872 NR Description: putative gamma-glutamyltransferase [Oryza sativa
MRVLREGGNAIDASVAAALCLGVVSPASSGIGGGAFTVVKIAGGKEIAYDSRETAPLRATENMYGGNVDLKKKGALSVGVPGEVAGLFTAWKQHGKLPWKRLVTPAEKLAEGFKISKYLYMQMNATRSDILADKGLSDLFVSNGELKKPGTICHNPKLALTLKLIGEYGPKAFYNGTVGVNLARDIKKSGGIITLKDLQSYRVKIKEPLSADILGYRVLGMPPPSSGGAAMMLVLNILSQYGIPSGVSGPLGVHRLIEALKHAFAVRMNLGDPDFTDVTKVVSDMLSPKFAKDLKSKINDQKTFDPKYYGGMWNQIDDHGTSHLSIIDRERNAVSMTSTINGYFGALMLSPSTGIVLNNEMDDFSIPMKSNGNLDVPPPAPANFIRPGKRPLSSMSPTIVLKDGKVKAAVGASGGANIIAGTTEVYLNHFFLKMDPLSSVLAPRIYHQLIPNRASYENWTTVFNDHFEIPKATRVVLEKKGHVLSPIAGGTIAQFIVQESGENSGGRSELVAVSDPRKGGFPSGY

SEQ ID NO: 79975 - protein, 463 aa, Arabidopsis thaliana
  peptide (1)..(463): Ceres Seq. ID no. 12653946
  misc_feature (1)..(458): Pfam Name: Gamma-glutamyltranspeptidase Pfam Description: Gamma-glutamyltranspeptidase
  misc_feature (1)..(463): Homolog of NCBI NO: 22329258 NR Description: putative gamma-glutamyltransferase; protein id: supported by cDNA: gi_17978921 [Arabidopsis thaliana] AT4g39640/T19P19_30 [Arabidopsis thaliana]
  misc_feature (1)..(463): Homolog of NCBI NO: 7433816 NR Description: probable gamma-glutamyltransferase (EC 2.3.2.2)
  misc_feature (1)..(463): Homolog of NCBI NO: 2129587 NR Description: gamma-glutamyltransferase (EC 2.3.2.2) -
  misc_feature (1)..(463): Homolog of NCBI NO: 28208262 NR Description: gamma-glutamyl transferase [Raphanus sativus]
  misc_feature (1)..(463): Homolog of NCBI NO: 15235951 NR Description: putative gamma-glutamyltransferase; protein id:
  misc_feature (1)..(463): Homolog of NCBI NO: 27348118 NR Description: gamma-glutamyl transferase [Raphanus sativus]
  misc_feature (1)..(463): Homolog of NCBI NO: 38567882 NR Description: OSJNBa0036B21.10 [Oryza sativa (japonica
  misc_feature (1)..(461): Homolog of NCBI NO: 15233493 NR Description: gamma-glutamyltransferase-like protein; protein
  misc_feature (1)..(437): Homolog of NCBI NO: 34895870 NR Description: putative gamma-glutamyltransferase [Oryza sativa
  misc_feature (1)..(304): Homolog of NCBI NO: 34895872 NR Description: putative gamma-glutamyltransferase [Oryza sativa
MYGGNVDLKKKGALSVGVPGEVAGLFTAWKQHGKLPWKRLVTPAEKLAEGFKISKYLYMQMNATRSDILADKGLSDLFVSNGELKKPGTICHNPKLALTLKLIGEYGPKAFYNGTVGVNLARDIKKSGGIITLKDLQSYRVKIKEPLSADILGYRVLGMPPPSSGGAAMMLVLNILSQYGIPSGVSGPLGVHRLIEALKHAFAVRMNLGDPDFTDVTKVVSDMLSPKFAKDLKSKINDQKTFDPKYYGGMWNQIDDHGTSHLSIIDRERNAVSMTSTINGYFGALMLSPSTGIVLNNEMDDFSIPMKSNGNLDVPPPAPANFIRPGKRPLSSMSPTIVLKDGKVKAAVGASGGANIIAGTTEVYLNHFFLKMDPLSSVLAPRIYHQLIPNRASYENWTTVFNDHFEIPKATRVVLEKKGHVLSPIAGGTIAQFIVQESGENSGGRSELVAVSDPRKGGFPSGY

SEQ ID NO: 79976 - DNA, 1725 bp, Arabidopsis thaliana
  misc_feature (1)..(1725): Ceres Seq. ID no. 12653947
  misc_feature: MA Experiment ID: 20000185 Result: Down-regulated in Transcription
  misc_feature: MA Experiment 20000185 PARAMETER Experiment Name: At_Roots__P Parameter: Age (day) Value: 7 vs. 21
  misc_feature: MA Experiment 20000185 PARAMETER Experiment Name: At_Roots__P Parameter: Organism Value: A. thaliana
  misc_feature: MA Experiment 20000185 PARAMETER Experiment Name: At_Roots__P Parameter: Tissue Value: Roots vs. Whole Plant
  misc_feature: MA Experiment ID: 20000234 Result: Up-regulated in Transcription
  misc_feature: MA Experiment 20000234 PARAMETER Experiment Name: At_Siliques_P Parameter: Age (day) Value: 21
  misc_feature: MA Experiment 20000234 PARAMETER Experiment Name: At_Siliques_P Parameter: Organism Value: A. thaliana
  misc_feature: MA Experiment 20000234 PARAMETER Experiment Name: At_Siliques_P Parameter: Plant Line Value: WS
  misc_feature: MA Experiment 20000234 PARAMETER Experiment Name: At_Siliques_P Parameter: Tissue Value: Less Than 5mm Siliques vs. Whole Plant
  misc_feature: MA Experiment ID: 20000235 Result: Up-regulated in Transcription
  misc_feature: MA Experiment 20000235 PARAMETER Experiment Name: At_Siliques_P Parameter: Age (day) Value: 21
  misc_feature: MA Experiment 20000235 PARAMETER Experiment Name: At_Siliques_P Parameter: Organism Value: A. thaliana
  misc_feature: MA Experiment 20000235 PARAMETER Experiment Name: At_Siliques_P Parameter: Plant Line Value: WS
  misc_feature: MA Experiment 20000235 PARAMETER Experiment Name: At_Siliques_P Parameter: Tissue Value: 5-10mm Siliques vs. Whole Plant
  misc_feature: MA Experiment ID: 20001760 Result: Up-regulated in Transcription
  misc_feature: MA Experiment 20001760 PARAMETER Experiment Name: At_50mM_NH4NO3_L-to-H_P Parameter: Timepoint (hr) Value: 2
  misc_feature: MA Experiment 20001760 PARAMETER Experiment Name: At_50mM_NH4NO3_L-to-H_P Parameter: Tissue Value: Siliques
  misc_feature: MA Experiment 20001760 PARAMETER Experiment Name: At_50mM_NH4NO3_L-to-H_P Parameter: Treatment Value: 50mM NH4NO3 vs 100mM Mannitol
  misc_feature: MA Experiment ID: 20001910 Result: Up-regulated in Transcription
  misc_feature: MA Experiment 20001910 PARAMETER Experiment Name: At_Drought_Reproduction_P Parameter: Age (day) Value: 37
  misc_feature: MA Experiment 20001910 PARAMETER Experiment Name: At_Drought_Reproduction_P Parameter: Organism Value: A. thaliana
  misc_feature: MA Experiment 20001910 PARAMETER Experiment Name: At_Drought_Reproduction_P Parameter: Plant Line Value: WS
  misc_feature: MA Experiment 20001910 PARAMETER Experiment Name: At_Drought_Reproduction_P Parameter: Timepoint (day) Value: 7
  misc_feature: MA Experiment 20001910 PARAMETER Experiment Name: At_Drought_Reproduction_P Parameter: Tissue Value: Flowers
  misc_feature: MA Experiment 20001910 PARAMETER Experiment Name: At_Drought_Reproduction_P Parameter: Treatment Value: Drought vs. No Drought
atgtcgctcgttcgtactgcgacgatcgctcttcttctaatcgcgtttctgcaaaacgctaacgctgtgaaaaatctgcaaagtattgttgcgtatcacggtgcggttgcgacagacgatggacggtgttctgcaatagggacgaatgttcttcgtcaaggaggaaacgcgattgatgcgtcggtggctgctgctctttgtttgggcgttgtcagtcccgcatctagcggtataggcggtggagcgtttacaatgattaagctagctaatggcacggaagttgcttatgattccagagaaaccgctcctctaagcgccactgaggatatgtatggtgataatcctgagcgaaagaagaaaggatccttgtcagtaggcgttcccggggaagtcgcgggtctatacacggcttggacacaacacgggaagttaccgtggaagcagttagtagaacctgctgagaaacttgcagctgaaggattcaagatttcaaaatatctctatatgcagatgaatgcgactagaagcgatatcttagcggacaaaggtctctctgagctatttgtttcaaatggagagctcaagaaaccaggggcgatttgccgtaacccgaaattggctgatacactaagccaaatcgctgaatacggtccaaaagcgttttacaatggcacggttgggtttaacctagtgagtgatatacaaaaagccggagggataataactttgaaagatttgcagaattacaacgttaaggttaaagaaccattatctacggagattcttggataccgattactcggcatgcctcctccttcatctggtggccctgcaatgatgcttattttgaacattcttgctcaatatggtattccatcgggtgtttccggccccctcggtgttcatcgactagttgaggctctcaaacatgcattcgcagttagaatgaacctcggggatccagattttgtccctgaagttactaatgttgttgcagatatgttatctccaaagtttgcacaagacttgaagagcaagataaacgatgagaagacctttgatccaaaatattacggtggcaaatggggtcagatcaaggatcatgggacgagccatttatcgataatagattctgagagaaatgctgtttcaatgactagtacaatcaacggatactttggggcaataatgctgtctccgagcaccggaatcgttctaaacaacgaaatggacgatttctcgatcccgacgaaatccggaggtgacccagatgtgcccccaccagcaccggctaacttcatccgaccggggaaacgacctttgtcctctatgactcccaccattgtactcaaggacggtaaagtgaaagcagcattgggtgcgagtggaggaatgtacatcatcgccggtacaacacaagtttacttaaatcatttcttcctcaacatggatcctctctcttccgttgttgctccaagaatctaccaccagctgataccgaacaaagcttcgtatgagaattggacgacagtgtatagtgaccatttcgagattcctgaagagataagacttgtgttggagaagaaaggtcaagtcctaacgccgatcgccggagggacgatttctcagctcatagttgaacaatccgatggaaaatccggtggaattagtaagcttgtggcggttagtgatccaaggaaaggagggttcccttcaggatattga

SEQ ID NO: 79977 - protein, 574 aa, Arabidopsis thaliana
  peptide (1)..(574): Ceres Seq. ID no. 12653948
  misc_feature (48)..(569): Pfam Name: Gamma-glutamyltranspeptidase Pfam Description: Gamma-glutamyltranspeptidase
  misc_feature (1)..(574): Homolog of NCBI NO: 15235951 NR Description: putative gamma-glutamyltransferase; protein id:
  misc_feature (1)..(574): Homolog of NCBI NO: 22329258 NR Description: putative gamma-glutamyltransferase; protein id: supported by cDNA: gi_17978921 [Arabidopsis thaliana] AT4g39640/T19P19_30 [Arabidopsis thaliana]
  misc_feature (1)..(574): Homolog of NCBI NO: 7433816 NR Description: probable gamma-glutamyltransferase (EC 2.3.2.2)
  misc_feature (1)..(574): Homolog of NCBI NO: 28208262 NR Description: gamma-glutamyl transferase [Raphanus sativus]
  misc_feature (1)..(574): Homolog of NCBI NO: 2129587 NR Description: gamma-glutamyltransferase (EC 2.3.2.2) -
  misc_feature (6)..(574): Homolog of NCBI NO: 27348118 NR Description: gamma-glutamyl transferase [Raphanus sativus]
  misc_feature (6)..(574): Homolog of NCBI NO: 38567882 NR Description: OSJNBa0036B21.10 [Oryza sativa (japonica
  misc_feature (33)..(572): Homolog of NCBI NO: 15233493 NR Description: gamma-glutamyltransferase-like protein; protein
  misc_feature (34)..(547): Homolog of NCBI NO: 34895870 NR Description: putative gamma-glutamyltransferase [Oryza sativa
  misc_feature (34)..(476): Homolog of NCBI NO: 34895872 NR Description: putative gamma-glutamyltransferase [Oryza sativa
MSLVRTATIALLLIAFLQNANAVKNLQSIVAYHGAVATDDGRCSAIGTNVLRQGGNAIDASVAAALCLGVVSPASSGIGGGAFTMIKLANGTEVAYDSRETAPLSATEDMYGDNPERKKKGSLSVGVPGEVAGLYTAWTQHGKLPWKQLVEPAEKLAAEGFKISKYLYMQMNATRSDILADKGLSELFVSNGELKKPGAICRNPKLADTLSQIAEYGPKAFYNGTVGFNLVSDIQKAGGIITLKDLQNYNVKVKEPLSTEILGYRLLGMPPPSSGGPAMMLILNILAQYGIPSGVSGPLGVHRLVEALKHAFAVRMNLGDPDFVPEVTNVVADMLSPKFAQDLKSKINDEKTFDPKYYGGKWGQIKDHGTSHLSIIDSERNAVSMTSTINGYFGAIMLSPSTGIVLNNEMDDFSIPTKSGGDPDVPPPAPANFIRPGKRPLSSMTPTIVLKDGKVKAALGASGGMYIIAGTTQVYLNHFFLNMDPLSSVVAPRIYHQLIPNKASYENWTTVYSDHFEIPEEIRLVLEKKGQVLTPIAGGTISQLIVEQSDGKSGGISKLVAVSDPRKGGFPSGY

SEQ ID NO: 79978 - protein, 490 aa, Arabidopsis thaliana
  peptide (1)..(490): Ceres Seq. ID no. 12653949
  misc_feature (1)..(485): Pfam Name: Gamma-glutamyltranspeptidase Pfam Description: Gamma-glutamyltranspeptidase
  misc_feature (1)..(490): Homolog of NCBI NO: 15235951 NR Description: putative gamma-glutamyltransferase; protein id:
  misc_feature (1)..(490): Homolog of NCBI NO: 22329258 NR Description: putative gamma-glutamyltransferase; protein id: supported by cDNA: gi_17978921 [Arabidopsis thaliana] AT4g39640/T19P19_30 [Arabidopsis thaliana]
  misc_feature (1)..(490): Homolog of NCBI NO: 7433816 NR Description: probable gamma-glutamyltransferase (EC 2.3.2.2)
  misc_feature (1)..(490): Homolog of NCBI NO: 28208262 NR Description: gamma-glutamyl transferase [Raphanus sativus]
  misc_feature (1)..(490): Homolog of NCBI NO: 2129587 NR Description: gamma-glutamyltransferase (EC 2.3.2.2) -
  misc_feature (1)..(490): Homolog of NCBI NO: 27348118 NR Description: gamma-glutamyl transferase [Raphanus sativus]
  misc_feature (1)..(490): Homolog of NCBI NO: 38567882 NR Description: OSJNBa0036B21.10 [Oryza sativa (japonica
  misc_feature (1)..(488): Homolog of NCBI NO: 15233493 NR Description: gamma-glutamyltransferase-like protein; protein
  misc_feature (1)..(463): Homolog of NCBI NO: 34895870 NR Description: putative gamma-glutamyltransferase [Oryza sativa
  misc_feature (1)..(392): Homolog of NCBI NO: 34895872 NR Description: putative gamma-glutamyltransferase [Oryza sativa
MIKLANGTEVAYDSRETAPLSATEDMYGDNPERKKKGSLSVGVPGEVAGLYTAWTQHGKLPWKQLVEPAEKLAAEGFKISKYLYMQMNATRSDILADKGLSELFVSNGELKKPGAICRNPKLADTLSQIAEYGPKAFYNGTVGFNLVSDIQKAGGIITLKDLQNYNVKVKEPLSTEILGYRLLGMPPPSSGGPAMMLILNILAQYGIPSGVSGPLGVHRLVEALKHAFAVRMNLGDPDFVPEVTNVVADMLSPKFAQDLKSKINDEKTFDPKYYGGKWGQIKDHGTSHLSIIDSERNAVSMTSTINGYFGAIMLSPSTGIVLNNEMDDFSIPTKSGGDPDVPPPAPANFIRPGKRPLSSMTPTIVLKDGKVKAALGASGGMYIIAGTTQVYLNHFFLNMDPLSSVVAPRIYHQLIPNKASYENWTTVYSDHFEIPEEIRLVLEKKGQVLTPIAGGTISQLIVEQSDGKSGGISKLVAVSDPRKGGFPSGY

SEQ ID NO: 79979 - protein, 465 aa, Arabidopsis thaliana
  peptide (1)..(465): Ceres Seq. ID no. 12653950
  misc_feature (1)..(460): Pfam Name: Gamma-glutamyltranspeptidase Pfam Description: Gamma-glutamyltranspeptidase
  misc_feature (1)..(465): Homolog of NCBI NO: 15235951 NR Description: putative gamma-glutamyltransferase; protein id:
  misc_feature (1)..(465): Homolog of NCBI NO: 22329258 NR Description: putative gamma-glutamyltransferase; protein id: supported by cDNA: gi_17978921 [Arabidopsis thaliana] AT4g39640/T19P19_30 [Arabidopsis thaliana]
  misc_feature (1)..(465): Homolog of NCBI NO: 7433816 NR Description: probable gamma-glutamyltransferase (EC 2.3.2.2)
  misc_feature (1)..(465): Homolog of NCBI NO: 28208262 NR Description: gamma-glutamyl transferase [Raphanus sativus]
  misc_feature (1)..(465): Homolog of NCBI NO: 2129587 NR Description: gamma-glutamyltransferase (EC 2.3.2.2) -
  misc_feature (1)..(465): Homolog of NCBI NO: 27348118 NR Description: gamma-glutamyl transferase [Raphanus sativus]
  misc_feature (1)..(465): Homolog of NCBI NO: 38567882 NR Description: OSJNBa0036B21.10 [Oryza sativa (japonica
  misc_feature (1)..(463): Homolog of NCBI NO: 15233493 NR Description: gamma-glutamyltransferase-like protein; protein
  misc_feature (1)..(438): Homolog of NCBI NO: 34895870 NR Description: putative gamma-glutamyltransferase [Oryza sativa
  misc_feature (1)..(367): Homolog of NCBI NO: 34895872 NR Description: putative gamma-glutamyltransferase [Oryza sativa
MYGDNPERKKKGSLSVGVPGEVAGLYTAWTQHGKLPWKQLVEPAEKLAAEGFKISKYLYMQMNATRSDILADKGLSELFVSNGELKKPGAICRNPKLADTLSQIAEYGPKAFYNGTVGFNLVSDIQKAGGIITLKDLQNYNVKVKEPLSTEILGYRLLGMPPPSSGGPAMMLILNILAQYGIPSGVSGPLGVHRLVEALKHAFAVRMNLGDPDFVPEVTNVVADMLSPKFAQDLKSKINDEKTFDPKYYGGKWGQIKDHGTSHLSIIDSERNAVSMTSTINGYFGAIMLSPSTGIVLNNEMDDFSIPTKSGGDPDVPPPAPANFIRPGKRPLSSMTPTIVLKDGKVKAALGASGGMYIIAGTTQVYLNHFFLNMDPLSSVVAPRIYHQLIPNKASYENWTTVYSDHFEIPEEIRLVLEKKGQVLTPIAGGTISQLIVEQSDGKSGGISKLVAVSDPRKGGFPSGY

SEQ ID NO: 79980 - DNA, 2376 bp, Arabidopsis thaliana
  misc_feature (1)..(2376): Ceres Seq. ID no. 12653951
  misc_feature: MA Experiment ID: 20000171 Result: Up-regulated in Transcription
  misc_feature: MA Experiment 20000171 PARAMETER Experiment Name: At_42deg_Heat_P Parameter: Age (day) Value: 14
  misc_feature: MA Experiment 20000171 PARAMETER Experiment Name: At_42deg_Heat_P Parameter: Organism Value: A. thaliana
  misc_feature: MA Experiment 20000171 PARAMETER Experiment Name: At_42deg_Heat_P Parameter: Plant Line Value: WS
  misc_feature: MA Experiment 20000171 PARAMETER Experiment Name: At_42deg_Heat_P Parameter: Temperature (deg C) Value: 42 vs. 22
  misc_feature: MA Experiment 20000171 PARAMETER Experiment Name: At_42deg_Heat_P Parameter: Timepoint (hr) Value: 1
  misc_feature: MA Experiment 20000171 PARAMETER Experiment Name: At_42deg_Heat_P Parameter: Tissue Value: Aerial
accggaggctccgagtcttctccgtccgtcgtaacatcttcgctctctcgttcggcgtttgtatcaccagagacgcgacgcgataatgcttcggaagtcggttctcgagctgtcttctcgtttgtcaataaagagattcccgaggaatttgggagctcagaggtttcatttgagctcttcgagaaatgcatctacatctggtaaaaatggtctccctggagctaaacccgttgggaaaccagatgcctcaaaagttgatcctccaaaagtgactcctcctcctcctactaaaggaaattcttcaaaagtggttataggaggtgttgcaatcgctggggcttttctggtagcgtatcagactggctatttggatcaatatctggggaaagaacagcagaaattaagtgagcgaattcattctgatgctctaactgaaaagctggaggaggctcatcatttgaatgtaccttccggtgttgaagattctactgaaaaagatggaaaagttgaaacgcaacctcaagttactcattctgaagcttccgagggagtgcagagtgacatagaactgcaacccgagtctgatctatcatctgaccgttttacatatatttcttctaaccaagaggagacacctcaagaaactgtcattgatagagcagagataaacttgcctatttctgcatctgaagattcaggagctaagccggacatgccatcagaaattatttctgaggcagaaagtgtgaagttggaagctgtacccaaacctggggatagtcctattattgttaatgcccagtctagttcggttcatagagaaagcgaaacggaatctgcttcaccaaaggatcctgccgctctaaagacacctgaggatggcattgagcgggaagtacaattaccaggttctctccttaaggaatataatctagaaggcagtgatactgaaagcactgggtcctcgtcaataggggagcaaataactaaagaaactgaggcctttcctaactcaaccgaggggctgaaagatagttacatgactgaggatggaaagttggtacttgattttctggctgccattcatgcagctgagaagcaacaggcccatttagatgcccaggtttttgctgaagaattacgagccttgaaggagaagtatgaaaatgagttaagagaccttagggcacgtgagctaatgcgtatagaggaggcagcaatattggataaggagctaaaaagagaacgaacaaaagcagcagctgctattaaagcaatccaggagagaatggaagataagctcaaagctgaacttgaacaaaaggaaactgaagcgcagttggctttgagtaaagctgaagaattggcaaaagctgagatgatttcgacaattgcaaaagaaaaggcagcacagattgaaaaaatggcagaggcagatcttaatataaaggcactgagtatggcattctatgcgcgctctgaagaggctcgccaaagtcattcagttcacaagcttgcattgggtgcacttgcgctggatgatacactctcgaaaggactgccagtccaaaaagaaatcgatacgcttcagacttatcttgaagggactcataaagattcaatcctaggcctggtattatcatctcttccagaagaagcacgatccaatggaaccgacacagtgctgcaattgaatcagaagtttgataccttgaaaggaacacttagacatttcagtctcattccacctggtggcggaggcatcttagcacattccctagcacatgtagcatcttcgctaaagtttaaagaagtggatcaagctaatggaggcatcgaatctgtaattaaaaaggtggataattacttggcggaaggaaaactagcagaagcagcagcaacactagaagaaggtgttaaaggaagtaaagcagaggaaatagtgagtgattgggtgcgacgtgcaagaaacagagccattacagaacaagctcttacgcttctccaatcttatgcaacttgtgttagcctcacttgaatcccttccagatcttccattgaggtacattgcttcttctttttttttaattcgatactgagattcctggagttaacaattattttgcgggaagtagtaccaactctttttctggtgaagaggaagaattacgattctctattccaatgtttatgtttgaatcacagctgttcatgttatctgaattagaatgttaccagaaagtttgatacaaaaataagatcgaatctcacgaatttatgatatttgtctggaatgggatcaggagatgttgatttggtgatgaatgttgttgctgtactgatgtggcatcatgtggtatatcactgggcttataa

SEQ ID NO: 79981 - protein, 650 aa, Arabidopsis thaliana
  peptide (1)..(650): Ceres Seq. ID no. 12653952
  misc_feature (103)..(510): Pfam Name: Caldesmon Pfam Description: Caldesmon
  misc_feature (20)..(539): Homolog of NCBI NO: 7487220 NR Description: hypothetical protein T19P19.80 - Arabidopsis >gi|3080438|emb|CAA18755.1| putative protein [Arabidopsis >gi|7270953|emb|CAB80632.1| putative protein [Arabidopsis
  misc_feature (349)..(650): Homolog of NCBI NO: 7487220 NR Description: hypothetical protein T19P19.80 - Arabidopsis >gi|3080438|emb|CAA18755.1| putative protein [Arabidopsis >gi|7270953|emb|CAB80632.1| putative protein [Arabidopsis
  misc_feature (178)..(644): Homolog of NCBI NO: 40739918 NR Description: hypothetical protein AN3843.2 [Aspergillus
  misc_feature (298)..(649): Homolog of NCBI NO: 39591065 NR Description: Hypothetical protein CBG02064 [Caenorhabditis
  misc_feature (39)..(449): Homolog of NCBI NO: 40741978 NR Description: hypothetical protein AN7262.2 [Aspergillus
MLRKSVLELSSRLSIKRFPRNLGAQRFHLSSSRNASTSGKNGLPGAKPVGKPDASKVDPPKVTPPPPTKGNSSKVVIGGVAIAGAFLVAYQTGYLDQYLGKEQQKLSERIHSDALTEKLEEAHHLNVPSGVEDSTEKDGKVETQPQVTHSEASEGVQSDIELQPESDLSSDRFTYISSNQEETPQETVIDRAEINLPISASEDSGAKPDMPSEIISEAESVKLEAVPKPGDSPIIVNAQSSSVHRESETESASPKDPAALKTPEDGIEREVQLPGSLLKEYNLEGSDTESTGSSSIGEQITKETEAFPNSTEGLKDSYMTEDGKLVLDFLAAIHAAEKQQAHLDAQVFAEELRALKEKYENELRDLRARELMRIEEAAILDKELKRERTKAAAAIKAIQERMEDKLKAELEQKETEAQLALSKAEELAKAEMISTIAKEKAAQIEKMAEADLNIKALSMAFYARSEEARQSHSVHKLALGALALDDTLSKGLPVQKEIDTLQTYLEGTHKDSILGLVLSSLPEEARSNGTDTVLQLNQKFDTLKGTLRHFSLIPPGGGGILAHSLAHVASSLKFKEVDQANGGIESVIKKVDNYLAEGKLAEAAATLEEGVKGSKAEEIVSDWVRRARNRAITEQALTLLQSYATCVSLT

SEQ ID NO: 79982 - protein, 441 aa, Arabidopsis thaliana
  peptide (1)..(441): Ceres Seq. ID no. 12653953
  misc_feature (1)..(301): Pfam Name: Caldesmon Pfam Description: Caldesmon
  misc_feature (1)..(330): Homolog of NCBI NO: 7487220 NR Description: hypothetical protein T19P19.80 - Arabidopsis >gi|3080438|emb|CAA18755.1| putative protein [Arabidopsis >gi|7270953|emb|CAB80632.1| putative protein [Arabidopsis
  misc_feature (140)..(441): Homolog of NCBI NO: 7487220 NR Description: hypothetical protein T19P19.80 - Arabidopsis >gi|3080438|emb|CAA18755.1| putative protein [Arabidopsis >gi|7270953|emb|CAB80632.1| putative protein [Arabidopsis
  misc_feature (1)..(435): Homolog of NCBI NO: 40739918 NR Description: hypothetical protein AN3843.2 [Aspergillus
  misc_feature (89)..(440): Homolog of NCBI NO: 39591065 NR Description: Hypothetical protein CBG02064 [Caenorhabditis
  misc_feature (1)..(240): Homolog of NCBI NO: 40741978 NR Description: hypothetical protein AN7262.2 [Aspergillus
MPSEIISEAESVKLEAVPKPGDSPIIVNAQSSSVHRESETESASPKDPAALKTPEDGIEREVQLPGSLLKEYNLEGSDTESTGSSSIGEQITKETEAFPNSTEGLKDSYMTEDGKLVLDFLAAIHAAEKQQAHLDAQVFAEELRALKEKYENELRDLRARELMRIEEAAILDKELKRERTKAAAAIKAIQERMEDKLKAELEQKETEAQLALSKAEELAKAEMISTIAKEKAAQIEKMAEADLNIKALSMAFYARSEEARQSHSVHKLALGALALDDTLSKGLPVQKEIDTLQTYLEGTHKDSILGLVLSSLPEEARSNGTDTVLQLNQKFDTLKGTLRHFSLIPPGGGGILAHSLAHVASSLKFKEVDQANGGIESVIKKVDNYLAEGKLAEAAATLEEGVKGSKAEEIVSDWVRRARNRAITEQALTLLQSYATCVSLT

SEQ ID NO: 79983 - protein, 332 aa, Arabidopsis thaliana
  peptide (1)..(332): Ceres Seq. ID no. 12653954
  misc_feature (1)..(192): Pfam Name: Caldesmon Pfam Description: Caldesmon
  misc_feature (1)..(221): Homolog of NCBI NO: 7487220 NR Description: hypothetical protein T19P19.80 - Arabidopsis >gi|3080438|emb|CAA18755.1| putative protein [Arabidopsis >gi|7270953|emb|CAB80632.1| putative protein [Arabidopsis
  misc_feature (31)..(332): Homolog of NCBI NO: 7487220 NR Description: hypothetical protein T19P19.80 - Arabidopsis >gi|3080438|emb|CAA18755.1| putative protein [Arabidopsis >gi|7270953|emb|CAB80632.1| putative protein [Arabidopsis
  misc_feature (1)..(326): Homolog of NCBI NO: 40739918 NR Description: hypothetical protein AN3843.2 [Aspergillus
  misc_feature (1)..(331): Homolog of NCBI NO: 39591065 NR Description: Hypothetical protein CBG02064 [Caenorhabditis
  misc_feature (1)..(131): Homolog of NCBI NO: 40741978 NR Description: hypothetical protein AN7262.2 [Aspergillus
MTEDGKLVLDFLAAIHAAEKQQAHLDAQVFAEELRALKEKYENELRDLRARELMRIEEAAILDKELKRERTKAAAAIKAIQERMEDKLKAELEQKETEAQLALSKAEELAKAEMISTIAKEKAAQIEKMAEADLNIKALSMAFYARSEEARQSHSVHKLALGALALDDTLSKGLPVQKEIDTLQTYLEGTHKDSILGLVLSSLPEEARSNGTDTVLQLNQKFDTLKGTLRHFSLIPPGGGGILAHSLAHVASSLKFKEVDQANGGIESVIKKVDNYLAEGKLAEAAATLEEGVKGSKAEEIVSDWVRRARNRAITEQALTLLQSYATCVSLT

SEQ ID NO: 79984 - DNA, 477 bp, Arabidopsis thaliana
  misc_feature (1)..(477): Ceres Seq. ID no. 12653955
  misc_feature: MA Experiment ID: 20000437 Result: Up-regulated in Transcription
  misc_feature: MA Experiment 20000437 PARAMETER Experiment Name: At_Drought_P Parameter: Age (day) Value: 8
  misc_feature: MA Experiment 20000437 PARAMETER Experiment Name: At_Drought_P Parameter: Organism Value: A. thaliana
  misc_feature: MA Experiment 20000437 PARAMETER Experiment Name: At_Drought_P Parameter: Plant Line Value: WS
  misc_feature: MA Experiment 20000437 PARAMETER Experiment Name: At_Drought_P Parameter: Timepoint (hr) Value: 24
  misc_feature: MA Experiment 20000437 PARAMETER Experiment Name: At_Drought_P Parameter: Tissue Value: Whole Plant
  misc_feature: MA Experiment 20000437 PARAMETER Experiment Name: At_Drought_P Parameter: Treatment Value: Drought vs. No Drought
  misc_feature: MA Experiment ID: 20001451 Result: Up-regulated in Transcription
  misc_feature: MA Experiment 20001451 PARAMETER Experiment Name: At_Far-red-induction_P Parameter: Age (day) Value: 7
  misc_feature: MA Experiment 20001451 PARAMETER Experiment Name: At_Far-red-induction_P Parameter: Light Value: Far-red vs. White
  misc_feature: MA Experiment 20001451 PARAMETER Experiment Name: At_Far-red-induction_P Parameter: Organism Value: A. thaliana
  misc_feature: MA Experiment 20001451 PARAMETER Experiment Name: At_Far-red-induction_P Parameter: Plant Line Value: Columbia
  misc_feature: MA Experiment 20001451 PARAMETER Experiment Name: At_Far-red-induction_P Parameter: Timepoint (hr) Value: 24
  misc_feature: MA Experiment 20001451 PARAMETER Experiment Name: At_Far-red-induction_P Parameter: Tissue Value: Whole Plant
  misc_feature: MA Experiment ID: 20001910 Result: Up-regulated in Transcription
  misc_feature: MA Experiment 20001910 PARAMETER Experiment Name: At_Drought_Reproduction_P Parameter: Age (day) Value: 37
  misc_feature: MA Experiment 20001910 PARAMETER Experiment Name: At_Drought_Reproduction_P Parameter: Organism Value: A. thaliana
  misc_feature: MA Experiment 20001910 PARAMETER Experiment Name: At_Drought_Reproduction_P Parameter: Plant Line Value: WS
  misc_feature: MA Experiment 20001910 PARAMETER Experiment Name: At_Drought_Reproduction_P Parameter: Timepoint (day) Value: 7
  misc_feature: MA Experiment 20001910 PARAMETER Experiment Name: At_Drought_Reproduction_P Parameter: Tissue Value: Flowers
  misc_feature: MA Experiment 20001910 PARAMETER Experiment Name: At_Drought_Reproduction_P Parameter: Treatment Value: Drought vs. No Drought
  misc_feature: MA Experiment ID: 20001911 Result: Up-regulated in Transcription
  misc_feature: MA Experiment 20001911 PARAMETER Experiment Name: At_Drought_Reproduction_P Parameter: Age (day) Value: 40
  misc_feature: MA Experiment 20001911 PARAMETER Experiment Name: At_Drought_Reproduction_P Parameter: Organism Value: A. thaliana
  misc_feature: MA Experiment 20001911 PARAMETER Experiment Name: At_Drought_Reproduction_P Parameter: Plant Line Value: WS
  misc_feature: MA Experiment 20001911 PARAMETER Experiment Name: At_Drought_Reproduction_P Parameter: Timepoint (day) Value: 10
  misc_feature: MA Experiment 20001911 PARAMETER Experiment Name: At_Drought_Reproduction_P Parameter: Tissue Value: Flowers
  misc_feature: MA Experiment 20001911 PARAMETER Experiment Name: At_Drought_Reproduction_P Parameter: Treatment Value: Drought vs. No Drought
atgggagttgggggaacgttggagtatatatcagagctaatagggaatggaggaagccatagttatggaaaaaggaagaagaagaagcagtttcaaacagtagagctcaaagttaggatggattgtgatggttgtgtcctcaaaatcaaaaactctctttcttctctaaaaggagtgaaaacggtggagataaacaagaagcaacagaaggtgacagtgagtggttatgcggatgcgagcaaggtgctgaagaaggctaaagcgacggggaagaaagccgagatatggccgtacgtaccgtacaacttggtggctcagccgtacatagctcaggcttatgataagaaagcaccgcctggttacgtcagaaaagttgacccaaacgtcaccaccgggacgatggctgtttactacgatgacccttcttatacttctttgtttagtgatgataatcctaatgcttgctctattatgtag

SEQ ID NO: 79985 - protein, 158 aa, Arabidopsis thaliana
  peptide (1)..(158): Ceres Seq. ID no. 12653956
  misc_feature (35)..(95): Pfam Name: Heavy-metal-associated domain Pfam Description: Heavy-metal-associated domain
  misc_feature (1)..(158): Homolog of NCBI NO: 15235984 NR Description: copper chaperone (CCH)-related; protein id:
  misc_feature (1)..(158): Homolog of NCBI NO: 15236529 NR Description: copper chaperone (CCH)-related; protein id: supported by cDNA: gi_17979352, supported by cDNA: gi_20465504
  misc_feature (3)..(158): Homolog of NCBI NO: 37573003 NR Description: putative farnesylated protein [Oryza sativa
  misc_feature (5)..(158): Homolog of NCBI NO: 15219990 NR Description: copper chaperone (CCH)-related; protein id: supported by cDNA: gi_13899062, supported by cDNA: gi_15450582, by cDNA: gi_17386147, supported by cDNA: gi_18377445
  misc_feature (5)..(158): Homolog of NCBI NO: 15223925 NR Description: copper chaperone (CCH)-related; protein id: supported by cDNA: 39127. [Arabidopsis thaliana]
  misc_feature (26)..(158): Homolog of NCBI NO: 23304411 NR Description: farnesylated protein 1 [Hordeum vulgare subsp.
  misc_feature (26)..(158): Homolog of NCBI NO: 38346843 NR Description: OSJNBa0091C12.3 [Oryza sativa (japonica
  misc_feature (5)..(158): Homolog of NCBI NO: 15233937 NR Description: copper chaperone (CCH)-related; protein id: supported by cDNA: 10238., supported by cDNA: gi_11908067, by cDNA: gi_12642881, supported by cDNA: gi_13265451, supported
  misc_feature (5)..(158): Homolog of NCBI NO: 21536547 NR Description: farnesylated protein (ATFP6) [Arabidopsis
MGVGGTLEYISELIGNGGSHSYGKRKKKKQFQTVELKVRMDCDGCVLKIKNSLSSLKGVKTVEINKKQQKVTVSGYADASKVLKKAKATGKKAEIWPYVPYNLVAQPYIAQAYDKKAPPGYVRKVDPNVTTGTMAVYYDDPSYTSLFSDDNPNACSIM

SEQ ID NO: 79986 - protein, 119 aa, Arabidopsis thaliana
  peptide (1)..(119): Ceres Seq. ID no. 12653957
  misc_feature (1)..(56): Pfam Name: Heavy-metal-associated domain Pfam Description: Heavy-metal-associated domain
  misc_feature (1)..(119): Homolog of NCBI NO: 15235984 NR Description: copper chaperone (CCH)-related; protein id:
  misc_feature (1)..(119): Homolog of NCBI NO: 15236529 NR Description: copper chaperone (CCH)-related; protein id: supported by cDNA: gi_17979352, supported by cDNA: gi_20465504
  misc_feature (1)..(119): Homolog of NCBI NO: 37573003 NR Description: putative farnesylated protein [Oryza sativa
  misc_feature (1)..(119): Homolog of NCBI NO: 15219990 NR Description: copper chaperone (CCH)-related; protein id: supported by cDNA: gi_13899062, supported by cDNA: gi_15450582, by cDNA: gi_17386147, supported by cDNA: gi_18377445
  misc_feature (1)..(119): Homolog of NCBI NO: 15223925 NR Description: copper chaperone (CCH)-related; protein id: supported by cDNA: 39127. [Arabidopsis thaliana]
  misc_feature (1)..(119): Homolog of NCBI NO: 23304411 NR Description: farnesylated protein 1 [Hordeum vulgare subsp.
  misc_feature (1)..(119): Homolog of NCBI NO: 38346843 NR Description: OSJNBa0091C12.3 [Oryza sativa (japonica
  misc_feature (1)..(119): Homolog of NCBI NO: 15233937 NR Description: copper chaperone (CCH)-related; protein id: supported by cDNA: 10238., supported by cDNA: gi_11908067, by cDNA: gi_12642881, supported by cDNA: gi_13265451, supported
  misc_feature (1)..(119): Homolog of NCBI NO: 21536547 NR Description: farnesylated protein (ATFP6) [Arabidopsis
MDCDGCVLKIKNSLSSLKGVKTVEINKKQQKVTVSGYADASKVLKKAKATGKKAEIWPYVPYNLVAQPYIAQAYDKKAPPGYVRKVDPNVTTGTMAVYYDDPSYTSLFSDDNPNACSIM

SEQ ID NO: 79987 - DNA, 866 bp, Arabidopsis thaliana
  misc_feature (1)..(866): Ceres Seq. ID no. 12653958
  misc_feature: MA Experiment ID: 20000180 Result: Up-regulated in Transcription
  misc_feature: MA Experiment 20000180 PARAMETER Experiment Name: At_Germinating_Seeds_P Parameter: Age (hr) Value: 24 vs. 0
  misc_feature: MA Experiment 20000180 PARAMETER Experiment Name: At_Germinating_Seeds_P Parameter: Tissue Value: Germinating Seeds
  misc_feature: MA Experiment ID: 20000182 Result: Down-regulated in Transcription
  misc_feature: MA Experiment 20000182 PARAMETER Experiment Name: At_2mM_SA_P Parameter: Age (day) Value: 14
  misc_feature: MA Experiment 20000182 PARAMETER Experiment Name: At_2mM_SA_P Parameter: Organism Value: A. thaliana
  misc_feature: MA Experiment 20000182 PARAMETER Experiment Name: At_2mM_SA_P Parameter: Plant Line Value: WS
  misc_feature: MA Experiment 20000182 PARAMETER Experiment Name: At_2mM_SA_P Parameter: Timepoint (hr) Value: 6
  misc_feature: MA Experiment 20000182 PARAMETER Experiment Name: At_2mM_SA_P Parameter: Tissue Value: Aerial
  misc_feature: MA Experiment 20000182 PARAMETER Experiment Name: At_2mM_SA_P Parameter: Treatment Value: 2mM SA vs. No Treatment
  misc_feature: MA Experiment ID: 20000264 Result: Down-regulated in Transcription
  misc_feature: MA Experiment 20000264 PARAMETER Experiment Name: At_Open_Flower_P Parameter: Age (day) Value: 21
  misc_feature: MA Experiment 20000264 PARAMETER Experiment Name: At_Open_Flower_P Parameter: Plant Line Value: WS
  misc_feature: MA Experiment 20000264 PARAMETER Experiment Name: At_Open_Flower_P Parameter: Tissue Value: Open Flower vs. Whole Plant
  misc_feature: MA Experiment ID: 20000286 Result: Down-regulated in Transcription
  misc_feature: MA Experiment 20000286 PARAMETER Experiment Name: At_Open_Flower_P Parameter: Age (day) Value: 21
  misc_feature: MA Experiment 20000286 PARAMETER Experiment Name: At_Open_Flower_P Parameter: Plant Line Value: WS
  misc_feature: MA Experiment 20000286 PARAMETER Experiment Name: At_Open_Flower_P Parameter: Tissue Value: Half Open vs. Whole Plant
  misc_feature: MA Experiment ID: 20000308 Result: Down-regulated in Transcription
  misc_feature: MA Experiment 20000308 PARAMETER Experiment Name: At_100mM_NaCl__P Parameter: Age (day) Value: 17
  misc_feature: MA Experiment 20000308 PARAMETER Experiment Name: At_100mM_NaCl__P Parameter: Organism Value: A. thaliana
  misc_feature: MA Experiment 20000308 PARAMETER Experiment Name: At_100mM_NaCl__P Parameter: Plant Line Value: WS
  misc_feature: MA Experiment 20000308 PARAMETER Experiment Name: At_100mM_NaCl__P Parameter: Timepoint (hr) Value: 72
  misc_feature: MA Experiment 20000308 PARAMETER Experiment Name: At_100mM_NaCl__P Parameter: Tissue Value: Whole Plant
  misc_feature: MA Experiment 20000308 PARAMETER Experiment Name: At_100mM_NaCl__P Parameter: Treatment Value: 100mM NaCl vs. No Treatment
  misc_feature: MA Experiment ID: 20000436 Result: Down-regulated in Transcription
  misc_feature: MA Experiment 20000436 PARAMETER Experiment Name: At_Drought_P Parameter: Age (day) Value: 7
  misc_feature: MA Experiment 20000436 PARAMETER Experiment Name: At_Drought_P Parameter: Organism Value: A. thaliana
  misc_feature: MA Experiment 20000436 PARAMETER Experiment Name: At_Drought_P Parameter: Plant Line Value: WS
  misc_feature: MA Experiment 20000436 PARAMETER Experiment Name: At_Drought_P Parameter: Timepoint (hr) Value: 12
  misc_feature: MA Experiment 20000436 PARAMETER Experiment Name: At_Drought_P Parameter: Tissue Value: Whole Plant
  misc_feature: MA Experiment 20000436 PARAMETER Experiment Name: At_Drought_P Parameter: Treatment Value: Drought vs. No Drought
  misc_feature: MA Experiment ID: 20000437 Result: Down-regulated in Transcription
  misc_feature: MA Experiment 20000437 PARAMETER Experiment Name: At_Drought_P Parameter: Age (day) Value: 8
  misc_feature: MA Experiment 20000437 PARAMETER Experiment Name: At_Drought_P Parameter: Organism Value: A. thaliana
  misc_feature: MA Experiment 20000437 PARAMETER Experiment Name: At_Drought_P Parameter: Plant Line Value: WS
  misc_feature: MA Experiment 20000437 PARAMETER Experiment Name: At_Drought_P Parameter: Timepoint (hr) Value: 24
  misc_feature: MA Experiment 20000437 PARAMETER Experiment Name: At_Drought_P Parameter: Tissue Value: Whole Plant
  misc_feature: MA Experiment 20000437 PARAMETER Experiment Name: At_Drought_P Parameter: Treatment Value: Drought vs. No Drought
  misc_feature: MA Experiment ID: 20000438 Result: Up-regulated in Transcription
  misc_feature: MA Experiment 20000438 PARAMETER Experiment Name: At_Shoots__P Parameter: Age (day) Value: 14
  misc_feature: MA Experiment 20000438 PARAMETER Experiment Name: At_Shoots__P Parameter: Tissue Value: Shoots vs. Whole Plant
  misc_feature: MA Experiment ID: 20000439 Result: Down-regulated in Transcription
  misc_feature: MA Experiment 20000439 PARAMETER Experiment Name: At_Roots__P Parameter: Age (day) Value: 14 vs. 21
  misc_feature: MA Experiment 20000439 PARAMETER Experiment Name: At_Roots__P Parameter: Organism Value: A. thaliana
  misc_feature: MA Experiment 20000439 PARAMETER Experiment Name: At_Roots__P Parameter: Tissue Value: Roots vs. Whole Plant
  misc_feature: MA Experiment ID: 20000460 Result: Down-regulated in Transcription
  misc_feature: MA Experiment 20000460 PARAMETER Experiment Name: At_10percent_PEG_P Parameter: Age (day) Value: 12
  misc_feature: MA Experiment 20000460 PARAMETER Experiment Name: At_10percent_PEG_P Parameter: Organism Value: A. thaliana
  misc_feature: MA Experiment 20000460 PARAMETER Experiment Name: At_10percent_PEG_P Parameter: Plant Line Value: WS
  misc_feature: MA Experiment 20000460 PARAMETER Experiment Name: At_10percent_PEG_P Parameter: Timepoint (day) Value: 12
  misc_feature: MA Experiment 20000460 PARAMETER Experiment Name: At_10percent_PEG_P Parameter: Tissue Value: Whole Plant
  misc_feature: MA Experiment 20000460 PARAMETER Experiment Name: At_10percent_PEG_P Parameter: Treatment Value: 10percent PEG vs. No Treatment
  misc_feature: MA Experiment ID: 20000794 Result: Down-regulated in Transcription
  misc_feature: MA Experiment 20000794 PARAMETER Experiment Name: At_Petals_P Parameter: Age (day) Value: 23-25 days
  misc_feature: MA Experiment 20000794 PARAMETER Experiment Name: At_Petals_P Parameter: Plant Line Value: WS
  misc_feature: MA Experiment 20000794 PARAMETER Experiment Name: At_Petals_P Parameter: Tissue Value: Petals vs. Whole plant
  misc_feature: MA Experiment ID: 20001248 Result: Down-regulated in Transcription
  misc_feature: MA Experiment 20001248 PARAMETER Experiment Name: At_Far-red-induction_P Parameter: Age (day) Value: 7
  misc_feature: MA Experiment 20001248 PARAMETER Experiment Name: At_Far-red-induction_P Parameter: Light Value: Far-red vs. White
  misc_feature: MA Experiment 20001248 PARAMETER Experiment Name: At_Far-red-induction_P Parameter: Organism Value: A. thaliana
  misc_feature: MA Experiment 20001248 PARAMETER Experiment Name: At_Far-red-induction_P Parameter: Plant Line Value: Columbia
  misc_feature: MA Experiment 20001248 PARAMETER Experiment Name: At_Far-red-induction_P Parameter: Timepoint (hr) Value: 4
  misc_feature: MA Experiment 20001248 PARAMETER Experiment Name: At_Far-red-induction_P Parameter: Tissue Value: Whole Plant
  misc_feature: MA Experiment ID: 20001450 Result: Down-regulated in Transcription
  misc_feature: MA Experiment 20001450 PARAMETER Experiment Name: At_Far-red-induction_P Parameter: Age (day) Value: 7
  misc_feature: MA Experiment 20001450 PARAMETER Experiment Name: At_Far-red-induction_P Parameter: Light Value: Far-red vs. White
  misc_feature: MA Experiment 20001450 PARAMETER Experiment Name: At_Far-red-induction_P Parameter: Organism Value: A. thaliana
  misc_feature: MA Experiment 20001450 PARAMETER Experiment Name: At_Far-red-induction_P Parameter: Plant Line Value: Columbia
  misc_feature: MA Experiment 20001450 PARAMETER Experiment Name: At_Far-red-induction_P Parameter: Timepoint (hr) Value: 8
  misc_feature: MA Experiment 20001450 PARAMETER Experiment Name: At_Far-red-induction_P Parameter: Tissue Value: Whole Plant
  misc_feature: MA Experiment ID: 20001451 Result: Down-regulated in Transcription
  misc_feature: MA Experiment 20001451 PARAMETER Experiment Name: At_Far-red-induction_P Parameter: Age (day) Value: 7
  misc_feature: MA Experiment 20001451 PARAMETER Experiment Name: At_Far-red-induction_P Parameter: Light Value: Far-red vs. White
  misc_feature: MA Experiment 20001451 PARAMETER Experiment Name: At_Far-red-induction_P Parameter: Organism Value: A. thaliana
  misc_feature: MA Experiment 20001451 PARAMETER Experiment Name: At_Far-red-induction_P Parameter: Plant Line Value: Columbia
  misc_feature: MA Experiment 20001451 PARAMETER Experiment Name: At_Far-red-induction_P Parameter: Timepoint (hr) Value: 24
  misc_feature: MA Experiment 20001451 PARAMETER Experiment Name: At_Far-red-induction_P Parameter: Tissue Value: Whole Plant
  misc_feature: MA Experiment ID: 20001555 Result: Down-regulated in Transcription
  misc_feature: MA Experiment 20001555 PARAMETER Experiment Name: At_Drought_Soil_Dry_P Parameter: Age (day) Value: 24
  misc_feature: MA Experiment 20001555 PARAMETER Experiment Name: At_Drought_Soil_Dry_P Parameter: Organism Value: A. thaliana
  misc_feature: MA Experiment 20001555 PARAMETER Experiment Name: At_Drought_Soil_Dry_P Parameter: Plant Line Value: WS
  misc_feature: MA Experiment 20001555 PARAMETER Experiment Name: At_Drought_Soil_Dry_P Parameter: Post Timepoint (hr) Value: None
  misc_feature: MA Experiment 20001555 PARAMETER Experiment Name: At_Drought_Soil_Dry_P Parameter: Post-Treatment Value: None
  misc_feature: MA Experiment 20001555 PARAMETER Experiment Name: At_Drought_Soil_Dry_P Parameter: Timepoint (day) Value: 10
  misc_feature: MA Experiment 20001555 PARAMETER Experiment Name: At_Drought_Soil_Dry_P Parameter: Treatment Value: Drought vs. No Drought
  misc_feature: MA Experiment ID: 20001556 Result: Down-regulated in Transcription
  misc_feature: MA Experiment 20001556 PARAMETER Experiment Name: At_Drought_Soil_Dry_P Parameter: Age (day) Value: 26
  misc_feature: MA Experiment 20001556 PARAMETER Experiment Name: At_Drought_Soil_Dry_P Parameter: Organism Value: A. thaliana
  misc_feature: MA Experiment 20001556 PARAMETER Experiment Name: At_Drought_Soil_Dry_P Parameter: Plant Line Value: WS
  misc_feature: MA Experiment 20001556 PARAMETER Experiment Name: At_Drought_Soil_Dry_P Parameter: Post Timepoint (hr) Value: None
  misc_feature: MA Experiment 20001556 PARAMETER Experiment Name: At_Drought_Soil_Dry_P Parameter: Post-Treatment Value: None
  misc_feature: MA Experiment 20001556 PARAMETER Experiment Name: At_Drought_Soil_Dry_P Parameter: Timepoint (day) Value: 12
  misc_feature: MA Experiment 20001556 PARAMETER Experiment Name: At_Drought_Soil_Dry_P Parameter: Treatment Value: Drought vs. No Drought
  misc_feature: MA Experiment ID: 20001558 Result: Down-regulated in Transcription
  misc_feature: MA Experiment 20001558 PARAMETER Experiment Name: At_Drought_Soil_Dry_P Parameter: Age (day) Value: 27
  misc_feature: MA Experiment 20001558 PARAMETER Experiment Name: At_Drought_Soil_Dry_P Parameter: Organism Value: A. thaliana
  misc_feature: MA Experiment 20001558 PARAMETER Experiment Name: At_Drought_Soil_Dry_P Parameter: Plant Line Value: WS
  misc_feature: MA Experiment 20001558 PARAMETER Experiment Name: At_Drought_Soil_Dry_P Parameter: Post Timepoint (hr) Value: 6
  misc_feature: MA Experiment 20001558 PARAMETER Experiment Name: At_Drought_Soil_Dry_P Parameter: Post-Treatment Value: Re-Water vs. No Drought
  misc_feature: MA Experiment 20001558 PARAMETER Experiment Name: At_Drought_Soil_Dry_P Parameter: Timepoint (day) Value: 13
  misc_feature: MA Experiment 20001558 PARAMETER Experiment Name: At_Drought_Soil_Dry_P Parameter: Treatment Value: Drought vs. No Drought
  misc_feature: MA Experiment ID: 20001560 Result: Down-regulated in Transcription
  misc_feature: MA Experiment 20001560 PARAMETER Experiment Name: At_Drought_Soil_Dry_P Parameter: Age (day) Value: 28
  misc_feature: MA Experiment 20001560 PARAMETER Experiment Name: At_Drought_Soil_Dry_P Parameter: Organism Value: A. thaliana
  misc_feature: MA Experiment 20001560 PARAMETER Experiment Name: At_Drought_Soil_Dry_P Parameter: Plant Line Value: WS
  misc_feature: MA Experiment 20001560 PARAMETER Experiment Name: At_Drought_Soil_Dry_P Parameter: Post Timepoint (hr) Value: None
  misc_feature: MA Experiment 20001560 PARAMETER Experiment Name: At_Drought_Soil_Dry_P Parameter: Post-Treatment Value: None
  misc_feature: MA Experiment 20001560 PARAMETER Experiment Name: At_Drought_Soil_Dry_P Parameter: Timepoint (day) Value: 14
  misc_feature: MA Experiment 20001560 PARAMETER Experiment Name: At_Drought_Soil_Dry_P Parameter: Treatment Value: Drought vs. No Drought
  misc_feature: MA Experiment ID: 20001904 Result: Down-regulated in Transcription
  misc_feature: MA Experiment 20001904 PARAMETER Experiment Name: At_Drought_Reproduction_P Parameter: Age (day) Value: 37
  misc_feature: MA Experiment 20001904 PARAMETER Experiment Name: At_Drought_Reproduction_P Parameter: Organism Value: A. thaliana
  misc_feature: MA Experiment 20001904 PARAMETER Experiment Name: At_Drought_Reproduction_P Parameter: Plant Line Value: WS
  misc_feature: MA Experiment 20001904 PARAMETER Experiment Name: At_Drought_Reproduction_P Parameter: Timepoint (day) Value: 7
  misc_feature: MA Experiment 20001904 PARAMETER Experiment Name: At_Drought_Reproduction_P Parameter: Tissue Value: Rosettes
  misc_feature: MA Experiment 20001904 PARAMETER Experiment Name: At_Drought_Reproduction_P Parameter: Treatment Value: Drought vs. No Drought
  misc_feature: MA Experiment ID: 20001905 Result: Down-regulated in Transcription
  misc_feature: MA Experiment 20001905 PARAMETER Experiment Name: At_Drought_Reproduction_P Parameter: Age (day) Value: 40
  misc_feature: MA Experiment 20001905 PARAMETER Experiment Name: At_Drought_Reproduction_P Parameter: Organism Value: A. thaliana
  misc_feature: MA Experiment 20001905 PARAMETER Experiment Name: At_Drought_Reproduction_P Parameter: Plant Line Value: WS
  misc_feature: MA Experiment 20001905 PARAMETER Experiment Name: At_Drought_Reproduction_P Parameter: Timepoint (day) Value: 10
  misc_feature: MA Experiment 20001905 PARAMETER Experiment Name: At_Drought_Reproduction_P Parameter: Tissue Value: Rosettes
  misc_feature: MA Experiment 20001905 PARAMETER Experiment Name: At_Drought_Reproduction_P Parameter: Treatment Value: Drought vs. No Drought
  misc_feature: MA Experiment ID: 20001906 Result: Down-regulated in Transcription
  misc_feature: MA Experiment 20001906 PARAMETER Experiment Name: At_Drought_Reproduction_P Parameter: Age (day) Value: 35
  misc_feature: MA Experiment 20001906 PARAMETER Experiment Name: At_Drought_Reproduction_P Parameter: Organism Value: A. thaliana
  misc_feature: MA Experiment 20001906 PARAMETER Experiment Name: At_Drought_Reproduction_P Parameter: Plant Line Value: WS
  misc_feature: MA Experiment 20001906 PARAMETER Experiment Name: At_Drought_Reproduction_P Parameter: Timepoint (day) Value: 5
  misc_feature: MA Experiment 20001906 PARAMETER Experiment Name: At_Drought_Reproduction_P Parameter: Tissue Value: Siliques
  misc_feature: MA Experiment 20001906 PARAMETER Experiment Name: At_Drought_Reproduction_P Parameter: Treatment Value: Drought vs. No Drought
  misc_feature: MA Experiment ID: 20001907 Result: Down-regulated in Transcription
  misc_feature: MA Experiment 20001907 PARAMETER Experiment Name: At_Drought_Reproduction_P Parameter: Age (day) Value: 37
  misc_feature: MA Experiment 20001907 PARAMETER Experiment Name: At_Drought_Reproduction_P Parameter: Organism Value: A. thaliana
  misc_feature: MA Experiment 20001907 PARAMETER Experiment Name: At_Drought_Reproduction_P Parameter: Plant Line Value: WS
  misc_feature: MA Experiment 20001907 PARAMETER Experiment Name: At_Drought_Reproduction_P Parameter: Timepoint (day) Value: 7
  misc_feature: MA Experiment 20001907 PARAMETER Experiment Name: At_Drought_Reproduction_P Parameter: Tissue Value: Siliques
  misc_feature: MA Experiment 20001907 PARAMETER Experiment Name: At_Drought_Reproduction_P Parameter: Treatment Value: Drought vs. No Drought
  misc_feature: MA Experiment ID: 20001911 Result: Down-regulated in Transcription
  misc_feature: MA Experiment 20001911 PARAMETER Experiment Name: At_Drought_Reproduction_P Parameter: Age (day) Value: 40
  misc_feature: MA Experiment 20001911 PARAMETER Experiment Name: At_Drought_Reproduction_P Parameter: Organism Value: A. thaliana
  misc_feature: MA Experiment 20001911 PARAMETER Experiment Name: At_Drought_Reproduction_P Parameter: Plant Line Value: WS
  misc_feature: MA Experiment 20001911 PARAMETER Experiment Name: At_Drought_Reproduction_P Parameter: Timepoint (day) Value: 10
  misc_feature: MA Experiment 20001911 PARAMETER Experiment Name: At_Drought_Reproduction_P Parameter: Tissue Value: Flowers
  misc_feature: MA Experiment 20001911 PARAMETER Experiment Name: At_Drought_Reproduction_P Parameter: Treatment Value: Drought vs. No Drought
ggaagcagagatcgaaacgaagactcaaagaagaatggcgatttctactttaacactcacacaatctctctatacacgttccttcagaccaaccatcttcttttcttcttcttcttcctcgtccttttcgtgtctctgttcttcttcctccgattgcgagccgaaactctccgtcaagaaacgcgttttcggagtgggtttagggttcctagcttcttcgattctctctctaacgcctctggacgcagacgccacgaggattgactactacgccactgtaggagatcctctctgcgaatacagctacgcaaaatcaggacttggattttgcgatctcgatgttggatttggtgatgaagcccctcgtggcgtactcgtcaatatccattacacggcgaggtttgcagatggaacgttgtttgacagtagctataagcgtgcaagaccacttactatgcgaattggagtcggcaaggtaattaggggactagaccaggggattcttggaggcgaaggagtacctcctatgcgagtaggcggaaagcgtaaacttcagattccacctaagttagcttatggaccagagcctgcaggatgcttttctggtgactgcaacatacctggcaatgcaactttgctctatgatatcaactttgttgagatctacccaggaagtaatacaagatgaagccaactccaatcccgtttggtaaaggaacaaacaactatgtatgtgatgtatatcaccaggtgattacttttgacaagcttcagattataatttctgtaacctaaaacattgatgatttccaactgaatccaatgtctaacctcctattaaagaacaagacacatcttctctgtgc

SEQ ID NO: 79988 - protein, 228 aa, Arabidopsis thaliana
  peptide (1)..(228): Ceres Seq. ID no. 12653959
  misc_feature (115)..(219): Pfam Name: FKBP-type peptidyl-prolyl cis-trans isomerase Pfam Description: FKBP-type peptidyl-prolyl cis-trans isomerase
  misc_feature (12)..(228): Homolog of NCBI NO: 18420509 NR Description: FKBP-type peptidyl-prolyl cis-trans isomerase, protein id: At4g39710.1, supported by cDNA: gi_15529203 thaliana] >gi|6686798|emb|CAB64721.1| FKBP like protein
  misc_feature (12)..(207): Homolog of NCBI NO: 7487207 NR Description: hypothetical protein T19P19.100 - Arabidopsis >gi|3080440|emb|CAA18757.1| hypothetical protein [Arabidopsis >gi|7270955|emb|CAB80634.1| hypothetical protein [Arabidopsis
  misc_feature (152)..(228): Homolog of NCBI NO: 15529204 NR Description: AT4g39710/T19P19_100 [Arabidopsis thaliana]
  misc_feature (98)..(219): Homolog of NCBI NO: 15242472 NR Description: FKBP-type peptidyl-prolyl cis-trans isomerase; id: At5g45680.1, supported by cDNA: gi_18086456, supported by
  misc_feature (98)..(219): Homolog of NCBI NO: 21535744 NR Description: FK506 binding protein 1 [Arabidopsis thaliana]
  misc_feature (115)..(190): Homolog of NCBI NO: 6686802 NR Description: FKBP like protein [Arabidopsis thaliana]
  misc_feature (104)..(221): Homolog of NCBI NO: 16329650 NR Description: FKBP-type peptidyl-prolyl cis-trans isomerase
  misc_feature (82)..(221): Homolog of NCBI NO: 33862614 NR Description: FKBP-type peptidyl-prolyl cis-trans isomerase
  misc_feature (96)..(221): Homolog of NCBI NO: 22970827 NR Description: hypothetical protein [Chloroflexus aurantiacus]
  misc_feature (105)..(224): Homolog of NCBI NO: 22970827 NR Description: hypothetical protein [Chloroflexus aurantiacus]
EAEIETKTQRRMAISTLTLTQSLYTRSFRPTIFFSSSSSSSFSCLCSSSSDCEPKLSVKKRVFGVGLGFLASSILSLTPLDADATRIDYYATVGDPLCEYSYAKSGLGFCDLDVGFGDEAPRGVLVNIHYTARFADGTLFDSSYKRARPLTMRIGVGKVIRGLDQGILGGEGVPPMRVGGKRKLQIPPKLAYGPEPAGCFSGDCNIPGNATLLYDINFVEIYPGSNTR

SEQ ID NO: 79989 - protein, 217 aa, Arabidopsis thaliana
  peptide (1)..(217): Ceres Seq. ID no. 12653960
  misc_feature (104)..(208): Pfam Name: FKBP-type peptidyl-prolyl cis-trans isomerase Pfam Description: FKBP-type peptidyl-prolyl cis-trans isomerase
  misc_feature (1)..(217): Homolog of NCBI NO: 18420509 NR Description: FKBP-type peptidyl-prolyl cis-trans isomerase, protein id: At4g39710.1, supported by cDNA: gi_15529203 thaliana] >gi|6686798|emb|CAB64721.1| FKBP like protein
  misc_feature (1)..(196): Homolog of NCBI NO: 7487207 NR Description: hypothetical protein T19P19.100 - Arabidopsis >gi|3080440|emb|CAA18757.1| hypothetical protein [Arabidopsis >gi|7270955|emb|CAB80634.1| hypothetical protein [Arabidopsis
  misc_feature (141)..(217): Homolog of NCBI NO: 15529204 NR Description: AT4g39710/T19P19_100 [Arabidopsis thaliana]
  misc_feature (87)..(208): Homolog of NCBI NO: 15242472 NR Description: FKBP-type peptidyl-prolyl cis-trans isomerase; id: At5g45680.1, supported by cDNA: gi_18086456, supported by
  misc_feature (87)..(208): Homolog of NCBI NO: 21535744 NR Description: FK506 binding protein 1 [Arabidopsis thaliana]
  misc_feature (104)..(179): Homolog of NCBI NO: 6686802 NR Description: FKBP like protein [Arabidopsis thaliana]
  misc_feature (93)..(210): Homolog of NCBI NO: 16329650 NR Description: FKBP-type peptidyl-prolyl cis-trans isomerase
  misc_feature (71)..(210): Homolog of NCBI NO: 33862614 NR Description: FKBP-type peptidyl-prolyl cis-trans isomerase
  misc_feature (85)..(210): Homolog of NCBI NO: 22970827 NR Description: hypothetical protein [Chloroflexus aurantiacus]
  misc_feature (94)..(213): Homolog of NCBI NO: 22970827 NR Description: hypothetical protein [Chloroflexus aurantiacus]
MAISTLTLTQSLYTRSFRPTIFFSSSSSSSFSCLCSSSSDCEPKLSVKKRVFGVGLGFLASSILSLTPLDADATRIDYYATVGDPLCEYSYAKSGLGFCDLDVGFGDEAPRGVLVNIHYTARFADGTLFDSSYKRARPLTMRIGVGKVIRGLDQGILGGEGVPPMRVGGKRKLQIPPKLAYGPEPAGCFSGDCNIPGNATLLYDINFVEIYPGSNTR

SEQ ID NO: 79990 - DNA, 819 bp, Arabidopsis thaliana
  misc_feature (1)..(819): Ceres Seq. ID no. 12653971
  misc_feature: MA Experiment ID: 20000171 Result: Down-regulated in Transcription
  misc_feature: MA Experiment 20000171 PARAMETER Experiment Name: At_42deg_Heat_P Parameter: Age (day) Value: 14
  misc_feature: MA Experiment 20000171 PARAMETER Experiment Name: At_42deg_Heat_P Parameter: Organism Value: A. thaliana
  misc_feature: MA Experiment 20000171 PARAMETER Experiment Name: At_42deg_Heat_P Parameter: Plant Line Value: WS
  misc_feature: MA Experiment 20000171 PARAMETER Experiment Name: At_42deg_Heat_P Parameter: Temperature (deg C) Value: 42 vs. 22
  misc_feature: MA Experiment 20000171 PARAMETER Experiment Name: At_42deg_Heat_P Parameter: Timepoint (hr) Value: 1
  misc_feature: MA Experiment 20000171 PARAMETER Experiment Name: At_42deg_Heat_P Parameter: Tissue Value: Aerial
  misc_feature: MA Experiment ID: 20000185 Result: Up-regulated in Transcription
  misc_feature: MA Experiment 20000185 PARAMETER Experiment Name: At_Roots__P Parameter: Age (day) Value: 7 vs. 21
  misc_feature: MA Experiment 20000185 PARAMETER Experiment Name: At_Roots__P Parameter: Organism Value: A. thaliana
  misc_feature: MA Experiment 20000185 PARAMETER Experiment Name: At_Roots__P Parameter: Tissue Value: Roots vs. Whole Plant
  misc_feature: MA Experiment ID: 20000213 Result: Down-regulated in Transcription
  misc_feature: MA Experiment 20000213 PARAMETER Experiment Name: At_4deg_Cold_P Parameter: Timepoint (hr) Value: 2
  misc_feature: MA Experiment ID: 20000234 Result: Down-regulated in Transcription
  misc_feature: MA Experiment 20000234 PARAMETER Experiment Name: At_Siliques_P Parameter: Age (day) Value: 21
  misc_feature: MA Experiment 20000234 PARAMETER Experiment Name: At_Siliques_P Parameter: Organism Value: A. thaliana
  misc_feature: MA Experiment 20000234 PARAMETER Experiment Name: At_Siliques_P Parameter: Plant Line Value: WS
  misc_feature: MA Experiment 20000234 PARAMETER Experiment Name: At_Siliques_P Parameter: Tissue Value: Less Than 5mm Siliques vs. Whole Plant
  misc_feature: MA Experiment ID: 20000235 Result: Down-regulated in Transcription
  misc_feature: MA Experiment 20000235 PARAMETER Experiment Name: At_Siliques_P Parameter: Age (day) Value: 21
  misc_feature: MA Experiment 20000235 PARAMETER Experiment Name: At_Siliques_P Parameter: Organism Value: A. thaliana
  misc_feature: MA Experiment 20000235 PARAMETER Experiment Name: At_Siliques_P Parameter: Plant Line Value: WS
  misc_feature: MA Experiment 20000235 PARAMETER Experiment Name: At_Siliques_P Parameter: Tissue Value: 5-10mm Siliques vs. Whole Plant
  misc_feature: MA Experiment ID: 20000264 Result: Down-regulated in Transcription
  misc_feature: MA Experiment 20000264 PARAMETER Experiment Name: At_Open_Flower_P Parameter: Age (day) Value: 21
  misc_feature: MA Experiment 20000264 PARAMETER Experiment Name: At_Open_Flower_P Parameter: Plant Line Value: WS
  misc_feature: MA Experiment 20000264 PARAMETER Experiment Name: At_Open_Flower_P Parameter: Tissue Value: Open Flower vs. Whole Plant
  misc_feature: MA Experiment ID: 20000265 Result: Down-regulated in Transcription
  misc_feature: MA Experiment 20000265 PARAMETER Experiment Name: At_Open_Flower_P Parameter: Age (day) Value: 21
  misc_feature: MA Experiment 20000265 PARAMETER Experiment Name: At_Open_Flower_P Parameter: Plant Line Value: WS
  misc_feature: MA Experiment 20000265 PARAMETER Experiment Name: At_Open_Flower_P Parameter: Tissue Value: Closed Flower vs. Whole Plant
  misc_feature: MA Experiment ID: 20000286 Result: Down-regulated in Transcription
  misc_feature: MA Experiment 20000286 PARAMETER Experiment Name: At_Open_Flower_P Parameter: Age (day) Value: 21
  misc_feature: MA Experiment 20000286 PARAMETER Experiment Name: At_Open_Flower_P Parameter: Plant Line Value: WS
  misc_feature: MA Experiment 20000286 PARAMETER Experiment Name: At_Open_Flower_P Parameter: Tissue Value: Half Open vs. Whole Plant
  misc_feature: MA Experiment ID: 20000441 Result: Up-regulated in Transcription
  misc_feature: MA Experiment 20000441 PARAMETER Experiment Name: At_1uM_BR-BRZ__P Parameter: Tissue Value: Shoot Apices
  misc_feature: MA Experiment 20000441 PARAMETER Experiment Name: At_1uM_BR-BRZ__P Parameter: Treatment Value: 1uM BR vs. No Treatment
  misc_feature: MA Experiment ID: 20000443 Result: Up-regulated in Transcription
  misc_feature: MA Experiment 20000443 PARAMETER Experiment Name: At_1uM_BR-BRZ__P Parameter: Tissue Value: Shoot Apices
  misc_feature: MA Experiment 20000443 PARAMETER Experiment Name: At_1uM_BR-BRZ__P Parameter: Treatment Value: 1uM BRZ vs. No Treatment
  misc_feature: MA Experiment ID: 20000794 Result: Down-regulated in Transcription
  misc_feature: MA Experiment 20000794 PARAMETER Experiment Name: At_Petals_P Parameter: Age (day) Value: 23-25 days
  misc_feature: MA Experiment 20000794 PARAMETER Experiment Name: At_Petals_P Parameter: Plant Line Value: WS
  misc_feature: MA Experiment 20000794 PARAMETER Experiment Name: At_Petals_P Parameter: Tissue Value: Petals vs. Whole plant
  misc_feature: MA Experiment ID: 20001555 Result: Down-regulated in Transcription
  misc_feature: MA Experiment 20001555 PARAMETER Experiment Name: At_Drought_Soil_Dry_P Parameter: Age (day) Value: 24
  misc_feature: MA Experiment 20001555 PARAMETER Experiment Name: At_Drought_Soil_Dry_P Parameter: Organism Value: A. thaliana
  misc_feature: MA Experiment 20001555 PARAMETER Experiment Name: At_Drought_Soil_Dry_P Parameter: Plant Line Value: WS
  misc_feature: MA Experiment 20001555 PARAMETER Experiment Name: At_Drought_Soil_Dry_P Parameter: Post Timepoint (hr) Value: None
  misc_feature: MA Experiment 20001555 PARAMETER Experiment Name: At_Drought_Soil_Dry_P Parameter: Post-Treatment Value: None
  misc_feature: MA Experiment 20001555 PARAMETER Experiment Name: At_Drought_Soil_Dry_P Parameter: Timepoint (day) Value: 10
  misc_feature: MA Experiment 20001555 PARAMETER Experiment Name: At_Drought_Soil_Dry_P Parameter: Treatment Value: Drought vs. No Drought
  misc_feature: MA Experiment ID: 20001556 Result: Down-regulated in Transcription
  misc_feature: MA Experiment 20001556 PARAMETER Experiment Name: At_Drought_Soil_Dry_P Parameter: Age (day) Value: 26
  misc_feature: MA Experiment 20001556 PARAMETER Experiment Name: At_Drought_Soil_Dry_P Parameter: Organism Value: A. thaliana
  misc_feature: MA Experiment 20001556 PARAMETER Experiment Name: At_Drought_Soil_Dry_P Parameter: Plant Line Value: WS
  misc_feature: MA Experiment 20001556 PARAMETER Experiment Name: At_Drought_Soil_Dry_P Parameter: Post Timepoint (hr) Value: None
  misc_feature: MA Experiment 20001556 PARAMETER Experiment Name: At_Drought_Soil_Dry_P Parameter: Post-Treatment Value: None
  misc_feature: MA Experiment 20001556 PARAMETER Experiment Name: At_Drought_Soil_Dry_P Parameter: Timepoint (day) Value: 12
  misc_feature: MA Experiment 20001556 PARAMETER Experiment Name: At_Drought_Soil_Dry_P Parameter: Treatment Value: Drought vs. No Drought
  misc_feature: MA Experiment ID: 20001559 Result: Down-regulated in Transcription
  misc_feature: MA Experiment 20001559 PARAMETER Experiment Name: At_Drought_Soil_Dry_P Parameter: Age (day) Value: 28
  misc_feature: MA Experiment 20001559 PARAMETER Experiment Name: At_Drought_Soil_Dry_P Parameter: Organism Value: A. thaliana
  misc_feature: MA Experiment 20001559 PARAMETER Experiment Name: At_Drought_Soil_Dry_P Parameter: Plant Line Value: WS
  misc_feature: MA Experiment 20001559 PARAMETER Experiment Name: At_Drought_Soil_Dry_P Parameter: Post Timepoint (hr) Value: 29
  misc_feature: MA Experiment 20001559 PARAMETER Experiment Name: At_Drought_Soil_Dry_P Parameter: Post-Treatment Value: Re-Water vs. No Drought
  misc_feature: MA Experiment 20001559 PARAMETER Experiment Name: At_Drought_Soil_Dry_P Parameter: Timepoint (day) Value: 14
  misc_feature: MA Experiment 20001559 PARAMETER Experiment Name: At_Drought_Soil_Dry_P Parameter: Treatment Value: Drought vs. No Drought
  misc_feature: MA Experiment ID: 20001560 Result: Down-regulated in Transcription
  misc_feature: MA Experiment 20001560 PARAMETER Experiment Name: At_Drought_Soil_Dry_P Parameter: Age (day) Value: 28
  misc_feature: MA Experiment 20001560 PARAMETER Experiment Name: At_Drought_Soil_Dry_P Parameter: Organism Value: A. thaliana
  misc_feature: MA Experiment 20001560 PARAMETER Experiment Name: At_Drought_Soil_Dry_P Parameter: Plant Line Value: WS
  misc_feature: MA Experiment 20001560 PARAMETER Experiment Name: At_Drought_Soil_Dry_P Parameter: Post Timepoint (hr) Value: None
  misc_feature: MA Experiment 20001560 PARAMETER Experiment Name: At_Drought_Soil_Dry_P Parameter: Post-Treatment Value: None
  misc_feature: MA Experiment 20001560 PARAMETER Experiment Name: At_Drought_Soil_Dry_P Parameter: Timepoint (day) Value: 14
  misc_feature: MA Experiment 20001560 PARAMETER Experiment Name: At_Drought_Soil_Dry_P Parameter: Treatment Value: Drought vs. No Drought
atggcagccatagatatgttcaatagcaacacagatccttttcaagaagagctcatgaaagcacttcaaccttataccaccaacactgattcttcttctcctacgtattcaaacacagtcttcggtttcaatcaaaccacatctctcggtctaaaccagctcacaccttaccaaatccaccaaatccaaaaccagcttaaccagagacgtaacataatctctccaaatctagccccaaagcctgtcccaatgaagaacatgaccgctcagaaactctatagaggagttagacaaaggcactggggaaaatgggtagctgagatccgtttacccaagaaccggacccgactctggcttggaactttcgacacagctgaagaagcagccatggcttatgacctagctgcttacaagctaagaggcgagttcgcgagacttaatttcccacagttcagacacgaggatggatactacggaggaggtagctgtttcaatcctcttcattcctctgtcgacgcaaagctccaagagatttgtcagagcttgagaaaaacagaggatattgacctcccctgttctgaaacagagcttttcccgccaaaaacagagtatcaagaaagtgaatatgggttcttgagatctgatgagaattcgttttcagatgagtctcatgtggaatcttcttcgccggaatctggtattactacgttcttggacttttcggattctggatttgatgagattgggagtttcgggctggagaagtttccttctgtggagattgattgggatgcgattagcaaattgtccgaatcttaa

SEQ ID NO: 79991 - protein, 272 aa, Arabidopsis thaliana
  peptide (1)..(272): Ceres Seq. ID no. 12653972
  misc_feature (90)..(154): Pfam Name: AP2 domain Pfam Description: AP2 domain
  misc_feature (1)..(272): Homolog of NCBI NO: 15236020 NR Description: AP2 domain transcription factor RAP2, putative; id: At4g39780.1 [Arabidopsis thaliana] >gi|7487213|pir||T05015
  misc_feature (29)..(272): Homolog of NCBI NO: 15227162 NR Description: AP2 domain transcription factor RAP2, putative; id: At2g22200.1, supported by cDNA: gi_19699340 [Arabidopsis >gi|25350214|pir||B84610 AP2 domain transcription factor
  misc_feature (29)..(272): Homolog of NCBI NO: 19699341 NR Description: At2g22200/T26C19.14 [Arabidopsis thaliana]
  misc_feature (42)..(266): Homolog of NCBI NO: 27436378 NR Description: dehydration-responsive element binding protein 3
  misc_feature (2)..(269): Homolog of NCBI NO: 15238359 NR Description: AP2 domain transcription factor RAP2, putative; id: At5g65130.1 [Arabidopsis thaliana] contains similarity to AP2 domain transcription
  misc_feature (23)..(266): Homolog of NCBI NO: 6573771 NR Description: F28K19.29 [Arabidopsis thaliana]
  misc_feature (23)..(266): Homolog of NCBI NO: 15218204 NR Description: AP2 domain protein RAP2.4; protein id: supported by cDNA: gi_13877778 [Arabidopsis thaliana]
  misc_feature (23)..(266): Homolog of NCBI NO: 13877779 NR Description: putative AP2 domain-containing protein
  misc_feature (3)..(270): Homolog of NCBI NO: 15219839 NR Description: AP2 domain transcription factor RAP2, putative; id: At1g22190.1, supported by cDNA: gi_15292782 [Arabidopsis
  misc_feature (91)..(266): Homolog of NCBI NO: 2281633 NR Description: AP2 domain containing protein RAP2.4 [Arabidopsis
MAAIDMFNSNTDPFQEELMKALQPYTTNTDSSSPTYSNTVFGFNQTTSLGLNQLTPYQIHQIQNQLNQRRNIISPNLAPKPVPMKNMTAQKLYRGVRQRHWGKWVAEIRLPKNRTRLWLGTFDTAEEAAMAYDLAAYKLRGEFARLNFPQFRHEDGYYGGGSCFNPLHSSVDAKLQEICQSLRKTEDIDLPCSETELFPPKTEYQESEYGFLRSDENSFSDESHVESSSPESGITTFLDFSDSGFDEIGSFGLEKFPSVEIDWDAISKLSES

SEQ ID NO: 79992 - protein, 267 aa, Arabidopsis thaliana
  peptide (1)..(267): Ceres Seq. ID no. 12653973
  misc_feature (85)..(149): Pfam Name: AP2 domain Pfam Description: AP2 domain
  misc_feature (1)..(267): Homolog of NCBI NO: 15236020 NR Description: AP2 domain transcription factor RAP2, putative; id: At4g39780.1 [Arabidopsis thaliana] >gi|7487213|pir||T05015
  misc_feature (24)..(267): Homolog of NCBI NO: 15227162 NR Description: AP2 domain transcription factor RAP2, putative; id: At2g22200.1, supported by cDNA: gi_19699340 [Arabidopsis >gi|25350214|pir||B84610 AP2 domain transcription factor
  misc_feature (24)..(267): Homolog of NCBI NO: 19699341 NR Description: At2g22200/T26C19.14 [Arabidopsis thaliana]
  misc_feature (37)..(261): Homolog of NCBI NO: 27436378 NR Description: dehydration-responsive element binding protein 3
  misc_feature (1)..(264): Homolog of NCBI NO: 15238359 NR Description: AP2 domain transcription factor RAP2, putative; id: At5g65130.1 [Arabidopsis thaliana] contains similarity to AP2 domain transcription
  misc_feature (18)..(261): Homolog of NCBI NO: 6573771 NR Description: F28K19.29 [Arabidopsis thaliana]
  misc_feature (18)..(261): Homolog of NCBI NO: 15218204 NR Description: AP2 domain protein RAP2.4; protein id: supported by cDNA: gi_13877778 [Arabidopsis thaliana]
  misc_feature (18)..(261): Homolog of NCBI NO: 13877779 NR Description: putative AP2 domain-containing protein
  misc_feature (1)..(265): Homolog of NCBI NO: 15219839 NR Description: AP2 domain transcription factor RAP2, putative; id: At1g22190.1, supported by cDNA: gi_15292782 [Arabidopsis
  misc_feature (86)..(261): Homolog of NCBI NO: 2281633 NR Description: AP2 domain containing protein RAP2.4 [Arabidopsis
MFNSNTDPFQEELMKALQPYTTNTDSSSPTYSNTVFGFNQTTSLGLNQLTPYQIHQIQNQLNQRRNIISPNLAPKPVPMKNMTAQKLYRGVRQRHWGKWVAEIRLPKNRTRLWLGTFDTAEEAAMAYDLAAYKLRGEFARLNFPQFRHEDGYYGGGSCFNPLHSSVDAKLQEICQSLRKTEDIDLPCSETELFPPKTEYQESEYGFLRSDENSFSDESHVESSSPESGITTFLDFSDSGFDEIGSFGLEKFPSVEIDWDAISKLSES

SEQ ID NO: 79993 - protein, 254 aa, Arabidopsis thaliana
  peptide (1)..(254): Ceres Seq. ID no. 12653974
  misc_feature (72)..(136): Pfam Name: AP2 domain Pfam Description: AP2 domain
  misc_feature (1)..(254): Homolog of NCBI NO: 15236020 NR Description: AP2 domain transcription factor RAP2, putative; id: At4g39780.1 [Arabidopsis thaliana] >gi|7487213|pir||T05015
  misc_feature (11)..(254): Homolog of NCBI NO: 15227162 NR Description: AP2 domain transcription factor RAP2, putative; id: At2g22200.1, supported by cDNA: gi_19699340 [Arabidopsis >gi|25350214|pir||B84610 AP2 domain transcription factor
  misc_feature (11)..(254): Homolog of NCBI NO: 19699341 NR Description: At2g22200/T26C19.14 [Arabidopsis thaliana]
  misc_feature (24)..(248): Homolog of NCBI NO: 27436378 NR Description: dehydration-responsive element binding protein 3
  misc_feature (1)..(251): Homolog of NCBI NO: 15238359 NR Description: AP2 domain transcription factor RAP2, putative; id: At5g65130.1 [Arabidopsis thaliana] contains similarity to AP2 domain transcription
  misc_feature (5)..(248): Homolog of NCBI NO: 6573771 NR Description: F28K19.29 [Arabidopsis thaliana]
  misc_feature (5)..(248): Homolog of NCBI NO: 15218204 NR Description: AP2 domain protein RAP2.4; protein id: supported by cDNA: gi_13877778 [Arabidopsis thaliana]
  misc_feature (5)..(248): Homolog of NCBI NO: 13877779 NR Description: putative AP2 domain-containing protein
  misc_feature (1)..(252): Homolog of NCBI NO: 15219839 NR Description: AP2 domain transcription factor RAP2, putative; id: At1g22190.1, supported by cDNA: gi_15292782 [Arabidopsis
  misc_feature (73)..(248): Homolog of NCBI NO: 2281633 NR Description: AP2 domain containing protein RAP2.4 [Arabidopsis
MKALQPYTTNTDSSSPTYSNTVFGFNQTTSLGLNQLTPYQIHQIQNQLNQRRNIISPNLAPKPVPMKNMTAQKLYRGVRQRHWGKWVAEIRLPKNRTRLWLGTFDTAEEAAMAYDLAAYKLRGEFARLNFPQFRHEDGYYGGGSCFNPLHSSVDAKLQEICQSLRKTEDIDLPCSETELFPPKTEYQESEYGFLRSDENSFSDESHVESSSPESGITTFLDFSDSGFDEIGSFGLEKFPSVEIDWDAISKLSES

SEQ ID NO: 79994 - DNA, 1911 bp, Arabidopsis thaliana
  misc_feature (1)..(1911): Ceres Seq. ID no. 12653988
  misc_feature: MA Experiment ID: 20000171 Result: Up-regulated in Transcription
  misc_feature: MA Experiment 20000171 PARAMETER Experiment Name: At_42deg_Heat_P Parameter: Age (day) Value: 14
  misc_feature: MA Experiment 20000171 PARAMETER Experiment Name: At_42deg_Heat_P Parameter: Organism Value: A. thaliana
  misc_feature: MA Experiment 20000171 PARAMETER Experiment Name: At_42deg_Heat_P Parameter: Plant Line Value: WS
  misc_feature: MA Experiment 20000171 PARAMETER Experiment Name: At_42deg_Heat_P Parameter: Temperature (deg C) Value: 42 vs. 22
  misc_feature: MA Experiment 20000171 PARAMETER Experiment Name: At_42deg_Heat_P Parameter: Timepoint (hr) Value: 1
  misc_feature: MA Experiment 20000171 PARAMETER Experiment Name: At_42deg_Heat_P Parameter: Tissue Value: Aerial
  misc_feature: MA Experiment ID: 20000227 Result: Down-regulated in Transcription
  misc_feature: MA Experiment 20000227 PARAMETER Experiment Name: At_Root-Tips-vs-Tops_P Parameter: Tissue Value: Root Tips vs. Root Tops
  misc_feature: MA Experiment ID: 20000234 Result: Down-regulated in Transcription
  misc_feature: MA Experiment 20000234 PARAMETER Experiment Name: At_Siliques_P Parameter: Age (day) Value: 21
  misc_feature: MA Experiment 20000234 PARAMETER Experiment Name: At_Siliques_P Parameter: Organism Value: A. thaliana
  misc_feature: MA Experiment 20000234 PARAMETER Experiment Name: At_Siliques_P Parameter: Plant Line Value: WS
  misc_feature: MA Experiment 20000234 PARAMETER Experiment Name: At_Siliques_P Parameter: Tissue Value: Less Than 5mm Siliques vs. Whole Plant
  misc_feature: MA Experiment ID: 20000235 Result: Down-regulated in Transcription
  misc_feature: MA Experiment 20000235 PARAMETER Experiment Name: At_Siliques_P Parameter: Age (day) Value: 21
  misc_feature: MA Experiment 20000235 PARAMETER Experiment Name: At_Siliques_P Parameter: Organism Value: A. thaliana
  misc_feature: MA Experiment 20000235 PARAMETER Experiment Name: At_Siliques_P Parameter: Plant Line Value: WS
  misc_feature: MA Experiment 20000235 PARAMETER Experiment Name: At_Siliques_P Parameter: Tissue Value: 5-10mm Siliques vs. Whole Plant
  misc_feature: MA Experiment ID: 20000264 Result: Down-regulated in Transcription
  misc_feature: MA Experiment 20000264 PARAMETER Experiment Name: At_Open_Flower_P Parameter: Age (day) Value: 21
  misc_feature: MA Experiment 20000264 PARAMETER Experiment Name: At_Open_Flower_P Parameter: Plant Line Value: WS
  misc_feature: MA Experiment 20000264 PARAMETER Experiment Name: At_Open_Flower_P Parameter: Tissue Value: Open Flower vs. Whole Plant
  misc_feature: MA Experiment ID: 20000265 Result: Down-regulated in Transcription
  misc_feature: MA Experiment 20000265 PARAMETER Experiment Name: At_Open_Flower_P Parameter: Age (day) Value: 21
  misc_feature: MA Experiment 20000265 PARAMETER Experiment Name: At_Open_Flower_P Parameter: Plant Line Value: WS
  misc_feature: MA Experiment 20000265 PARAMETER Experiment Name: At_Open_Flower_P Parameter: Tissue Value: Closed Flower vs. Whole Plant
  misc_feature: MA Experiment ID: 20000286 Result: Down-regulated in Transcription
  misc_feature: MA Experiment 20000286 PARAMETER Experiment Name: At_Open_Flower_P Parameter: Age (day) Value: 21
  misc_feature: MA Experiment 20000286 PARAMETER Experiment Name: At_Open_Flower_P Parameter: Plant Line Value: WS
  misc_feature: MA Experiment 20000286 PARAMETER Experiment Name: At_Open_Flower_P Parameter: Tissue Value: Half Open vs. Whole Plant
  misc_feature: MA Experiment ID: 20000437 Result: Down-regulated in Transcription
  misc_feature: MA Experiment 20000437 PARAMETER Experiment Name: At_Drought_P Parameter: Age (day) Value: 8
  misc_feature: MA Experiment 20000437 PARAMETER Experiment Name: At_Drought_P Parameter: Organism Value: A. thaliana
  misc_feature: MA Experiment 20000437 PARAMETER Experiment Name: At_Drought_P Parameter: Plant Line Value: WS
  misc_feature: MA Experiment 20000437 PARAMETER Experiment Name: At_Drought_P Parameter: Timepoint (hr) Value: 24
  misc_feature: MA Experiment 20000437 PARAMETER Experiment Name: At_Drought_P Parameter: Tissue Value: Whole Plant
  misc_feature: MA Experiment 20000437 PARAMETER Experiment Name: At_Drought_P Parameter: Treatment Value: Drought vs. No Drought
  misc_feature: MA Experiment ID: 20000439 Result: Up-regulated in Transcription
  misc_feature: MA Experiment 20000439 PARAMETER Experiment Name: At_Roots__P Parameter: Age (day) Value: 14 vs. 21
  misc_feature: MA Experiment 20000439 PARAMETER Experiment Name: At_Roots__P Parameter: Organism Value: A. thaliana
  misc_feature: MA Experiment 20000439 PARAMETER Experiment Name: At_Roots__P Parameter: Tissue Value: Roots vs. Whole Plant
  misc_feature: MA Experiment ID: 20000794 Result: Down-regulated in Transcription
  misc_feature: MA Experiment 20000794 PARAMETER Experiment Name: At_Petals_P Parameter: Age (day) Value: 23-25 days
  misc_feature: MA Experiment 20000794 PARAMETER Experiment Name: At_Petals_P Parameter: Plant Line Value: WS
  misc_feature: MA Experiment 20000794 PARAMETER Experiment Name: At_Petals_P Parameter: Tissue Value: Petals vs. Whole plant
  misc_feature: MA Experiment ID: 20001248 Result: Down-regulated in Transcription
  misc_feature: MA Experiment 20001248 PARAMETER Experiment Name: At_Far-red-induction_P Parameter: Age (day) Value: 7
  misc_feature: MA Experiment 20001248 PARAMETER Experiment Name: At_Far-red-induction_P Parameter: Light Value: Far-red vs. White
  misc_feature: MA Experiment 20001248 PARAMETER Experiment Name: At_Far-red-induction_P Parameter: Organism Value: A. thaliana
  misc_feature: MA Experiment 20001248 PARAMETER Experiment Name: At_Far-red-induction_P Parameter: Plant Line Value: Columbia
  misc_feature: MA Experiment 20001248 PARAMETER Experiment Name: At_Far-red-induction_P Parameter: Timepoint (hr) Value: 4
  misc_feature: MA Experiment 20001248 PARAMETER Experiment Name: At_Far-red-induction_P Parameter: Tissue Value: Whole Plant
  misc_feature: MA Experiment ID: 20001556 Result: Down-regulated in Transcription
  misc_feature: MA Experiment 20001556 PARAMETER Experiment Name: At_Drought_Soil_Dry_P Parameter: Age (day) Value: 26
  misc_feature: MA Experiment 20001556 PARAMETER Experiment Name: At_Drought_Soil_Dry_P Parameter: Organism Value: A. thaliana
  misc_feature: MA Experiment 20001556 PARAMETER Experiment Name: At_Drought_Soil_Dry_P Parameter: Plant Line Value: WS
  misc_feature: MA Experiment 20001556 PARAMETER Experiment Name: At_Drought_Soil_Dry_P Parameter: Post Timepoint (hr) Value: None
  misc_feature: MA Experiment 20001556 PARAMETER Experiment Name: At_Drought_Soil_Dry_P Parameter: Post-Treatment Value: None
  misc_feature: MA Experiment 20001556 PARAMETER Experiment Name: At_Drought_Soil_Dry_P Parameter: Timepoint (day) Value: 12
  misc_feature: MA Experiment 20001556 PARAMETER Experiment Name: At_Drought_Soil_Dry_P Parameter: Treatment Value: Drought vs. No Drought
  misc_feature: MA Experiment ID: 20001904 Result: Down-regulated in Transcription
  misc_feature: MA Experiment 20001904 PARAMETER Experiment Name: At_Drought_Reproduction_P Parameter: Age (day) Value: 37
  misc_feature: MA Experiment 20001904 PARAMETER Experiment Name: At_Drought_Reproduction_P Parameter: Organism Value: A. thaliana
  misc_feature: MA Experiment 20001904 PARAMETER Experiment Name: At_Drought_Reproduction_P Parameter: Plant Line Value: WS
  misc_feature: MA Experiment 20001904 PARAMETER Experiment Name: At_Drought_Reproduction_P Parameter: Timepoint (day) Value: 7
  misc_feature: MA Experiment 20001904 PARAMETER Experiment Name: At_Drought_Reproduction_P Parameter: Tissue Value: Rosettes
  misc_feature: MA Experiment 20001904 PARAMETER Experiment Name: At_Drought_Reproduction_P Parameter: Treatment Value: Drought vs. No Drought
atccatgcagagacaacagaaaccacaacaaaaactttgagtcctcttcttctctatacacaaacatgaacacttttacctcaaactcttcggatctcactaccactgcaaccgaaacatcgtcctttagcaccttgtatctcctctcaacacttcaagcttttgtggctataaccttagtgatgctactcaagaaattgatgacggatcccaacaaaaagaaaccgtatctgccaccgggtcccacaggatggccgatcattggaatgattccgacgatgctaaagagccggcccgttttccggtggctccacagcatcatgaagcagctcaatactgagatagcatgcgtgaagttaggaaacactcatgtgatcaccgtcacgtgccctaagatagcacgtgagatactcaagcaacaagacgctctcttcgcgtcgaggcctttaacttacgctcagaagatcctctctaacggctacaaaacctgcgtgatcactccctttggtgaccaattcaagaaaatgaggaaagttgtgatgacggaactcgtatgtccagcgagacacaggtggctccaccagaagagatcagaagaaaacgatcatttaaccgcttgggtatacaacatggttaagaactcgggctctgtcgatttccggttcatgactaggcattactgtggaaatgcaatcaagaagcttatgttcgggacgagaacgttctctaagaacactgcacctgacggtggacccaccgtagaagatgtagagcacatggaagcaatgtttgaagcattagggtttaccttcgctttttgcatctctgattatctgccgatgctcactggacttgatcttaacggtcacgagaagattatgagagaatcaagtgcgattatggacaagtatcatgacccaatcatcgacgagaggatcaagatgtggagagaaggaaagagaactcaaatcgaagattttcttgatattttcatctctatcaaagacgaacaaggcaacccattgcttaccgccgatgaaatcaaacccaccattaaggagcttgtaatggcggcgccagacaatccatcaaacgccgtggaatgggccatggcggagatggtgaacaaaccggagattctccgtaaagcaatggaagagatcgacagagtcgtcgggaaagagagactcgttcaagaatccgacatcccaaaactaaactacgtcaaagctatcctccgcgaagctttccgtctccatcccgtcgccgccttcaacctcccccacgtggcactttctgacacaaccgtcgccggatatcacatccctaaaggaagtcaagtccttcttagccgatatgggctgggccgtaacccaaaagtttgggccgacccactttgctttaaaccggagagacatctcaacgaatgctccgaagttactttgaccgagaacgatctccggtttatctcgttcagtaccgggaaaagaggttgtgcggctccggcgctaggaacggcgttgaccacgatgatgctcgcgagacttcttcaaggtttcacttggaagctacctgagaatgagacacgtgtcgagctgatggagtctagtcacgatatgtttctggctaaaccgttggttatggtcggtgaccttagattgccggagcatctctacccgacggtgaagtgagatgagacgacgccgtatatattttatgaaactacttttatataatcgcccaaccaagtttggtcaattccggttaccagaagataattggtcaaattgtgaacaaacttgtgtgttggtttcttggttctttttgggacacttgaattgtgtctcctttacctcttcttttgttgttttcaataaaaacttttattaccatttcaataaaaagatcatc

SEQ ID NO: 79995 - protein, 562 aa, Arabidopsis thaliana
  peptide (1)..(562): Ceres Seq. ID no. 12653989
  misc_feature (22)..(562): Homolog of NCBI NO: 15236088 NR Description: cytochrome P450 - like protein; protein id: supported by cDNA: gi_15028134, supported by cDNA: gi_20259280
  misc_feature (22)..(562): Homolog of NCBI NO: 25991347 NR Description: cytochrome P450 [Brassica napus]
  misc_feature (22)..(562): Homolog of NCBI NO: 5915824 NR Description: Cytochrome P450 79B1 >gi|3283433|gb|AAD03415.1|
  misc_feature (14)..(562): Homolog of NCBI NO: 15227187 NR Description: putative cytochrome P450; protein id: At2g22330.1
  misc_feature (181)..(562): Homolog of NCBI NO: 11357242 NR Description: cytochrome P450 [imported] - Arabidopsis thaliana
  misc_feature (75)..(561): Homolog of NCBI NO: 5915822 NR Description: CYTOCHROME P450 79A1 (CYTOCHROME P450TYR)
  misc_feature (22)..(560): Homolog of NCBI NO: 6739527 NR Description: N-hydroxylating cytochrome P450 [Manihot
  misc_feature (31)..(560): Homolog of NCBI NO: 6739530 NR Description: N-hydroxylating cytochrome P450 [Manihot
  misc_feature (55)..(560): Homolog of NCBI NO: 13878375 NR Description: Cytochrome P450 79A2 >gi|10176738|dbj|BAB09969.1|
  misc_feature (55)..(560): Homolog of NCBI NO: 18414836 NR Description: cytochrome P450 CYP79A2; protein id: At5g05260.1, by cDNA: gi_7839382 [Arabidopsis thaliana]
PCRDNRNHNKNFESSSSLYTNMNTFTSNSSDLTTTATETSSFSTLYLLSTLQAFVAITLVMLLKKLMTDPNKKKPYLPPGPTGWPIIGMIPTMLKSRPVFRWLHSIMKQLNTEIACVKLGNTHVITVTCPKIAREILKQQDALFASRPLTYAQKILSNGYKTCVITPFGDQFKKMRKVVMTELVCPARHRWLHQKRSEENDHLTAWVYNMVKNSGSVDFRFMTRHYCGNAIKKLMFGTRTFSKNTAPDGGPTVEDVEHMEAMFEALGFTFAFCISDYLPMLTGLDLNGHEKIMRESSAIMDKYHDPIIDERIKMWREGKRTQIEDFLDIFISIKDEQGNPLLTADEIKPTIKELVMAAPDNPSNAVEWAMAEMVNKPEILRKAMEEIDRVVGKERLVQESDIPKLNYVKAILREAFRLHPVAAFNLPHVALSDTTVAGYHIPKGSQVLLSRYGLGRNPKVWADPLCFKPERHLNECSEVTLTENDLRFISFSTGKRGCAAPALGTALTTMMLARLLQGFTWKLPENETRVELMESSHDMFLAKPLVMVGDLRLPEHLYPTVK

SEQ ID NO: 79996 - protein, 541 aa, Arabidopsis thaliana
  peptide (1)..(541): Ceres Seq. ID no. 12653990
  misc_feature (1)..(541): Homolog of NCBI NO: 15236088 NR Description: cytochrome P450 - like protein; protein id: supported by cDNA: gi_15028134, supported by cDNA: gi_20259280
  misc_feature (1)..(541): Homolog of NCBI NO: 25991347 NR Description: cytochrome P450 [Brassica napus]
  misc_feature (1)..(541): Homolog of NCBI NO: 5915824 NR Description: Cytochrome P450 79B1 >gi|3283433|gb|AAD03415.1|
  misc_feature (1)..(541): Homolog of NCBI NO: 15227187 NR Description: putative cytochrome P450; protein id: At2g22330.1
  misc_feature (160)..(541): Homolog of NCBI NO: 11357242 NR Description: cytochrome P450 [imported] - Arabidopsis thaliana
  misc_feature (54)..(540): Homolog of NCBI NO: 5915822 NR Description: CYTOCHROME P450 79A1 (CYTOCHROME P450TYR)
  misc_feature (1)..(539): Homolog of NCBI NO: 6739527 NR Description: N-hydroxylating cytochrome P450 [Manihot
  misc_feature (10)..(539): Homolog of NCBI NO: 6739530 NR Description: N-hydroxylating cytochrome P450 [Manihot
  misc_feature (34)..(539): Homolog of NCBI NO: 13878375 NR Description: Cytochrome P450 79A2 >gi|10176738|dbj|BAB09969.1|
  misc_feature (34)..(539): Homolog of NCBI NO: 18414836 NR Description: cytochrome P450 CYP79A2; protein id: At5g05260.1, by cDNA: gi_7839382 [Arabidopsis thaliana]
MNTFTSNSSDLTTTATETSSFSTLYLLSTLQAFVAITLVMLLKKLMTDPNKKKPYLPPGPTGWPIIGMIPTMLKSRPVFRWLHSIMKQLNTEIACVKLGNTHVITVTCPKIAREILKQQDALFASRPLTYAQKILSNGYKTCVITPFGDQFKKMRKVVMTELVCPARHRWLHQKRSEENDHLTAWVYNMVKNSGSVDFRFMTRHYCGNAIKKLMFGTRTFSKNTAPDGGPTVEDVEHMEAMFEALGFTFAFCISDYLPMLTGLDLNGHEKIMRESSAIMDKYHDPIIDERIKMWREGKRTQIEDFLDIFISIKDEQGNPLLTADEIKPTIKELVMAAPDNPSNAVEWAMAEMVNKPEILRKAMEEIDRVVGKERLVQESDIPKLNYVKAILREAFRLHPVAAFNLPHVALSDTTVAGYHIPKGSQVLLSRYGLGRNPKVWADPLCFKPERHLNECSEVTLTENDLRFISFSTGKRGCAAPALGTALTTMMLARLLQGFTWKLPENETRVELMESSHDMFLAKPLVMVGDLRLPEHLYPTVK

SEQ ID NO: 79997 - protein, 502 aa, Arabidopsis thaliana
  peptide (1)..(502): Ceres Seq. ID no. 12653991
  misc_feature (1)..(502): Homolog of NCBI NO: 15236088 NR Description: cytochrome P450 - like protein; protein id: supported by cDNA: gi_15028134, supported by cDNA: gi_20259280
  misc_feature (1)..(502): Homolog of NCBI NO: 25991347 NR Description: cytochrome P450 [Brassica napus]
  misc_feature (1)..(502): Homolog of NCBI NO: 5915824 NR Description: Cytochrome P450 79B1 >gi|3283433|gb|AAD03415.1|
  misc_feature (1)..(502): Homolog of NCBI NO: 15227187 NR Description: putative cytochrome P450; protein id: At2g22330.1
  misc_feature (121)..(502): Homolog of NCBI NO: 11357242 NR Description: cytochrome P450 [imported] - Arabidopsis thaliana
  misc_feature (15)..(501): Homolog of NCBI NO: 5915822 NR Description: CYTOCHROME P450 79A1 (CYTOCHROME P450TYR)
  misc_feature (1)..(500): Homolog of NCBI NO: 6739527 NR Description: N-hydroxylating cytochrome P450 [Manihot
  misc_feature (1)..(500): Homolog of NCBI NO: 6739530 NR Description: N-hydroxylating cytochrome P450 [Manihot
  misc_feature (1)..(500): Homolog of NCBI NO: 13878375 NR Description: Cytochrome P450 79A2 >gi|10176738|dbj|BAB09969.1|
  misc_feature (1)..(500): Homolog of NCBI NO: 18414836 NR Description: cytochrome P450 CYP79A2; protein id: At5g05260.1, by cDNA: gi_7839382 [Arabidopsis thaliana]
MLLKKLMTDPNKKKPYLPPGPTGWPIIGMIPTMLKSRPVFRWLHSIMKQLNTEIACVKLGNTHVITVTCPKIAREILKQQDALFASRPLTYAQKILSNGYKTCVITPFGDQFKKMRKVVMTELVCPARHRWLHQKRSEENDHLTAWVYNMVKNSGSVDFRFMTRHYCGNAIKKLMFGTRTFSKNTAPDGGPTVEDVEHMEAMFEALGFTFAFCISDYLPMLTGLDLNGHEKIMRESSAIMDKYHDPIIDERIKMWREGKRTQIEDFLDIFISIKDEQGNPLLTADEIKPTIKELVMAAPDNPSNAVEWAMAEMVNKPEILRKAMEEIDRVVGKERLVQESDIPKLNYVKAILREAFRLHPVAAFNLPHVALSDTTVAGYHIPKGSQVLLSRYGLGRNPKVWADPLCFKPERHLNECSEVTLTENDLRFISFSTGKRGCAAPALGTALTTMMLARLLQGFTWKLPENETRVELMESSHDMFLAKPLVMVGDLRLPEHLYPTVK

SEQ ID NO: 79998 - DNA, 2181 bp, Arabidopsis thaliana
  misc_feature (1)..(2181): Ceres Seq. ID no. 12653992
  misc_feature: MA Experiment ID: 20000180 Result: Down-regulated in Transcription
  misc_feature: MA Experiment 20000180 PARAMETER Experiment Name: At_Germinating_Seeds_P Parameter: Age (hr) Value: 24 vs. 0
  misc_feature: MA Experiment 20000180 PARAMETER Experiment Name: At_Germinating_Seeds_P Parameter: Tissue Value: Germinating Seeds
  misc_feature: MA Experiment ID: 20001247 Result: Down-regulated in Transcription
  misc_feature: MA Experiment 20001247 PARAMETER Experiment Name: At_Far-red-induction_P Parameter: Age (day) Value: 7
  misc_feature: MA Experiment 20001247 PARAMETER Experiment Name: At_Far-red-induction_P Parameter: Light Value: Far-red vs. White
  misc_feature: MA Experiment 20001247 PARAMETER Experiment Name: At_Far-red-induction_P Parameter: Organism Value: A. thaliana
  misc_feature: MA Experiment 20001247 PARAMETER Experiment Name: At_Far-red-induction_P Parameter: Plant Line Value: Columbia
  misc_feature: MA Experiment 20001247 PARAMETER Experiment Name: At_Far-red-induction_P Parameter: Timepoint (hr) Value: 1
  misc_feature: MA Experiment 20001247 PARAMETER Experiment Name: At_Far-red-induction_P Parameter: Tissue Value: Whole Plant
  misc_feature: MA Experiment ID: 20001248 Result: Up-regulated in Transcription
  misc_feature: MA Experiment 20001248 PARAMETER Experiment Name: At_Far-red-induction_P Parameter: Age (day) Value: 7
  misc_feature: MA Experiment 20001248 PARAMETER Experiment Name: At_Far-red-induction_P Parameter: Light Value: Far-red vs. White
  misc_feature: MA Experiment 20001248 PARAMETER Experiment Name: At_Far-red-induction_P Parameter: Organism Value: A. thaliana
  misc_feature: MA Experiment 20001248 PARAMETER Experiment Name: At_Far-red-induction_P Parameter: Plant Line Value: Columbia
  misc_feature: MA Experiment 20001248 PARAMETER Experiment Name: At_Far-red-induction_P Parameter: Timepoint (hr) Value: 4
  misc_feature: MA Experiment 20001248 PARAMETER Experiment Name: At_Far-red-induction_P Parameter: Tissue Value: Whole Plant
atgttgcgtcgtctcttgaaacccaatcttgttgttactctacgcaaactctcttcttcttccgcaagctacgtcgatcgtcatattagtgtgattctctgcgatcagagcttgagcttagagtctctgcgcaaacacaacgctcttatcatcaccggaggactctcggaaaacatcttcgtcgcatcgaagctaatttcatcttacgcttcttacgggaaacccaatttgtcttccagagtcttccatttggttactcgaagagatatctttctttggaattctattatcaaagcacatttctccaatggggattatgctcgatccttgtgtttcttcttctcaatgctcttgtctggccaatcccctgatcatttcactgctcccatggttgtttctgcttgtgcggagcttttgtggtttcatgttgggactttcgttcacgggcttgttttgaaacatggaggttttgatagaaacactgctgtgggagcttcctttgtgtatttctactcaaagtgtgggtttttacaagatgcgtgtcttgtgttcgacgaaatgcctgacagagatgttgttgcttggactgccattatatctgggcatgtgcagaacggcgagagcgagggaggtttgggttatctttgcaagatgcatagtgctggttctgatgttgataagccgaatcccagaacattggaatgcggattccaagcttgttctaatctgggagctttgaaagaaggaagatgtcttcatggatttgcggtgaaaaatggtttagcttcttccaagtttgtccagtcttccatgttttcattctattcgaaatctgggaatccatccgaggcttatctttctttccgtgaacttggggatgaagatatgttttcatggacttcgattatagcgtcactggcgagatcaggtgacatggaggaaagttttgatatgttctgggaaatgcagaacaagggaatgcacccagatggggttgtcattagctgtttgattaatgaactaggtaagatgatgcttgtccctcagggtaaagcctttcacggtacagtttgcaattccttgttatcgatgtactgcaaattcgagcttctgtctgtggctgagaagcttttctgtaggataagcgaagaaggaaacaaagaagcttggaatacaatgcttaaaggctatggagcggtgctactagggaagtcgttgcattgctatgttgtcaaaactagcctggatcttaccatctcagtggtcaattccctcattgatttgtatggaaaaatgggagacttgactgtagcttggaggatgttttgtgaagcagatactaacgttatcacttggaacgcaatgattgcgtcttatgttcactgtgagcaatccgaaaaagccattgcattgttcgatagaatggtttctgagaatttcaaacccagctcaataactttggtgactctgcttatggcttgtgtcaatactggctctctggagagaggacagatgattcatcggtacatcactgaaacagagcacgagatgaatctttctctttcagctgctctcattgacatgtacgcgaaatgtggccaccttgaaaagtcacgagaactgtttgatgctggaaatcagaaggatgccgtttgttggaatgtgatgatatcaggttatggaatgcacggagatgttgaatcggccatagcactttttgatcaaatggaagagtctgatgttaaaccaaccggacctacatttcttgcgcttctatcggcttgcacgcacgctggtttagtagaacaagggaaaaaactatttctcaagatgcatcagtacgatgtgaaacccaacttaaagcattactcttgtcttgtggatcttctttccaggtctggtaatttggaggaagctgaaagcacagtcatgtctatgccattctcaccagacggggtcatatggggaacattgttgagctcatgcatgacccatggggagtttgagatgggaattcgaatggcagaacgtgcggttgctagtgatccgcagaacgatgggtattatataatgcttgcgaacatgtacagtgctgcaggtaagtgggaagaagcggaaagggcacgagagatgatgagggaaagcggagttggtaagagagctggtcatagtgtagtctaa

SEQ ID NO: 79999 - protein, 726 aa, Arabidopsis thaliana
  peptide (1)..(726): Ceres Seq. ID no. 12653993
  misc_feature (621)..(655): Pfam Name: PPR repeat Pfam Description: PPR repeat
  misc_feature (40)..(458): Homolog of NCBI NO: 38567725 NR Description: B1358B12.23 [Oryza sativa (japonica
  misc_feature (398)..(726): Homolog of NCBI NO: 38567725 NR Description: B1358B12.23 [Oryza sativa (japonica
  misc_feature (40)..(458): Homolog of NCBI NO: 38347057 NR Description: OSJNBa0060P14.4 [Oryza sativa (japonica
  misc_feature (398)..(726): Homolog of NCBI NO: 38347057 NR Description: OSJNBa0060P14.4 [Oryza sativa (japonica
  misc_feature (51)..(397): Homolog of NCBI NO: 34903762 NR Description: unnamed protein product [Oryza sativa (japonica group)] >gi|7340873|dbj|BAA92963.1| unnamed protein product
  misc_feature (403)..(724): Homolog of NCBI NO: 34903762 NR Description: unnamed protein product [Oryza sativa (japonica group)] >gi|7340873|dbj|BAA92963.1| unnamed protein product
  misc_feature (11)..(397): Homolog of NCBI NO: 34903762 NR Description: unnamed protein product [Oryza sativa (japonica group)] >gi|7340873|dbj|BAA92963.1| unnamed protein product
  misc_feature (18)..(397): Homolog of NCBI NO: 34911728 NR Description: P0707D10.28 [Oryza sativa (japonica
  misc_feature (398)..(726): Homolog of NCBI NO: 34911728 NR Description: P0707D10.28 [Oryza sativa (japonica
  misc_feature (2)..(397): Homolog of NCBI NO: 38606535 NR Description: OSJNBa0016O02.23 [Oryza sativa (japonica
MLRRLLKPNLVVTLRKLSSSSASYVDRHISVILCDQSLSLESLRKHNALIITGGLSENIFVASKLISSYASYGKPNLSSRVFHLVTRRDIFLWNSIIKAHFSNGDYARSLCFFFSMLLSGQSPDHFTAPMVVSACAELLWFHVGTFVHGLVLKHGGFDRNTAVGASFVYFYSKCGFLQDACLVFDEMPDRDVVAWTAIISGHVQNGESEGGLGYLCKMHSAGSDVDKPNPRTLECGFQACSNLGALKEGRCLHGFAVKNGLASSKFVQSSMFSFYSKSGNPSEAYLSFRELGDEDMFSWTSIIASLARSGDMEESFDMFWEMQNKGMHPDGVVISCLINELGKMMLVPQGKAFHGTVCNSLLSMYCKFELLSVAEKLFCRISEEGNKEAWNTMLKGYGAVLLGKSLHCYVVKTSLDLTISVVNSLIDLYGKMGDLTVAWRMFCEADTNVITWNAMIASYVHCEQSEKAIALFDRMVSENFKPSSITLVTLLMACVNTGSLERGQMIHRYITETEHEMNLSLSAALIDMYAKCGHLEKSRELFDAGNQKDAVCWNVMISGYGMHGDVESAIALFDQMEESDVKPTGPTFLALLSACTHAGLVEQGKKLFLKMHQYDVKPNLKHYSCLVDLLSRSGNLEEAESTVMSMPFSPDGVIWGTLLSSCMTHGEFEMGIRMAERAVASDPQNDGYYIMLANMYSAAGKWEEAERAREMMRESGVGKRAGHSVV

SEQ ID NO: 80000 - protein, 611 aa, Arabidopsis thaliana
  peptide (1)..(611): Ceres Seq. ID no. 12653994
  misc_feature (506)..(540): Pfam Name: PPR repeat Pfam Description: PPR repeat
  misc_feature (1)..(343): Homolog of NCBI NO: 38567725 NR Description: B1358B12.23 [Oryza sativa (japonica
  misc_feature (283)..(611): Homolog of NCBI NO: 38567725 NR Description: B1358B12.23 [Oryza sativa (japonica
  misc_feature (1)..(343): Homolog of NCBI NO: 38347057 NR Description: OSJNBa0060P14.4 [Oryza sativa (japonica
  misc_feature (283)..(611): Homolog of NCBI NO: 38347057 NR Description: OSJNBa0060P14.4 [Oryza sativa (japonica
  misc_feature (1)..(282): Homolog of NCBI NO: 34903762 NR Description: unnamed protein product [Oryza sativa (japonica group)] >gi|7340873|dbj|BAA92963.1| unnamed protein product
  misc_feature (288)..(609): Homolog of NCBI NO: 34903762 NR Description: unnamed protein product [Oryza sativa (japonica group)] >gi|7340873|dbj|BAA92963.1| unnamed protein product
  misc_feature (1)..(282): Homolog of NCBI NO: 34903762 NR Description: unnamed protein product [Oryza sativa (japonica group)] >gi|7340873|dbj|BAA92963.1| unnamed protein product
  misc_feature (1)..(282): Homolog of NCBI NO: 34911728 NR Description: P0707D10.28 [Oryza sativa (japonica
  misc_feature (283)..(611): Homolog of NCBI NO: 34911728 NR Description: P0707D10.28 [Oryza sativa (japonica
  misc_feature (1)..(282): Homolog of NCBI NO: 38606535 NR Description: OSJNBa0016O02.23 [Oryza sativa (japonica
MLLSGQSPDHFTAPMVVSACAELLWFHVGTFVHGLVLKHGGFDRNTAVGASFVYFYSKCGFLQDACLVFDEMPDRDVVAWTAIISGHVQNGESEGGLGYLCKMHSAGSDVDKPNPRTLECGFQACSNLGALKEGRCLHGFAVKNGLASSKFVQSSMFSFYSKSGNPSEAYLSFRELGDEDMFSWTSIIASLARSGDMEESFDMFWEMQNKGMHPDGVVISCLINELGKMMLVPQGKAFHGTVCNSLLSMYCKFELLSVAEKLFCRISEEGNKEAWNTMLKGYGAVLLGKSLHCYVVKTSLDLTISVVNSLIDLYGKMGDLTVAWRMFCEADTNVITWNAMIASYVHCEQSEKAIALFDRMVSENFKPSSITLVTLLMACVNTGSLERGQMIHRYITETEHEMNLSLSAALIDMYAKCGHLEKSRELFDAGNQKDAVCWNVMISGYGMHGDVESAIALFDQMEESDVKPTGPTFLALLSACTHAGLVEQGKKLFLKMHQYDVKPNLKHYSCLVDLLSRSGNLEEAESTVMSMPFSPDGVIWGTLLSSCMTHGEFEMGIRMAERAVASDPQNDGYYIMLANMYSAAGKWEEAERAREMMRESGVGKRAGHSVV

SEQ ID NO: 80001 - protein, 597 aa, Arabidopsis thaliana
  peptide (1)..(597): Ceres Seq. ID no. 12653995
  misc_feature (492)..(526): Pfam Name: PPR repeat Pfam Description: PPR repeat
  misc_feature (1)..(329): Homolog of NCBI NO: 38567725 NR Description: B1358B12.23 [Oryza sativa (japonica
  misc_feature (269)..(597): Homolog of NCBI NO: 38567725 NR Description: B1358B12.23 [Oryza sativa (japonica
  misc_feature (1)..(329): Homolog of NCBI NO: 38347057 NR Description: OSJNBa0060P14.4 [Oryza sativa (japonica
  misc_feature (269)..(597): Homolog of NCBI NO: 38347057 NR Description: OSJNBa0060P14.4 [Oryza sativa (japonica
  misc_feature (1)..(268): Homolog of NCBI NO: 34903762 NR Description: unnamed protein product [Oryza sativa (japonica group)] >gi|7340873|dbj|BAA92963.1| unnamed protein product
  misc_feature (274)..(595): Homolog of NCBI NO: 34903762 NR Description: unnamed protein product [Oryza sativa (japonica group)] >gi|7340873|dbj|BAA92963.1| unnamed protein product
  misc_feature (1)..(268): Homolog of NCBI NO: 34903762 NR Description: unnamed protein product [Oryza sativa (japonica group)] >gi|7340873|dbj|BAA92963.1| unnamed protein product
  misc_feature (1)..(268): Homolog of NCBI NO: 34911728 NR Description: P0707D10.28 [Oryza sativa (japonica
  misc_feature (269)..(597): Homolog of NCBI NO: 34911728 NR Description: P0707D10.28 [Oryza sativa (japonica
  misc_feature (1)..(268): Homolog of NCBI NO: 38606535 NR Description: OSJNBa0016O02.23 [Oryza sativa (japonica
MVVSACAELLWFHVGTFVHGLVLKHGGFDRNTAVGASFVYFYSKCGFLQDACLVFDEMPDRDVVAWTAIISGHVQNGESEGGLGYLCKMHSAGSDVDKPNPRTLECGFQACSNLGALKEGRCLHGFAVKNGLASSKFVQSSMFSFYSKSGNPSEAYLSFRELGDEDMFSWTSIIASLARSGDMEESFDMFWEMQNKGMHPDGVVISCLINELGKMMLVPQGKAFHGTVCNSLLSMYCKFELLSVAEKLFCRISEEGNKEAWNTMLKGYGAVLLGKSLHCYVVKTSLDLTISVVNSLIDLYGKMGDLTVAWRMFCEADTNVITWNAMIASYVHCEQSEKAIALFDRMVSENFKPSSITLVTLLMACVNTGSLERGQMIHRYITETEHEMNLSLSAALIDMYAKCGHLEKSRELFDAGNQKDAVCWNVMISGYGMHGDVESAIALFDQMEESDVKPTGPTFLALLSACTHAGLVEQGKKLFLKMHQYDVKPNLKHYSCLVDLLSRSGNLEEAESTVMSMPFSPDGVIWGTLLSSCMTHGEFEMGIRMAERAVASDPQNDGYYIMLANMYSAAGKWEEAERAREMMRESGVGKRAGHSVV

SEQ ID NO: 80002 - DNA, 1690 bp, Arabidopsis thaliana
  misc_feature (1)..(1690): Ceres Seq. ID no. 12653996
  misc_feature: MA Experiment ID: 20000173 Result: Down-regulated in Transcription
  misc_feature: MA Experiment 20000173 PARAMETER Experiment Name: At_42deg_Heat_P Parameter: Age (day) Value: 14
  misc_feature: MA Experiment 20000173 PARAMETER Experiment Name: At_42deg_Heat_P Parameter: Organism Value: A. thaliana
  misc_feature: MA Experiment 20000173 PARAMETER Experiment Name: At_42deg_Heat_P Parameter: Plant Line Value: WS
  misc_feature: MA Experiment 20000173 PARAMETER Experiment Name: At_42deg_Heat_P Parameter: Temperature (deg C) Value: 42 vs. 22
  misc_feature: MA Experiment 20000173 PARAMETER Experiment Name: At_42deg_Heat_P Parameter: Timepoint (hr) Value: 6
  misc_feature: MA Experiment 20000173 PARAMETER Experiment Name: At_42deg_Heat_P Parameter: Tissue Value: Aerial
  misc_feature: MA Experiment ID: 20000184 Result: Down-regulated in Transcription
  misc_feature: MA Experiment 20000184 PARAMETER Experiment Name: At_Shoots__P Parameter: Age (day) Value: 7
  misc_feature: MA Experiment 20000184 PARAMETER Experiment Name: At_Shoots__P Parameter: Tissue Value: Shoots vs. Whole Plant
  misc_feature: MA Experiment ID: 20000234 Result: Down-regulated in Transcription
  misc_feature: MA Experiment 20000234 PARAMETER Experiment Name: At_Siliques_P Parameter: Age (day) Value: 21
  misc_feature: MA Experiment 20000234 PARAMETER Experiment Name: At_Siliques_P Parameter: Organism Value: A. thaliana
  misc_feature: MA Experiment 20000234 PARAMETER Experiment Name: At_Siliques_P Parameter: Plant Line Value: WS
  misc_feature: MA Experiment 20000234 PARAMETER Experiment Name: At_Siliques_P Parameter: Tissue Value: Less Than 5mm Siliques vs. Whole Plant
  misc_feature: MA Experiment ID: 20000235 Result: Down-regulated in Transcription
  misc_feature: MA Experiment 20000235 PARAMETER Experiment Name: At_Siliques_P Parameter: Age (day) Value: 21
  misc_feature: MA Experiment 20000235 PARAMETER Experiment Name: At_Siliques_P Parameter: Organism Value: A. thaliana
  misc_feature: MA Experiment 20000235 PARAMETER Experiment Name: At_Siliques_P Parameter: Plant Line Value: WS
  misc_feature: MA Experiment 20000235 PARAMETER Experiment Name: At_Siliques_P Parameter: Tissue Value: 5-10mm Siliques vs. Whole Plant
  misc_feature: MA Experiment ID: 20000264 Result: Down-regulated in Transcription
  misc_feature: MA Experiment 20000264 PARAMETER Experiment Name: At_Open_Flower_P Parameter: Age (day) Value: 21
  misc_feature: MA Experiment 20000264 PARAMETER Experiment Name: At_Open_Flower_P Parameter: Plant Line Value: WS
  misc_feature: MA Experiment 20000264 PARAMETER Experiment Name: At_Open_Flower_P Parameter: Tissue Value: Open Flower vs. Whole Plant
  misc_feature: MA Experiment ID: 20000265 Result: Down-regulated in Transcription
  misc_feature: MA Experiment 20000265 PARAMETER Experiment Name: At_Open_Flower_P Parameter: Age (day) Value: 21
  misc_feature: MA Experiment 20000265 PARAMETER Experiment Name: At_Open_Flower_P Parameter: Plant Line Value: WS
  misc_feature: MA Experiment 20000265 PARAMETER Experiment Name: At_Open_Flower_P Parameter: Tissue Value: Closed Flower vs. Whole Plant
  misc_feature: MA Experiment ID: 20000286 Result: Down-regulated in Transcription
  misc_feature: MA Experiment 20000286 PARAMETER Experiment Name: At_Open_Flower_P Parameter: Age (day) Value: 21
  misc_feature: MA Experiment 20000286 PARAMETER Experiment Name: At_Open_Flower_P Parameter: Plant Line Value: WS
  misc_feature: MA Experiment 20000286 PARAMETER Experiment Name: At_Open_Flower_P Parameter: Tissue Value: Half Open vs. Whole Plant
  misc_feature: MA Experiment ID: 20000437 Result: Down-regulated in Transcription
  misc_feature: MA Experiment 20000437 PARAMETER Experiment Name: At_Drought_P Parameter: Age (day) Value: 8
  misc_feature: MA Experiment 20000437 PARAMETER Experiment Name: At_Drought_P Parameter: Organism Value: A. thaliana
  misc_feature: MA Experiment 20000437 PARAMETER Experiment Name: At_Drought_P Parameter: Plant Line Value: WS
  misc_feature: MA Experiment 20000437 PARAMETER Experiment Name: At_Drought_P Parameter: Timepoint (hr) Value: 24
  misc_feature: MA Experiment 20000437 PARAMETER Experiment Name: At_Drought_P Parameter: Tissue Value: Whole Plant
  misc_feature: MA Experiment 20000437 PARAMETER Experiment Name: At_Drought_P Parameter: Treatment Value: Drought vs. No Drought
  misc_feature: MA Experiment ID: 20000573 Result: Down-regulated in Transcription
  misc_feature: MA Experiment 20000573 PARAMETER Experiment Name: At_100uM_ABA_Mutants__P Parameter: Organism Value: A. thaliana
  misc_feature: MA Experiment 20000573 PARAMETER Experiment Name: At_100uM_ABA_Mutants__P Parameter: Plant Line Value: CS22 vs. Ler wt
  misc_feature: MA Experiment 20000573 PARAMETER Experiment Name: At_100uM_ABA_Mutants__P Parameter: Timepoint (hr) Value: N/A
  misc_feature: MA Experiment 20000573 PARAMETER Experiment Name: At_100uM_ABA_Mutants__P Parameter: Tissue Value: Whole Plant
  misc_feature: MA Experiment 20000573 PARAMETER Experiment Name: At_100uM_ABA_Mutants__P Parameter: Treatment Value: None
  misc_feature: MA Experiment ID: 20000574 Result: Down-regulated in Transcription
  misc_feature: MA Experiment 20000574 PARAMETER Experiment Name: At_100uM_ABA_Mutants__P Parameter: Organism Value: A. thaliana
  misc_feature: MA Experiment 20000574 PARAMETER Experiment Name: At_100uM_ABA_Mutants__P Parameter: Plant Line Value: CS23 vs. Ler wt
  misc_feature: MA Experiment 20000574 PARAMETER Experiment Name: At_100uM_ABA_Mutants__P Parameter: Timepoint (hr) Value: N/A
  misc_feature: MA Experiment 20000574 PARAMETER Experiment Name: At_100uM_ABA_Mutants__P Parameter: Tissue Value: Whole Plant
  misc_feature: MA Experiment 20000574 PARAMETER Experiment Name: At_100uM_ABA_Mutants__P Parameter: Treatment Value: None
  misc_feature: MA Experiment ID: 20000794 Result: Down-regulated in Transcription
  misc_feature: MA Experiment 20000794 PARAMETER Experiment Name: At_Petals_P Parameter: Age (day) Value: 23-25 days
  misc_feature: MA Experiment 20000794 PARAMETER Experiment Name: At_Petals_P Parameter: Plant Line Value: WS
  misc_feature: MA Experiment 20000794 PARAMETER Experiment Name: At_Petals_P Parameter: Tissue Value: Petals vs. Whole plant
  misc_feature: MA Experiment ID: 20001248 Result: Down-regulated in Transcription
  misc_feature: MA Experiment 20001248 PARAMETER Experiment Name: At_Far-red-induction_P Parameter: Age (day) Value: 7
  misc_feature: MA Experiment 20001248 PARAMETER Experiment Name: At_Far-red-induction_P Parameter: Light Value: Far-red vs. White
  misc_feature: MA Experiment 20001248 PARAMETER Experiment Name: At_Far-red-induction_P Parameter: Organism Value: A. thaliana
  misc_feature: MA Experiment 20001248 PARAMETER Experiment Name: At_Far-red-induction_P Parameter: Plant Line Value: Columbia
  misc_feature: MA Experiment 20001248 PARAMETER Experiment Name: At_Far-red-induction_P Parameter: Timepoint (hr) Value: 4
  misc_feature: MA Experiment 20001248 PARAMETER Experiment Name: At_Far-red-induction_P Parameter: Tissue Value: Whole Plant
  misc_feature: MA Experiment ID: 20001450 Result: Down-regulated in Transcription
  misc_feature: MA Experiment 20001450 PARAMETER Experiment Name: At_Far-red-induction_P Parameter: Age (day) Value: 7
  misc_feature: MA Experiment 20001450 PARAMETER Experiment Name: At_Far-red-induction_P Parameter: Light Value: Far-red vs. White
  misc_feature: MA Experiment 20001450 PARAMETER Experiment Name: At_Far-red-induction_P Parameter: Organism Value: A. thaliana
  misc_feature: MA Experiment 20001450 PARAMETER Experiment Name: At_Far-red-induction_P Parameter: Plant Line Value: Columbia
  misc_feature: MA Experiment 20001450 PARAMETER Experiment Name: At_Far-red-induction_P Parameter: Timepoint (hr) Value: 8
  misc_feature: MA Experiment 20001450 PARAMETER Experiment Name: At_Far-red-induction_P Parameter: Tissue Value: Whole Plant
  misc_feature: MA Experiment ID: 20001451 Result: Down-regulated in Transcription
  misc_feature: MA Experiment 20001451 PARAMETER Experiment Name: At_Far-red-induction_P Parameter: Age (day) Value: 7
  misc_feature: MA Experiment 20001451 PARAMETER Experiment Name: At_Far-red-induction_P Parameter: Light Value: Far-red vs. White
  misc_feature: MA Experiment 20001451 PARAMETER Experiment Name: At_Far-red-induction_P Parameter: Organism Value: A. thaliana
  misc_feature: MA Experiment 20001451 PARAMETER Experiment Name: At_Far-red-induction_P Parameter: Plant Line Value: Columbia
  misc_feature: MA Experiment 20001451 PARAMETER Experiment Name: At_Far-red-induction_P Parameter: Timepoint (hr) Value: 24
  misc_feature: MA Experiment 20001451 PARAMETER Experiment Name: At_Far-red-induction_P Parameter: Tissue Value: Whole Plant
  misc_feature: MA Experiment ID: 20001557 Result: Up-regulated in Transcription
  misc_feature: MA Experiment 20001557 PARAMETER Experiment Name: At_Drought_Soil_Dry_P Parameter: Age (day) Value: 27
  misc_feature: MA Experiment 20001557 PARAMETER Experiment Name: At_Drought_Soil_Dry_P Parameter: Organism Value: A. thaliana
  misc_feature: MA Experiment 20001557 PARAMETER Experiment Name: At_Drought_Soil_Dry_P Parameter: Plant Line Value: WS
  misc_feature: MA Experiment 20001557 PARAMETER Experiment Name: At_Drought_Soil_Dry_P Parameter: Post Timepoint (hr) Value: 3
  misc_feature: MA Experiment 20001557 PARAMETER Experiment Name: At_Drought_Soil_Dry_P Parameter: Post-Treatment Value: Re-Water vs. No Drought
  misc_feature: MA Experiment 20001557 PARAMETER Experiment Name: At_Drought_Soil_Dry_P Parameter: Timepoint (day) Value: 13
  misc_feature: MA Experiment 20001557 PARAMETER Experiment Name: At_Drought_Soil_Dry_P Parameter: Treatment Value: Drought vs. No Drought
atctatcgcaaaactctcccgtcgtcaccattcgattacgggagtgtaatggctcttatacaatttggaagttcatgtgttgctcaatgggggattcttcgtcctcggtttgctgttaaagctttttatccaagcagattggagtctcaccaagacaattgcatcagccaaataaattgtctgggagcttcaaggtcgagtatgtttgcacagggctctttacccttcttgtcattgacgggagtatctcctaatacacattctcgtagaggagctcgcttcactgttagagctgatactgatttctattctgtccttggagtctcgaaaaatgcaaccaaagctgagattaaaagcgcttatcggaagctcgctaggagttatcatccagatgtgaacaaggatgctggggcagaagataaatttaaagaaataagtaatgcatatgagatcttatcagatgatgagaaaagatctctatacgacagatatggcgaggcaggagttaaaggcgctggaatgggaggcatgggggattatagtaatccgtttgatctatttgagtcattattcgaaggaatgggtgggatgggaggaatgggcggtggaatgggtagtagaggttcaaggagcagagctatcgatggtgaagatgagtattactcactaatcttgaatttcaaagaagcggttttcggtattgagaaagaaattgagatatctcggttagagagctgtgggacttgcaatggttctggagctaaagcgggaaccaaaccaaccaaatgcaaaacatgtggcgggcaaggacaggtggtagcatcaacgaggacaccactcggtgtattccaacaagtgatgacttgctctccgtgtaacggaactggggagatatcaaaaccgtgtggtgcatgctcaggagatggacgtgtgagaaggacaaagcggattagtcttaaagttcctgcgggtgtggattctggaagtaggttaagagtgaggggagaagggaatgcaggaaagagaggtggatcaccgggagatctctttgcggttattgaggttattccagatccggttttgaagcgtgatgatacaaatatactttatacgtgtaagatatcgtatgtagatgccatattggggacgactttgaaggtaccaacagtggatggagaggtggatttgaaagtaccggcagggacacaaccaagcacgacattggtgatggctaaaaaaggagttccggttttgaataagagcaagatgagaggtgatcagttagtgagagtgcaagttgagattcctaagagattgagtaaagaagagaagatgcttgttgaggagctggctgatatgagcaagaacaaggtagctaatagcaggagataaaccaacacacaatattagtgaaatgtgatgttatatagattcatcattctctgcttgtcgtctttctaatggttcgtctaacgatggagaagataagcaagaggcaaaagaaagacttattaggtgagaggaaaatttgaagaactctggttttgggttttcctcttcaatttttgtgttttacttttaaaacaaattttatggatttatcaggattcagggtaggtcttgattgtattgtactgctatttttatacatttgaatcttcttttcttattaatgaaaattttatcaaac

SEQ ID NO: 80003 - protein, 463 aa, Arabidopsis thaliana
  peptide (1)..(463): Ceres Seq. ID no. 12653997
  misc_feature (329)..(451): Pfam Name: DnaJ C terminal region Pfam Description: DnaJ C terminal region
  misc_feature (17)..(463): Homolog of NCBI NO: 18420568 NR Description: DnaJ - like protein; protein id: At4g39960.1, by cDNA: gi_15450580, supported by cDNA: gi_17380627 [Arabidopsis >gi|15450581|gb|AAK96562.1| AT4g39960/T5J17_130 [Arabidopsis
  misc_feature (68)..(463): Homolog of NCBI NO: 7441920 NR Description: heat shock protein T5J17.130, dnaJ-type -
  misc_feature (17)..(461): Homolog of NCBI NO: 18399949 NR Description: putative DnaJ protein; protein id: At2g22360.1, by cDNA: 10312. [Arabidopsis thaliana]
  misc_feature (17)..(461): Homolog of NCBI NO: 30794072 NR Description: putative DnaJ protein [Arabidopsis thaliana]
  misc_feature (17)..(461): Homolog of NCBI NO: 21536561 NR Description: putative DnaJ protein [Arabidopsis thaliana]
  misc_feature (68)..(461): Homolog of NCBI NO: 25296019 NR Description: probable DnaJ protein [imported] - Arabidopsis
  misc_feature (17)..(452): Homolog of NCBI NO: 16326131 NR Description: DNAJ homologue [Oryza sativa]
  misc_feature (44)..(463): Homolog of NCBI NO: 7441921 NR Description: heat shock protein dnaJ - garden pea
  misc_feature (76)..(462): Homolog of NCBI NO: 18412605 NR Description: DnaJ protein, putative; protein id: At1g80030.1,
  misc_feature (76)..(462): Homolog of NCBI NO: 14326568 NR Description: At1g80030/F18B13_37 [Arabidopsis thaliana]
IYRKTLPSSPFDYGSVMALIQFGSSCVAQWGILRPRFAVKAFYPSRLESHQDNCISQINCLGASRSSMFAQGSLPFLSLTGVSPNTHSRRGARFTVRADTDFYSVLGVSKNATKAEIKSAYRKLARSYHPDVNKDAGAEDKFKEISNAYEILSDDEKRSLYDRYGEAGVKGAGMGGMGDYSNPFDLFESLFEGMGGMGGMGGGMGSRGSRSRAIDGEDEYYSLILNFKEAVFGIEKEIEISRLESCGTCNGSGAKAGTKPTKCKTCGGQGQVVASTRTPLGVFQQVMTCSPCNGTGEISKPCGACSGDGRVRRTKRISLKVPAGVDSGSRLRVRGEGNAGKRGGSPGDLFAVIEVIPDPVLKRDDTNILYTCKISYVDAILGTTLKVPTVDGEVDLKVPAGTQPSTTLVMAKKGVPVLNKSKMRGDQLVRVQVEIPKRLSKEEKMLVEELADMSKNKVANSRR

SEQ ID NO: 80004 - protein, 447 aa, Arabidopsis thaliana
  peptide (1)..(447): Ceres Seq. ID no. 12653998
  misc_feature (313)..(435): Pfam Name: DnaJ C terminal region Pfam Description: DnaJ C terminal region
  misc_feature (1)..(447): Homolog of NCBI NO: 18420568 NR Description: DnaJ - like protein; protein id: At4g39960.1, by cDNA: gi_15450580, supported by cDNA: gi_17380627 [Arabidopsis >gi|15450581|gb|AAK96562.1| AT4g39960/T5J17_130 [Arabidopsis
  misc_feature (52)..(447): Homolog of NCBI NO: 7441920 NR Description: heat shock protein T5J17.130, dnaJ-type -
  misc_feature (1)..(445): Homolog of NCBI NO: 18399949 NR Description: putative DnaJ protein; protein id: At2g22360.1, by cDNA: 10312. [Arabidopsis thaliana]
  misc_feature (1)..(445): Homolog of NCBI NO: 30794072 NR Description: putative DnaJ protein [Arabidopsis thaliana]
  misc_feature (1)..(445): Homolog of NCBI NO: 21536561 NR Description: putative DnaJ protein [Arabidopsis thaliana]
  misc_feature (52)..(445): Homolog of NCBI NO: 25296019 NR Description: probable DnaJ protein [imported] - Arabidopsis
  misc_feature (1)..(436): Homolog of NCBI NO: 16326131 NR Description: DNAJ homologue [Oryza sativa]
  misc_feature (28)..(447): Homolog of NCBI NO: 7441921 NR Description: heat shock protein dnaJ - garden pea
  misc_feature (60)..(446): Homolog of NCBI NO: 18412605 NR Description: DnaJ protein, putative; protein id: At1g80030.1,
  misc_feature (60)..(446): Homolog of NCBI NO: 14326568 NR Description: At1g80030/F18B13_37 [Arabidopsis thaliana]
MALIQFGSSCVAQWGILRPRFAVKAFYPSRLESHQDNCISQINCLGASRSSMFAQGSLPFLSLTGVSPNTHSRRGARFTVRADTDFYSVLGVSKNATKAEIKSAYRKLARSYHPDVNKDAGAEDKFKEISNAYEILSDDEKRSLYDRYGEAGVKGAGMGGMGDYSNPFDLFESLFEGMGGMGGMGGGMGSRGSRSRAIDGEDEYYSLILNFKEAVFGIEKEIEISRLESCGTCNGSGAKAGTKPTKCKTCGGQGQVVASTRTPLGVFQQVMTCSPCNGTGEISKPCGACSGDGRVRRTKRISLKVPAGVDSGSRLRVRGEGNAGKRGGSPGDLFAVIEVIPDPVLKRDDTNILYTCKISYVDAILGTTLKVPTVDGEVDLKVPAGTQPSTTLVMAKKGVPVLNKSKMRGDQLVRVQVEIPKRLSKEEKMLVEELADMSKNKVANSRR

SEQ ID NO: 80005 - protein, 396 aa, Arabidopsis thaliana
  peptide (1)..(396): Ceres Seq. ID no. 12653999
  misc_feature (262)..(384): Pfam Name: DnaJ C terminal region Pfam Description: DnaJ C terminal region
  misc_feature (1)..(396): Homolog of NCBI NO: 18420568 NR Description: DnaJ - like protein; protein id: At4g39960.1, by cDNA: gi_15450580, supported by cDNA: gi_17380627 [Arabidopsis >gi|15450581|gb|AAK96562.1| AT4g39960/T5J17_130 [Arabidopsis
  misc_feature (1)..(396): Homolog of NCBI NO: 7441920 NR Description: heat shock protein T5J17.130, dnaJ-type -
  misc_feature (1)..(394): Homolog of NCBI NO: 18399949 NR Description: putative DnaJ protein; protein id: At2g22360.1, by cDNA: 10312. [Arabidopsis thaliana]
  misc_feature (1)..(394): Homolog of NCBI NO: 30794072 NR Description: putative DnaJ protein [Arabidopsis thaliana]
  misc_feature (1)..(394): Homolog of NCBI NO: 21536561 NR Description: putative DnaJ protein [Arabidopsis thaliana]
  misc_feature (1)..(394): Homolog of NCBI NO: 25296019 NR Description: probable DnaJ protein [imported] - Arabidopsis
  misc_feature (1)..(385): Homolog of NCBI NO: 16326131 NR Description: DNAJ homologue [Oryza sativa]
  misc_feature (1)..(396): Homolog of NCBI NO: 7441921 NR Description: heat shock protein dnaJ - garden pea
  misc_feature (9)..(395): Homolog of NCBI NO: 18412605 NR Description: DnaJ protein, putative; protein id: At1g80030.1,
  misc_feature (9)..(395): Homolog of NCBI NO: 14326568 NR Description: At1g80030/F18B13_37 [Arabidopsis thaliana]
MFAQGSLPFLSLTGVSPNTHSRRGARFTVRADTDFYSVLGVSKNATKAEIKSAYRKLARSYHPDVNKDAGAEDKFKEISNAYEILSDDEKRSLYDRYGEAGVKGAGMGGMGDYSNPFDLFESLFEGMGGMGGMGGGMGSRGSRSRAIDGEDEYYSLILNFKEAVFGIEKEIEISRLESCGTCNGSGAKAGTKPTKCKTCGGQGQVVASTRTPLGVFQQVMTCSPCNGTGEISKPCGACSGDGRVRRTKRISLKVPAGVDSGSRLRVRGEGNAGKRGGSPGDLFAVIEVIPDPVLKRDDTNILYTCKISYVDAILGTTLKVPTVDGEVDLKVPAGTQPSTTLVMAKKGVPVLNKSKMRGDQLVRVQVEIPKRLSKEEKMLVEELADMSKNKVANSRR

SEQ ID NO: 80006 - DNA, 1578 bp, Arabidopsis thaliana
  misc_feature (1)..(1578): Ceres Seq. ID no. 12654000
  misc_feature: MA Experiment ID: 108434 Result: Down-regulated in Transcription
  misc_feature: MA Experiment 108434 PARAMETER Experiment Name: At_Root_Tips_cDNA_P Parameter: Tissue Value: Root Tips
  misc_feature: MA Experiment ID: 108463 Result: Down-regulated in Transcription
  misc_feature: MA Experiment 108463 PARAMETER Experiment Name: At_Germinating_Seeds_cDNA_P Parameter: Age (day) Value: 3 vs. 0
  misc_feature: MA Experiment 108463 PARAMETER Experiment Name: At_Germinating_Seeds_cDNA_P Parameter: Tissue Value: Germinating Seeds
  misc_feature: MA Experiment ID: 108464 Result: Down-regulated in Transcription
  misc_feature: MA Experiment 108464 PARAMETER Experiment Name: At_Germinating_Seeds_cDNA_P Parameter: Age (day) Value: 4 vs. 0
  misc_feature: MA Experiment 108464 PARAMETER Experiment Name: At_Germinating_Seeds_cDNA_P Parameter: Tissue Value: Germinating Seeds
  misc_feature: MA Experiment ID: 20000088 Result: Up-regulated in Transcription
  misc_feature: MA Experiment 20000088 PARAMETER Experiment Name: At_100uM_ABA_Mutants_cDNA_P Parameter: Plant Line Value: Landsberg
  misc_feature: MA Experiment 20000088 PARAMETER Experiment Name: At_100uM_ABA_Mutants_cDNA_P Parameter: Timepoint (hr) Value: 6
  misc_feature: MA Experiment 20000088 PARAMETER Experiment Name: At_100uM_ABA_Mutants_cDNA_P Parameter: Tissue Value: Aerial
  misc_feature: MA Experiment 20000088 PARAMETER Experiment Name: At_100uM_ABA_Mutants_cDNA_P Parameter: Treatment Value: 100uM ABA vs. No Treatment
atggctctttccaacgcctcctctctctccaccagatctatctacggcggtgatctttctcaccgtccaagcaaccgtcaatcatccttcacatttcatcccgccgtcaacaccaagcctaaatccgttaacctcgtcacggctgtacacgcggctgagccagctagaaacgctgtttcagtcaaagaatccgttgcgtcttcttcgtctggtgcattgaaatggactccagagagctggaaactgaagaaggctctgcaacttcctgattatcctaacgccaatgagcttgagtctgtgcttaaaacgatagaggcttttcctccgattgtgttcgccggagaagctaggaatcttgaagagagattggctgatgctgctgttggtaaagcttttcttctccaaggaggtgattgtgctgagagtttcaaggagttcaatgctactaatatcagagacaccttcagggttctgcttcagatgagtattgttcttacattcggtggccaggttccggtcattaaggttgggaggatggctggtcaatttgcaaagcctagatctgatgcatttgaggagaaggatggagtgaaattaccaagctacaagggagataacatcaatggtgatacttttgatgagaaatccaggattcctgatcctaataggatgattcgagcttacactcaatctgcagctactttgaatcttcttagagcctttgccactggaggttacgctgctattcaaagagttactcaatggaaccttgattttgttgaacaaagtgagcaagctgacaggtaccaggaattagctaatagggttgatgaggccttggggttcatgtctgcatgtggacttggcacggatcatccacttatgactacaactgatttctacacatcccatgagtgtttgcttctgccttatgaacagtcccttacaaggttggattcaacttctggtctctactatgattgttctgcacacatggtctggtgcggagagcgtaccagacaattggatggcgctcatgtcgagtttctcagggggattgctaatcctctgggcattaaggtgagcaacaaaatggatccctttgagctggttaagctagtagaaatcctgaatcctaataacaagcctggaagaatcactgtaattgtgagaatgggtgccgagaacatgagagttaagcttccccacctgatcagagcagtccgcagatcaggccagattgtgacatgggtctgcgatccaatgcatggaaacaccatcaaagcaccttgcggtcttaaaacacgtgcctttgactcaatactggctgaagtccgagcattccttgatgtgcacgagcaagaaggaagccacgcgggcggtatccatctcgagatgacaggtcagaacgtgacagaatgcattggagggtcccgcactgtgacctacgatgacctcagttctcgctaccacacacactgtgacccaaggctgaacgcgtcacagtctcttgaacttgccttcattgttgcagaacggctcaggaagagaagaacgggtagccagcgtgtgtcttga

SEQ ID NO: 80007 - protein, 525 aa, Arabidopsis thaliana; identical to SEQ ID NO: 30916
  peptide (1)..(525): Ceres Seq. ID no. 12654001
  misc_feature (74)..(511): Pfam Name: Class-II DAHP synthetase family Pfam Description: Class-II DAHP synthetase family
  misc_feature (1)..(525): Homolog of NCBI NO: 15236093 NR Description: 2-dehydro-3-deoxyphosphoheptonate aldolase; id: At4g39980.1, supported by cDNA: gi_166687, supported by cDNA: [Arabidopsis thaliana] >gi|20141225|sp|P29976|AROF_ARATH aldolase
  misc_feature (1)..(525): Homolog of NCBI NO: 166688 NR Description: 3-deoxy-D-arabino-heptulosonate y-phosphate
  misc_feature (1)..(525): Homolog of NCBI NO: 99742 NR Description: 2-dehydro-3-deoxy-phosphoheptonate aldolase (EC
  misc_feature (1)..(523): Homolog of NCBI NO: 2546988 NR Description: 2-dehydro-3-deoxyphosphoheptonate aldolase;
  misc_feature (1)..(524): Homolog of NCBI NO: 584779 NR Description: Phospho-2-dehydro-3-deoxyheptonate aldolase 2,
  misc_feature (1)..(524): Homolog of NCBI NO: 584776 NR Description: Phospho-2-dehydro-3-deoxyheptonate aldolase 1,
  misc_feature (1)..(523): Homolog of NCBI NO: 15219878 NR Description: 3-deoxy-D-arabino-heptulosonate 7-phosphate, protein id: At1g22410.1 [Arabidopsis thaliana]
  misc_feature (1)..(524): Homolog of NCBI NO: 114193 NR Description: Phospho-2-dehydro-3-deoxyheptonate aldolase 1,
  misc_feature (1)..(523): Homolog of NCBI NO: 2398679 NR Description: 3-deoxy-D-arabino-heptulosonate 7-phosphate
  misc_feature (54)..(518): Homolog of NCBI NO: 22968301 NR Description: hypothetical protein [Rhodospirillum rubrum]

SEQ ID NO: 80008 - protein, 365 aa, Arabidopsis thaliana; identical to SEQ ID NO: 30917
  peptide (1)..(365): Ceres Seq. ID no. 12654002
  misc_feature (1)..(351): Pfam Name: Class-II DAHP synthetase family Pfam Description: Class-II DAHP synthetase family
  misc_feature (1)..(365): Homolog of NCBI NO: 15236093 NR Description: 2-dehydro-3-deoxyphosphoheptonate aldolase; id: At4g39980.1, supported by cDNA: gi_166687, supported by cDNA: [Arabidopsis thaliana] >gi|20141225|sp|P29976|AROF_ARATH aldolase
  misc_feature (1)..(365): Homolog of NCBI NO: 166688 NR Description: 3-deoxy-D-arabino-heptulosonate y-phosphate
  misc_feature (1)..(365): Homolog of NCBI NO: 99742 NR Description: 2-dehydro-3-deoxy-phosphoheptonate aldolase (EC
  misc_feature (1)..(363): Homolog of NCBI NO: 2546988 NR Description: 2-dehydro-3-deoxyphosphoheptonate aldolase;
  misc_feature (1)..(364): Homolog of NCBI NO: 584779 NR Description: Phospho-2-dehydro-3-deoxyheptonate aldolase 2,
  misc_feature (1)..(364): Homolog of NCBI NO: 584776 NR Description: Phospho-2-dehydro-3-deoxyheptonate aldolase 1,
  misc_feature (1)..(363): Homolog of NCBI NO: 15219878 NR Description: 3-deoxy-D-arabino-heptulosonate 7-phosphate, protein id: At1g22410.1 [Arabidopsis thaliana]
  misc_feature (1)..(364): Homolog of NCBI NO: 114193 NR Description: Phospho-2-dehydro-3-deoxyheptonate aldolase 1,
  misc_feature (1)..(363): Homolog of NCBI NO: 2398679 NR Description: 3-deoxy-D-arabino-heptulosonate 7-phosphate
  misc_feature (1)..(358): Homolog of NCBI NO: 22968301 NR Description: hypothetical protein [Rhodospirillum rubrum]

SEQ ID NO: 80009 - protein, 347 aa, Arabidopsis thaliana
  peptide (1)..(347): Ceres Seq. ID no. 12654003
  misc_feature (1)..(333): Pfam Name: Class-II DAHP synthetase family Pfam Description: Class-II DAHP synthetase family
  misc_feature (1)..(347): Homolog of NCBI NO: 15236093 NR Description: 2-dehydro-3-deoxyphosphoheptonate aldolase; id: At4g39980.1, supported by cDNA: gi_166687, supported by cDNA: [Arabidopsis thaliana] >gi|20141225|sp|P29976|AROF_ARATH aldolase
  misc_feature (1)..(347): Homolog of NCBI NO: 166688 NR Description: 3-deoxy-D-arabino-heptulosonate y-phosphate
  misc_feature (1)..(347): Homolog of NCBI NO: 99742 NR Description: 2-dehydro-3-deoxy-phosphoheptonate aldolase (EC
  misc_feature (1)..(345): Homolog of NCBI NO: 2546988 NR Description: 2-dehydro-3-deoxyphosphoheptonate aldolase;
  misc_feature (1)..(346): Homolog of NCBI NO: 584779 NR Description: Phospho-2-dehydro-3-deoxyheptonate aldolase 2,
  misc_feature (1)..(346): Homolog of NCBI NO: 584776 NR Description: Phospho-2-dehydro-3-deoxyheptonate aldolase 1,
  misc_feature (1)..(345): Homolog of NCBI NO: 15219878 NR Description: 3-deoxy-D-arabino-heptulosonate 7-phosphate, protein id: At1g22410.1 [Arabidopsis thaliana]
  misc_feature (1)..(346): Homolog of NCBI NO: 114193 NR Description: Phospho-2-dehydro-3-deoxyheptonate aldolase 1,
  misc_feature (1)..(345): Homolog of NCBI NO: 2398679 NR Description: 3-deoxy-D-arabino-heptulosonate 7-phosphate
  misc_feature (1)..(340): Homolog of NCBI NO: 22968301 NR Description: hypothetical protein [Rhodospirillum rubrum]
MAGQFAKPRSDAFEEKDGVKLPSYKGDNINGDTFDEKSRIPDPNRMIRAYTQSAATLNLLRAFATGGYAAIQRVTQWNLDFVEQSEQADRYQELANRVDEALGFMSACGLGTDHPLMTTTDFYTSHECLLLPYEQSLTRLDSTSGLYYDCSAHMVWCGERTRQLDGAHVEFLRGIANPLGIKVSNKMDPFELVKLVEILNPNNKPGRITVIVRMGAENMRVKLPHLIRAVRRSGQIVTWVCDPMHGNTIKAPCGLKTRAFDSILAEVRAFLDVHEQEGSHAGGIHLEMTGQNVTECIGGSRTVTYDDLSSRYHTHCDPRLNASQSLELAFIVAERLRKRRTGSQRVS

SEQ ID NO: 80010 - DNA, 1900 bp, Arabidopsis thaliana
  misc_feature (1)..(1900): Ceres Seq. ID no. 12654012
  misc_feature: MA Experiment ID: 108434 Result: Down-regulated in Transcription
  misc_feature: MA Experiment 108434 PARAMETER Experiment Name: At_Root_Tips_cDNA_P Parameter: Tissue Value: Root Tips
  misc_feature: MA Experiment ID: 108463 Result: Down-regulated in Transcription
  misc_feature: MA Experiment 108463 PARAMETER Experiment Name: At_Germinating_Seeds_cDNA_P Parameter: Age (day) Value: 3 vs. 0
  misc_feature: MA Experiment 108463 PARAMETER Experiment Name: At_Germinating_Seeds_cDNA_P Parameter: Tissue Value: Germinating Seeds
  misc_feature: MA Experiment ID: 108464 Result: Down-regulated in Transcription
  misc_feature: MA Experiment 108464 PARAMETER Experiment Name: At_Germinating_Seeds_cDNA_P Parameter: Age (day) Value: 4 vs. 0
  misc_feature: MA Experiment 108464 PARAMETER Experiment Name: At_Germinating_Seeds_cDNA_P Parameter: Tissue Value: Germinating Seeds
  misc_feature: MA Experiment ID: 20000088 Result: Up-regulated in Transcription
  misc_feature: MA Experiment 20000088 PARAMETER Experiment Name: At_100uM_ABA_Mutants_cDNA_P Parameter: Plant Line Value: Landsberg
  misc_feature: MA Experiment 20000088 PARAMETER Experiment Name: At_100uM_ABA_Mutants_cDNA_P Parameter: Timepoint (hr) Value: 6
  misc_feature: MA Experiment 20000088 PARAMETER Experiment Name: At_100uM_ABA_Mutants_cDNA_P Parameter: Tissue Value: Aerial
  misc_feature: MA Experiment 20000088 PARAMETER Experiment Name: At_100uM_ABA_Mutants_cDNA_P Parameter: Treatment Value: 100uM ABA vs. No Treatment
acatcaaaaccgcctccatttctcattctctctctctctaaaaaaccaaatccagagtcagagaaaatctgtgatggctctttccaacgcctcctctctctccaccagatctatctacggcggtgatctttctcaccgtccaagcaaccgtcaatcatccttcacatttcatcccgccgtcaacaccaagcctaaatccgttaacctcgtcacggctgtacacgcggctgagccagctagaaacgctgtttcagtcaaagaatccgttgcgtcttcttcgtctggtgcattgaaatggactccagagagctggaaactgaagaaggctctgcaacttcctgattatcctaacgccaatgagcttgagtctgtgcttaaaacgatagaggcttttcctccgattgtgttcgccggagaagctaggaatcttgaagagagattggctgatgctgctgttggtaaagcttttcttctccaaggaggtgattgtgctgagagtttcaaggagttcaatgctactaatatcagagacaccttcagggttctgcttcagatgagtattgttcttacattcggtggccaggttccggtcattaaggttgggaggatggctggtcaatttgcaaagcctagatctgatgcatttgaggagaaggatggagtgaaattaccaagctacaagggagataacatcaatggtgatacttttgatgagaaatccaggattcctgatcctaataggatgattcgagcttacactcaatctgcagctactttgaatcttcttagagcctttgccactggaggttacgctgctattcaaagagttactcaatggaaccttgattttgttgaacaaagtgagcaagctgacaggtaccaggaattagctaatagggttgatgaggccttggggttcatgtctgcatgtggacttggcacggatcatccacttatgactacaactgatttctacacatcccatgagtgtttgcttctgccttatgaacagtcccttacaaggttggattcaacttctggtctctactatgattgttctgcacacatggtctggtgcggagagcgtaccagacaattggatggcgctcatgtcgagtttctcagggggattgctaatcctctgggcattaaggtgagcaacaaaatggatccctttgagctggttaagctagtagaaatcctgaatcctaataacaagcctggaagaatcactgtaattgtgagaatgggtgccgagaacatgagagttaagcttccccacctgatcagagcagtccgcagatcaggccagattgtgacatgggtctgcgatccaatgcatggaaacaccatcaaagcaccttgcggtcttaaaacacgtgcctttgactcaatactggctgaagtccgagcattccttgatgtgcacgagcaagaaggaagccacgcgggcggtatccatctcgagatgacaggtcagaacgtgacagaatgcattggagggtcccgcactgtgacctacgatgacctcagttctcgctaccacacacactgtgacccaaggctgaacgcgtcacagtctcttgaacttgccttcattgttgcagaacggctcaggaagagaagaacgggtagccagcgtgtgtcttgagtccggttcttcccttttatacactttttgattccaaacaaatcttttctctttgtcctgtgactgtgagttggtgtctttatgacctaagttaaaagccccaaaagcctctctaggaggagtaaacctgtttctgctgtggacagaccatgtcatgtcattgttctttatgttaactttaatgtcaaaccgtgtcacttacactagtgtatatttctttttacatatctacacgaacatgaaacttgt

SEQ ID NO: 80011 - protein, 549 aa, Arabidopsis thaliana; identical to SEQ ID NO: 30915
  peptide (1)..(549): Ceres Seq. ID no. 12654013
  misc_feature (98)..(535): Pfam Name: Class-II DAHP synthetase family Pfam Description: Class-II DAHP synthetase family
  misc_feature (25)..(549): Homolog of NCBI NO: 15236093 NR Description: 2-dehydro-3-deoxyphosphoheptonate aldolase; id: At4g39980.1, supported by cDNA: gi_166687, supported by cDNA: [Arabidopsis thaliana] >gi|20141225|sp|P29976|AROF_ARATH aldolase
  misc_feature (25)..(549): Homolog of NCBI NO: 166688 NR Description: 3-deoxy-D-arabino-heptulosonate y-phosphate
  misc_feature (25)..(549): Homolog of NCBI NO: 99742 NR Description: 2-dehydro-3-deoxy-phosphoheptonate aldolase (EC
  misc_feature (25)..(547): Homolog of NCBI NO: 2546988 NR Description: 2-dehydro-3-deoxyphosphoheptonate aldolase;
  misc_feature (25)..(548): Homolog of NCBI NO: 584779 NR Description: Phospho-2-dehydro-3-deoxyheptonate aldolase 2,
  misc_feature (25)..(548): Homolog of NCBI NO: 584776 NR Description: Phospho-2-dehydro-3-deoxyheptonate aldolase 1,
  misc_feature (25)..(547): Homolog of NCBI NO: 15219878 NR Description: 3-deoxy-D-arabino-heptulosonate 7-phosphate, protein id: At1g22410.1 [Arabidopsis thaliana]
  misc_feature (25)..(548): Homolog of NCBI NO: 114193 NR Description: Phospho-2-dehydro-3-deoxyheptonate aldolase 1,
  misc_feature (25)..(547): Homolog of NCBI NO: 2398679 NR Description: 3-deoxy-D-arabino-heptulosonate 7-phosphate
  misc_feature (3)..(548): Homolog of NCBI NO: 7488957 NR Description: probable 2-dehydro-3-deoxy-phosphoheptonate

SEQ ID NO: 80012 - protein, 525 aa, Arabidopsis thaliana; identical to SEQ ID NO: 30916
  peptide (1)..(525): Ceres Seq. ID no. 12654014
  misc_feature (74)..(511): Pfam Name: Class-II DAHP synthetase family Pfam Description: Class-II DAHP synthetase family
  misc_feature (1)..(525): Homolog of NCBI NO: 15236093 NR Description: 2-dehydro-3-deoxyphosphoheptonate aldolase; id: At4g39980.1, supported by cDNA: gi_166687, supported by cDNA: [Arabidopsis thaliana] >gi|20141225|sp|P29976|AROF_ARATH aldolase
  misc_feature (1)..(525): Homolog of NCBI NO: 166688 NR Description: 3-deoxy-D-arabino-heptulosonate y-phosphate
  misc_feature (1)..(525): Homolog of NCBI NO: 99742 NR Description: 2-dehydro-3-deoxy-phosphoheptonate aldolase (EC
  misc_feature (1)..(523): Homolog of NCBI NO: 2546988 NR Description: 2-dehydro-3-deoxyphosphoheptonate aldolase;
  misc_feature (1)..(524): Homolog of NCBI NO: 584779 NR Description: Phospho-2-dehydro-3-deoxyheptonate aldolase 2,
  misc_feature (1)..(524): Homolog of NCBI NO: 584776 NR Description: Phospho-2-dehydro-3-deoxyheptonate aldolase 1,
  misc_feature (1)..(523): Homolog of NCBI NO: 15219878 NR Description: 3-deoxy-D-arabino-heptulosonate 7-phosphate, protein id: At1g22410.1 [Arabidopsis thaliana]
  misc_feature (1)..(524): Homolog of NCBI NO: 114193 NR Description: Phospho-2-dehydro-3-deoxyheptonate aldolase 1,
  misc_feature (1)..(523): Homolog of NCBI NO: 2398679 NR Description: 3-deoxy-D-arabino-heptulosonate 7-phosphate
  misc_feature (1)..(524): Homolog of NCBI NO: 7488957 NR Description: probable 2-dehydro-3-deoxy-phosphoheptonate

SEQ ID NO: 80013 - protein, 365 aa, Arabidopsis thaliana; identical to SEQ ID NO: 30917
  peptide (1)..(365): Ceres Seq. ID no. 12654015
  misc_feature (1)..(351): Pfam Name: Class-II DAHP synthetase family Pfam Description: Class-II DAHP synthetase family
  misc_feature (1)..(365): Homolog of NCBI NO: 15236093 NR Description: 2-dehydro-3-deoxyphosphoheptonate aldolase; id: At4g39980.1, supported by cDNA: gi_166687, supported by cDNA: [Arabidopsis thaliana] >gi|20141225|sp|P29976|AROF_ARATH aldolase
  misc_feature (1)..(365): Homolog of NCBI NO: 166688 NR Description: 3-deoxy-D-arabino-heptulosonate y-phosphate
  misc_feature (1)..(365): Homolog of NCBI NO: 99742 NR Description: 2-dehydro-3-deoxy-phosphoheptonate aldolase (EC
  misc_feature (1)..(363): Homolog of NCBI NO: 2546988 NR Description: 2-dehydro-3-deoxyphosphoheptonate aldolase;
  misc_feature (1)..(364): Homolog of NCBI NO: 584779 NR Description: Phospho-2-dehydro-3-deoxyheptonate aldolase 2,
  misc_feature (1)..(364): Homolog of NCBI NO: 584776 NR Description: Phospho-2-dehydro-3-deoxyheptonate aldolase 1,
  misc_feature (1)..(363): Homolog of NCBI NO: 15219878 NR Description: 3-deoxy-D-arabino-heptulosonate 7-phosphate, protein id: At1g22410.1 [Arabidopsis thaliana]
  misc_feature (1)..(364): Homolog of NCBI NO: 114193 NR Description: Phospho-2-dehydro-3-deoxyheptonate aldolase 1,
  misc_feature (1)..(363): Homolog of NCBI NO: 2398679 NR Description: 3-deoxy-D-arabino-heptulosonate 7-phosphate
  misc_feature (1)..(364): Homolog of NCBI NO: 7488957 NR Description: probable 2-dehydro-3-deoxy-phosphoheptonate

SEQ ID NO: 80014 - DNA, 804 bp, Arabidopsis thaliana
  misc_feature (1)..(804): Ceres Seq. ID no. 12654051
  misc_feature: MA Experiment ID: 20000185 Result: Down-regulated in Transcription
  misc_feature: MA Experiment 20000185 PARAMETER Experiment Name: At_Roots__P Parameter: Age (day) Value: 7 vs. 21
  misc_feature: MA Experiment 20000185 PARAMETER Experiment Name: At_Roots__P Parameter: Organism Value: A. thaliana
  misc_feature: MA Experiment 20000185 PARAMETER Experiment Name: At_Roots__P Parameter: Tissue Value: Roots vs. Whole Plant
  misc_feature: MA Experiment ID: 20000264 Result: Down-regulated in Transcription
  misc_feature: MA Experiment 20000264 PARAMETER Experiment Name: At_Open_Flower_P Parameter: Age (day) Value: 21
  misc_feature: MA Experiment 20000264 PARAMETER Experiment Name: At_Open_Flower_P Parameter: Plant Line Value: WS
  misc_feature: MA Experiment 20000264 PARAMETER Experiment Name: At_Open_Flower_P Parameter: Tissue Value: Open Flower vs. Whole Plant
  misc_feature: MA Experiment ID: 20000437 Result: Up-regulated in Transcription
  misc_feature: MA Experiment 20000437 PARAMETER Experiment Name: At_Drought_P Parameter: Age (day) Value: 8
  misc_feature: MA Experiment 20000437 PARAMETER Experiment Name: At_Drought_P Parameter: Organism Value: A. thaliana
  misc_feature: MA Experiment 20000437 PARAMETER Experiment Name: At_Drought_P Parameter: Plant Line Value: WS
  misc_feature: MA Experiment 20000437 PARAMETER Experiment Name: At_Drought_P Parameter: Timepoint (hr) Value: 24
  misc_feature: MA Experiment 20000437 PARAMETER Experiment Name: At_Drought_P Parameter: Tissue Value: Whole Plant
  misc_feature: MA Experiment 20000437 PARAMETER Experiment Name: At_Drought_P Parameter: Treatment Value: Drought vs. No Drought
  misc_feature: MA Experiment ID: 20000438 Result: Down-regulated in Transcription
  misc_feature: MA Experiment 20000438 PARAMETER Experiment Name: At_Shoots__P Parameter: Age (day) Value: 14
  misc_feature: MA Experiment 20000438 PARAMETER Experiment Name: At_Shoots__P Parameter: Tissue Value: Shoots vs. Whole Plant
  misc_feature: MA Experiment ID: 20000439 Result: Down-regulated in Transcription
  misc_feature: MA Experiment 20000439 PARAMETER Experiment Name: At_Roots__P Parameter: Age (day) Value: 14 vs. 21
  misc_feature: MA Experiment 20000439 PARAMETER Experiment Name: At_Roots__P Parameter: Organism Value: A. thaliana
  misc_feature: MA Experiment 20000439 PARAMETER Experiment Name: At_Roots__P Parameter: Tissue Value: Roots vs. Whole Plant
atgtcatcgtcgacgatgtacagaggagttaatatgttttcaccggcaaacacaaactggatttttcaagaagtcagagaagccacgtggacggcggaggagaacaaacggttcgagaaagctctcgcttatctggacgacaaagacaatcttgagagctggtccaagatcgcagatttgattcccggcaaaacagtagctgacgtcattaaacgatacaaggagctagaggatgatgtcagcgacatcgaagccggacttatccccattccgggatacggcggcgacgcctcctccgctgcaaacagtgactatttctttggtctagaaaactccagctacggttatgattacgtcgttggaggaaagaggagttcgccggcgatgactgattgttttaggtctccgatgccggaaaaggagaggaagaaaggagttccgtggaccgaggacgaacacctacgatttctgatgggtttgaagaaatatggaaaaggagattggagaaacatagcaaaaagctttgtgacgactcgaacgccgacgcaagtcgcttcacacgctcagaaatattttcttcgacaactcacagatggtaaagacaaaagacgatcaagtattcacgatatcaccactgttaacatccctgacgcagacgcatccgcaaccgccacgaccgctgacgtagcactctctcctactccagccaattcttttgacgttttccttcagccaaatcctcattacagtttcgcgtctgcgtctgcgtctagctattataatgcgtttccgcagtggagttaa

SEQ ID NO: 80015 - protein, 267 aa, Arabidopsis thaliana
  peptide (1)..(267): Ceres Seq. ID no. 12654052
  misc_feature (145)..(192): Pfam Name: Myb-like DNA-binding domain Pfam Description: Myb-like DNA-binding domain
  misc_feature (1)..(267): Homolog of NCBI NO: 15240915 NR Description: myb family transcription factor; protein id:
  misc_feature (6)..(233): Homolog of NCBI NO: 30687381 NR Description: MYB family transcription factor -related thaliana] >gi|26451319|dbj|BAC42760.1| putative MYB family factor [Arabidopsis thaliana] >gi|29824293|gb|AAP04107.1|
  misc_feature (18)..(233): Homolog of NCBI NO: 7446171 NR Description: probable MYB family transcription factor - Arabidopsis thaliana >gi|3335378|gb|AAC27179.1| putative MYB
  misc_feature (6)..(217): Homolog of NCBI NO: 12005328 NR Description: unknown [Hevea brasiliensis]
  misc_feature (16)..(217): Homolog of NCBI NO: 18874265 NR Description: MYB-like transcription factor DVL1 [Antirrhinum
  misc_feature (16)..(217): Homolog of NCBI NO: 18874263 NR Description: MYB-like transcription factor DIVARICATA
  misc_feature (19)..(231): Homolog of NCBI NO: 15237776 NR Description: I-box binding factor - like protein; protein id:
  misc_feature (13)..(221): Homolog of NCBI NO: 34908386 NR Description: P0529E05.19 [Oryza sativa (japonica
  misc_feature (22)..(104): Homolog of NCBI NO: 21618234 NR Description: MYB-family transcription factor, putative
  misc_feature (139)..(219): Homolog of NCBI NO: 21618234 NR Description: MYB-family transcription factor, putative
MSSSTMYRGVNMFSPANTNWIFQEVREATWTAEENKRFEKALAYLDDKDNLESWSKIADLIPGKTVADVIKRYKELEDDVSDIEAGLIPIPGYGGDASSAANSDYFFGLENSSYGYDYVVGGKRSSPAMTDCFRSPMPEKERKKGVPWTEDEHLRFLMGLKKYGKGDWRNIAKSFVTTRTPTQVASHAQKYFLRQLTDGKDKRRSSIHDITTVNIPDADASATATTADVALSPTPANSFDVFLQPNPHYSFASASASSYYNAFPQWS

SEQ ID NO: 80016 - protein, 262 aa, Arabidopsis thaliana
  peptide (1)..(262): Ceres Seq. ID no. 12654053
  misc_feature (140)..(187): Pfam Name: Myb-like DNA-binding domain Pfam Description: Myb-like DNA-binding domain
  misc_feature (1)..(262): Homolog of NCBI NO: 15240915 NR Description: myb family transcription factor; protein id:
  misc_feature (1)..(228): Homolog of NCBI NO: 30687381 NR Description: MYB family transcription factor -related thaliana] >gi|26451319|dbj|BAC42760.1| putative MYB family factor [Arabidopsis thaliana] >gi|29824293|gb|AAP04107.1|
  misc_feature (13)..(228): Homolog of NCBI NO: 7446171 NR Description: probable MYB family transcription factor - Arabidopsis thaliana >gi|3335378|gb|AAC27179.1| putative MYB
  misc_feature (1)..(212): Homolog of NCBI NO: 12005328 NR Description: unknown [Hevea brasiliensis]
  misc_feature (11)..(212): Homolog of NCBI NO: 18874265 NR Description: MYB-like transcription factor DVL1 [Antirrhinum
  misc_feature (11)..(212): Homolog of NCBI NO: 18874263 NR Description: MYB-like transcription factor DIVARICATA
  misc_feature (14)..(226): Homolog of NCBI NO: 15237776 NR Description: I-box binding factor - like protein; protein id:
  misc_feature (8)..(216): Homolog of NCBI NO: 34908386 NR Description: P0529E05.19 [Oryza sativa (japonica
  misc_feature (17)..(99): Homolog of NCBI NO: 21618234 NR Description: MYB-family transcription factor, putative
  misc_feature (134)..(214): Homolog of NCBI NO: 21618234 NR Description: MYB-family transcription factor, putative
MYRGVNMFSPANTNWIFQEVREATWTAEENKRFEKALAYLDDKDNLESWSKIADLIPGKTVADVIKRYKELEDDVSDIEAGLIPIPGYGGDASSAANSDYFFGLENSSYGYDYVVGGKRSSPAMTDCFRSPMPEKERKKGVPWTEDEHLRFLMGLKKYGKGDWRNIAKSFVTTRTPTQVASHAQKYFLRQLTDGKDKRRSSIHDITTVNIPDADASATATTADVALSPTPANSFDVFLQPNPHYSFASASASSYYNAFPQWS

SEQ ID NO: 80017 - protein, 256 aa, Arabidopsis thaliana
  peptide (1)..(256): Ceres Seq. ID no. 12654054
  misc_feature (134)..(181): Pfam Name: Myb-like DNA-binding domain Pfam Description: Myb-like DNA-binding domain
  misc_feature (1)..(256): Homolog of NCBI NO: 15240915 NR Description: myb family transcription factor; protein id:
  misc_feature (1)..(222): Homolog of NCBI NO: 30687381 NR Description: MYB family transcription factor -related thaliana] >gi|26451319|dbj|BAC42760.1| putative MYB family factor [Arabidopsis thaliana] >gi|29824293|gb|AAP04107.1|
  misc_feature (7)..(222): Homolog of NCBI NO: 7446171 NR Description: probable MYB family transcription factor - Arabidopsis thaliana >gi|3335378|gb|AAC27179.1| putative MYB
  misc_feature (1)..(206): Homolog of NCBI NO: 12005328 NR Description: unknown [Hevea brasiliensis]
  misc_feature (5)..(206): Homolog of NCBI NO: 18874265 NR Description: MYB-like transcription factor DVL1 [Antirrhinum
  misc_feature (5)..(206): Homolog of NCBI NO: 18874263 NR Description: MYB-like transcription factor DIVARICATA
  misc_feature (8)..(220): Homolog of NCBI NO: 15237776 NR Description: I-box binding factor - like protein; protein id:
  misc_feature (2)..(210): Homolog of NCBI NO: 34908386 NR Description: P0529E05.19 [Oryza sativa (japonica
  misc_feature (11)..(93): Homolog of NCBI NO: 21618234 NR Description: MYB-family transcription factor, putative
  misc_feature (128)..(208): Homolog of NCBI NO: 21618234 NR Description: MYB-family transcription factor, putative
MFSPANTNWIFQEVREATWTAEENKRFEKALAYLDDKDNLESWSKIADLIPGKTVADVIKRYKELEDDVSDIEAGLIPIPGYGGDASSAANSDYFFGLENSSYGYDYVVGGKRSSPAMTDCFRSPMPEKERKKGVPWTEDEHLRFLMGLKKYGKGDWRNIAKSFVTTRTPTQVASHAQKYFLRQLTDGKDKRRSSIHDITTVNIPDADASATATTADVALSPTPANSFDVFLQPNPHYSFASASASSYYNAFPQWS

SEQ ID NO: 80018 - DNA, 1998 bp, Arabidopsis thaliana
  misc_feature (1)..(1998): Ceres Seq. ID no. 12654091
  misc_feature: MA Experiment ID: 20000307 Result: Down-regulated in Transcription
  misc_feature: MA Experiment 20000307 PARAMETER Experiment Name: At_Germinating_Seeds_Sub_P Parameter: Age (hr) Value: 24 vs. 0
  misc_feature: MA Experiment 20000307 PARAMETER Experiment Name: At_Germinating_Seeds_Sub_P Parameter: Organism Value: A. thaliana
  misc_feature: MA Experiment 20000307 PARAMETER Experiment Name: At_Germinating_Seeds_Sub_P Parameter: Plant Line Value: WS
  misc_feature: MA Experiment 20000307 PARAMETER Experiment Name: At_Germinating_Seeds_Sub_P Parameter: Tissue Value: Germinating Seeds
  misc_feature: MA Experiment ID: 20000327 Result: Down-regulated in Transcription
  misc_feature: MA Experiment 20000327 PARAMETER Experiment Name: At_42deg_Heat_Sub_P Parameter: Age (day) Value: 14
  misc_feature: MA Experiment 20000327 PARAMETER Experiment Name: At_42deg_Heat_Sub_P Parameter: Organism Value: A. thaliana
  misc_feature: MA Experiment 20000327 PARAMETER Experiment Name: At_42deg_Heat_Sub_P Parameter: Plant Line Value: WS
  misc_feature: MA Experiment 20000327 PARAMETER Experiment Name: At_42deg_Heat_Sub_P Parameter: Temperature (deg C) Value: 42 vs. 22
  misc_feature: MA Experiment 20000327 PARAMETER Experiment Name: At_42deg_Heat_Sub_P Parameter: Timepoint (hr) Value: 1
  misc_feature: MA Experiment 20000327 PARAMETER Experiment Name: At_42deg_Heat_Sub_P Parameter: Tissue Value: Aerial
atgaggtatcaatggcgatcgcttcttttccggagctaccgttcgtctcctcgtccatttctttctcatcactcgcggttccaggtaatctccaattcgactcgatctttctcttctttcctccacgaacgttttggagtgcaacaaagacagtgtctttttgccttgcgatcgccattggcgagctctgttagccgacgcttttcatctgagtctgcgatagaagagaaacttcctgctgagactgttgtgattgatgtttttagcagattgaatggtaaggatgagattacgaaagagctggattcgaatgatgttgtgattagccatgaattagcattgagagttctgagggaacttgaatcaagccctgatgttgcggggaggtttttcaaatggggtttggaggcttatcctcaaaaactttcttccaagagttataacacgatgctgcgtatttttggtgttaatggattagttgatgagttttggaggttggttgatgatatgaagaagaaagggcatggtgtttcagctaatgttagggacagagtcggtgacaagtttaagaaagatggactagaaaatgatttggagaggctgaaagagctatttgcttcaggttctatggataactctgttgacaaggtttgcaatagggtgtgtaagattgtgatgaaggaagtgtggggtgctgatgtagagaaacagctaagggatttgaagctcgagtttaaaagtgatgtggtaaagatggttttggaaaaacttgacgtggatccgaggaaagctttgttgttctttaggtggattgatgagtctggaagttttaaacatgatgagaagacgtataatgctatggccagggttttagggaaagagaagtttcttgataggtttcagcacatgatagaagaaattaggagtgctggttacgagatggaaatggagacttatgttagggtttcagcaaggttctgtcagactaaaatgattaaagaagctgttgagttgtttgagtttgcaatggcaggtagcattagcaacacacccaccccacactgctgcagtttactgctcaagaaaattgtcactgcaaagaaattggacatggacttatttacaagaactttgaaagcttatactgggaatggcaacgttgtgccggatgttatgctgcaacatgtcctcaagtctttgagaagcgttgataggtttggacagagcaacgaggtgttgaaagcgatgaacgaaggtggatatgttcctagcggtgatttgcagagtgtgattgcatcaggacttagtcgtaagggcaagaaagatgaagcaaacgaacttgtgaactttatggaagcttctggaaaccatttagatgataaagcaatggcatctttagttgaagggcactgtgatgctaaagatctcgaagaagcttcagagtgtttcaagaagatgattgggaaagagggagtctcttatgcaggttatgcatttgagaagttggtacttgcttattgcaacagttttcaggcaagagatgtatacaagcttttcagtgagctagtgaaacaaaatcagttgaaaccttggcacagtacatacaaaattatggtgaggaatctgttgatgaagaaggtagcaagagatggtgggtttgaagaagctttgagtcttctacctatgatgagaaatcacgggttccctcctttcgtggacccgttcatggattacttatcgaatagtggaacaagcgcagaggctttcgcttttctgaaggctgtgacttcaaagaagtttccatctaattcaatggttctgcgtgtattcgaagctatgttgaagtctgcaaggcatagtgaagctcaggatttactgtctatgtccccaagttatatccgtcgcaatgcagaagttctagaacttttcaataccatgaaacctgaaaaatgttctttagagaaacctttgcctgctcctgctcaaattgaagcttaa

SEQ ID NO: 80019 - protein, 665 aa, Arabidopsis thaliana
  peptide (1)..(665): Ceres Seq. ID no. 12654092
  misc_feature (145)..(179): Pfam Name: PPR repeat Pfam Description: PPR repeat
  misc_feature (1)..(661): Homolog of NCBI NO: 22326834 NR Description: putative protein; protein id: At5g15980.1, by cDNA: gi_20856901 [Arabidopsis thaliana] AT5g15980/F1N13_120 [Arabidopsis thaliana]
  misc_feature (31)..(661): Homolog of NCBI NO: 11357571 NR Description: hypothetical protein F1N13_120 - Arabidopsis >gi|9755644|emb|CAC01797.1| putative protein [Arabidopsis
  misc_feature (96)..(643): Homolog of NCBI NO: 15228363 NR Description: putative protein; protein id: At3g48250.1
  misc_feature (111)..(649): Homolog of NCBI NO: 34905990 NR Description: P0518C01.6 [Oryza sativa (japonica
  misc_feature (178)..(551): Homolog of NCBI NO: 15241508 NR Description: putative protein; protein id: At5g14820.1
  misc_feature (178)..(547): Homolog of NCBI NO: 15228767 NR Description: putative protein; protein id: At3g62470.1
  misc_feature (178)..(551): Homolog of NCBI NO: 15228788 NR Description: putative protein; protein id: At3g62540.1
  misc_feature (8)..(625): Homolog of NCBI NO: 15231863 NR Description: putative protein; protein id: At3g53700.1, by cDNA: gi_15982930 [Arabidopsis thaliana]
  misc_feature (212)..(633): Homolog of NCBI NO: 15240032 NR Description: putative protein; protein id: At5g06400.1 thaliana] >gi|9758420|dbj|BAB08962.1|
  misc_feature (212)..(550): Homolog of NCBI NO: 15223927 NR Description: hypothetical protein; protein id: At1g71060.1
MRYQWRSLLFRSYRSSPRPFLSHHSRFQVISNSTRSFSSFLHERFGVQQRQCLFALRSPLASSVSRRFSSESAIEEKLPAETVVIDVFSRLNGKDEITKELDSNDVVISHELALRVLRELESSPDVAGRFFKWGLEAYPQKLSSKSYNTMLRIFGVNGLVDEFWRLVDDMKKKGHGVSANVRDRVGDKFKKDGLENDLERLKELFASGSMDNSVDKVCNRVCKIVMKEVWGADVEKQLRDLKLEFKSDVVKMVLEKLDVDPRKALLFFRWIDESGSFKHDEKTYNAMARVLGKEKFLDRFQHMIEEIRSAGYEMEMETYVRVSARFCQTKMIKEAVELFEFAMAGSISNTPTPHCCSLLLKKIVTAKKLDMDLFTRTLKAYTGNGNVVPDVMLQHVLKSLRSVDRFGQSNEVLKAMNEGGYVPSGDLQSVIASGLSRKGKKDEANELVNFMEASGNHLDDKAMASLVEGHCDAKDLEEASECFKKMIGKEGVSYAGYAFEKLVLAYCNSFQARDVYKLFSELVKQNQLKPWHSTYKIMVRNLLMKKVARDGGFEEALSLLPMMRNHGFPPFVDPFMDYLSNSGTSAEAFAFLKAVTSKKFPSNSMVLRVFEAMLKSARHSEAQDLLSMSPSYIRRNAEVLELFNTMKPEKCSLEKPLPAPAQIEA

SEQ ID NO: 80020 - protein, 516 aa, Arabidopsis thaliana
  peptide (1)..(516): Ceres Seq. ID no. 12654093
  misc_feature (1)..(30): Pfam Name: PPR repeat Pfam Description: PPR repeat
  misc_feature (1)..(512): Homolog of NCBI NO: 22326834 NR Description: putative protein; protein id: At5g15980.1, by cDNA: gi_20856901 [Arabidopsis thaliana] AT5g15980/F1N13_120 [Arabidopsis thaliana]
  misc_feature (1)..(512): Homolog of NCBI NO: 11357571 NR Description: hypothetical protein F1N13_120 - Arabidopsis >gi|9755644|emb|CAC01797.1| putative protein [Arabidopsis
  misc_feature (1)..(494): Homolog of NCBI NO: 15228363 NR Description: putative protein; protein id: At3g48250.1
  misc_feature (1)..(500): Homolog of NCBI NO: 34905990 NR Description: P0518C01.6 [Oryza sativa (japonica
  misc_feature (29)..(402): Homolog of NCBI NO: 15241508 NR Description: putative protein; protein id: At5g14820.1
  misc_feature (29)..(398): Homolog of NCBI NO: 15228767 NR Description: putative protein; protein id: At3g62470.1
  misc_feature (29)..(402): Homolog of NCBI NO: 15228788 NR Description: putative protein; protein id: At3g62540.1
  misc_feature (1)..(476): Homolog of NCBI NO: 15231863 NR Description: putative protein; protein id: At3g53700.1, by cDNA: gi_15982930 [Arabidopsis thaliana]
  misc_feature (63)..(484): Homolog of NCBI NO: 15240032 NR Description: putative protein; protein id: At5g06400.1 thaliana] >gi|9758420|dbj|BAB08962.1|
  misc_feature (63)..(401): Homolog of NCBI NO: 15223927 NR Description: hypothetical protein; protein id: At1g71060.1
MLRIFGVNGLVDEFWRLVDDMKKKGHGVSANVRDRVGDKFKKDGLENDLERLKELFASGSMDNSVDKVCNRVCKIVMKEVWGADVEKQLRDLKLEFKSDVVKMVLEKLDVDPRKALLFFRWIDESGSFKHDEKTYNAMARVLGKEKFLDRFQHMIEEIRSAGYEMEMETYVRVSARFCQTKMIKEAVELFEFAMAGSISNTPTPHCCSLLLKKIVTAKKLDMDLFTRTLKAYTGNGNVVPDVMLQHVLKSLRSVDRFGQSNEVLKAMNEGGYVPSGDLQSVIASGLSRKGKKDEANELVNFMEASGNHLDDKAMASLVEGHCDAKDLEEASECFKKMIGKEGVSYAGYAFEKLVLAYCNSFQARDVYKLFSELVKQNQLKPWHSTYKIMVRNLLMKKVARDGGFEEALSLLPMMRNHGFPPFVDPFMDYLSNSGTSAEAFAFLKAVTSKKFPSNSMVLRVFEAMLKSARHSEAQDLLSMSPSYIRRNAEVLELFNTMKPEKCSLEKPLPAPAQIEA

SEQ ID NO: 80021 - protein, 496 aa, Arabidopsis thaliana
  peptide (1)..(496): Ceres Seq. ID no. 12654094
  misc_feature (1)..(492): Homolog of NCBI NO: 22326834 NR Description: putative protein; protein id: At5g15980.1, by cDNA: gi_20856901 [Arabidopsis thaliana] AT5g15980/F1N13_120 [Arabidopsis thaliana]
  misc_feature (1)..(492): Homolog of NCBI NO: 11357571 NR Description: hypothetical protein F1N13_120 - Arabidopsis >gi|9755644|emb|CAC01797.1| putative protein [Arabidopsis
  misc_feature (1)..(474): Homolog of NCBI NO: 15228363 NR Description: putative protein; protein id: At3g48250.1
  misc_feature (1)..(480): Homolog of NCBI NO: 34905990 NR Description: P0518C01.6 [Oryza sativa (japonica
  misc_feature (9)..(382): Homolog of NCBI NO: 15241508 NR Description: putative protein; protein id: At5g14820.1
  misc_feature (9)..(378): Homolog of NCBI NO: 15228767 NR Description: putative protein; protein id: At3g62470.1
  misc_feature (9)..(382): Homolog of NCBI NO: 15228788 NR Description: putative protein; protein id: At3g62540.1
  misc_feature (1)..(456): Homolog of NCBI NO: 15231863 NR Description: putative protein; protein id: At3g53700.1, by cDNA: gi_15982930 [Arabidopsis thaliana]
  misc_feature (43)..(464): Homolog of NCBI NO: 15240032 NR Description: putative protein; protein id: At5g06400.1 thaliana] >gi|9758420|dbj|BAB08962.1|
  misc_feature (43)..(381): Homolog of NCBI NO: 15223927 NR Description: hypothetical protein; protein id: At1g71060.1
MKKKGHGVSANVRDRVGDKFKKDGLENDLERLKELFASGSMDNSVDKVCNRVCKIVMKEVWGADVEKQLRDLKLEFKSDVVKMVLEKLDVDPRKALLFFRWIDESGSFKHDEKTYNAMARVLGKEKFLDRFQHMIEEIRSAGYEMEMETYVRVSARFCQTKMIKEAVELFEFAMAGSISNTPTPHCCSLLLKKIVTAKKLDMDLFTRTLKAYTGNGNVVPDVMLQHVLKSLRSVDRFGQSNEVLKAMNEGGYVPSGDLQSVIASGLSRKGKKDEANELVNFMEASGNHLDDKAMASLVEGHCDAKDLEEASECFKKMIGKEGVSYAGYAFEKLVLAYCNSFQARDVYKLFSELVKQNQLKPWHSTYKIMVRNLLMKKVARDGGFEEALSLLPMMRNHGFPPFVDPFMDYLSNSGTSAEAFAFLKAVTSKKFPSNSMVLRVFEAMLKSARHSEAQDLLSMSPSYIRRNAEVLELFNTMKPEKCSLEKPLPAPAQIEA

SEQ ID NO: 80022 - DNA, 2589 bp, Arabidopsis thaliana
  misc_feature (1)..(2589): Ceres Seq. ID no. 12654110
  misc_feature: MA Experiment ID: 20000180 Result: Up-regulated in Transcription
  misc_feature: MA Experiment 20000180 PARAMETER Experiment Name: At_Germinating_Seeds_P Parameter: Age (hr) Value: 24 vs. 0
  misc_feature: MA Experiment 20000180 PARAMETER Experiment Name: At_Germinating_Seeds_P Parameter: Tissue Value: Germinating Seeds
  misc_feature: MA Experiment ID: 20000185 Result: Up-regulated in Transcription
  misc_feature: MA Experiment 20000185 PARAMETER Experiment Name: At_Roots__P Parameter: Age (day) Value: 7 vs. 21
  misc_feature: MA Experiment 20000185 PARAMETER Experiment Name: At_Roots__P Parameter: Organism Value: A. thaliana
  misc_feature: MA Experiment 20000185 PARAMETER Experiment Name: At_Roots__P Parameter: Tissue Value: Roots vs. Whole Plant
  misc_feature: MA Experiment ID: 20000267 Result: Down-regulated in Transcription
  misc_feature: MA Experiment 20000267 PARAMETER Experiment Name: At_Drought_P Parameter: Age (day) Value: 7
  misc_feature: MA Experiment 20000267 PARAMETER Experiment Name: At_Drought_P Parameter: Organism Value: A. thaliana
  misc_feature: MA Experiment 20000267 PARAMETER Experiment Name: At_Drought_P Parameter: Plant Line Value: WS
  misc_feature: MA Experiment 20000267 PARAMETER Experiment Name: At_Drought_P Parameter: Timepoint (hr) Value: 6
  misc_feature: MA Experiment 20000267 PARAMETER Experiment Name: At_Drought_P Parameter: Tissue Value: Whole Plant
  misc_feature: MA Experiment 20000267 PARAMETER Experiment Name: At_Drought_P Parameter: Treatment Value: Drought vs. No Drought
  misc_feature: MA Experiment ID: 20000436 Result: Down-regulated in Transcription
  misc_feature: MA Experiment 20000436 PARAMETER Experiment Name: At_Drought_P Parameter: Age (day) Value: 7
  misc_feature: MA Experiment 20000436 PARAMETER Experiment Name: At_Drought_P Parameter: Organism Value: A. thaliana
  misc_feature: MA Experiment 20000436 PARAMETER Experiment Name: At_Drought_P Parameter: Plant Line Value: WS
  misc_feature: MA Experiment 20000436 PARAMETER Experiment Name: At_Drought_P Parameter: Timepoint (hr) Value: 12
  misc_feature: MA Experiment 20000436 PARAMETER Experiment Name: At_Drought_P Parameter: Tissue Value: Whole Plant
  misc_feature: MA Experiment 20000436 PARAMETER Experiment Name: At_Drought_P Parameter: Treatment Value: Drought vs. No Drought
  misc_feature: MA Experiment ID: 20000437 Result: Down-regulated in Transcription
  misc_feature: MA Experiment 20000437 PARAMETER Experiment Name: At_Drought_P Parameter: Age (day) Value: 8
  misc_feature: MA Experiment 20000437 PARAMETER Experiment Name: At_Drought_P Parameter: Organism Value: A. thaliana
  misc_feature: MA Experiment 20000437 PARAMETER Experiment Name: At_Drought_P Parameter: Plant Line Value: WS
  misc_feature: MA Experiment 20000437 PARAMETER Experiment Name: At_Drought_P Parameter: Timepoint (hr) Value: 24
  misc_feature: MA Experiment 20000437 PARAMETER Experiment Name: At_Drought_P Parameter: Tissue Value: Whole Plant
  misc_feature: MA Experiment 20000437 PARAMETER Experiment Name: At_Drought_P Parameter: Treatment Value: Drought vs. No Drought
  misc_feature: MA Experiment ID: 20000439 Result: Up-regulated in Transcription
  misc_feature: MA Experiment 20000439 PARAMETER Experiment Name: At_Roots__P Parameter: Age (day) Value: 14 vs. 21
  misc_feature: MA Experiment 20000439 PARAMETER Experiment Name: At_Roots__P Parameter: Organism Value: A. thaliana
  misc_feature: MA Experiment 20000439 PARAMETER Experiment Name: At_Roots__P Parameter: Tissue Value: Roots vs. Whole Plant
  misc_feature: MA Experiment ID: 20000794 Result: Up-regulated in Transcription
  misc_feature: MA Experiment 20000794 PARAMETER Experiment Name: At_Petals_P Parameter: Age (day) Value: 23-25 days
  misc_feature: MA Experiment 20000794 PARAMETER Experiment Name: At_Petals_P Parameter: Plant Line Value: WS
  misc_feature: MA Experiment 20000794 PARAMETER Experiment Name: At_Petals_P Parameter: Tissue Value: Petals vs. Whole plant
  misc_feature: MA Experiment ID: 20001910 Result: Up-regulated in Transcription
  misc_feature: MA Experiment 20001910 PARAMETER Experiment Name: At_Drought_Reproduction_P Parameter: Age (day) Value: 37
  misc_feature: MA Experiment 20001910 PARAMETER Experiment Name: At_Drought_Reproduction_P Parameter: Organism Value: A. thaliana
  misc_feature: MA Experiment 20001910 PARAMETER Experiment Name: At_Drought_Reproduction_P Parameter: Plant Line Value: WS
  misc_feature: MA Experiment 20001910 PARAMETER Experiment Name: At_Drought_Reproduction_P Parameter: Timepoint (day) Value: 7
  misc_feature: MA Experiment 20001910 PARAMETER Experiment Name: At_Drought_Reproduction_P Parameter: Tissue Value: Flowers
  misc_feature: MA Experiment 20001910 PARAMETER Experiment Name: At_Drought_Reproduction_P Parameter: Treatment Value: Drought vs. No Drought
agagaaagagaaagagagagaaaaacagagaggttgtcttcttcgtcaaatatccgattatctggtatcgtgattcggaggtgtaatgggaggtagtagcggcggcggagtttcttatcgtagcggcggcgaatcagacgtggaattagaggattacgaggttgatgatttcagagatgggattgtagaatcgcgaggaaacagattcaatcctctcaccaatttcttagggttagacttcgccggcggtagcggtggaaagttcaccgtcattaatggaatcagagatatctccagaggctccattgttcatcccgataaccggtggtacaaggcgtggacgatgtttatattgatatgggcactttattcttccttcttcactccattggaattcggattcttcaggggattaccagagaatctgttcatcctcgatatcgctggccaaatcgctttcttagtagatattgtcttgacattcttcgttgcttatcgtgatagccgaacttatagaatgatctataaacgcagctcaattgctttacggtacttaaaatcaacttttataattgacttacttgcttgcatgccatgggatatcatctacaaggctgcaggcgaaaaagaagaagtgagatacctattgttgataaggctatatcgagttcatagagtaatcctgtttttccacaaaatggagaaagatataagaatcaattacctttttacaagaatcgtcaagcttatattcgtcgagctttattgcactcacaccgcagcttgtatcttctattacttggccacgacgcttcctgcttctcaagaagggtacacttggattggaagcttgaagttaggagattacagttactcgaagtttagagagatcgatctctggactcgatacactacttctatgtactttgcagttgttactatggcaactgttggttatggagatatacacgcggttaatatgcgggaaatgatattcgcgatggtctacatttcattcgatatgattctaggagcttacttgattggtaacatgacagctttgattgtaaaaggttcgaaaacagagagattccgggataagatggctgatatcatgcggtatatgaaccgaaacaaactcggtaggaacatccgtggtcagattaccggacatttgcggttgcagtacgaaagcagctacactgaagcagctgttcttcaagacattcctgtctctatccgtgctaagattgcgcaaactttatacttgccgtatattgagaaagttcctctctttcgcggatgctcatctgaattcattaaccagattgttataagacttcatgaagagttctttcttcctggagaagttataatggagcaaggaagcgtcgttgatcagctctactttgtttgtcacggtgtattggaggagataggtataacaaaggatggatctgaagaaatagtggcagttctacaaccagatcattcttttggagagatttcaatcctctgcaatattcctcagccttacacggttagagttgcagagctatgtcggattctaaggcttgacaagcaatctttcatgaacatactcgagatatttttccatgatggacggaggattctcaacaatctgcttgaagggaaagaatctaatgtccggattaagcaactagaatccgatataacctttcatatcagtaaacaagaggcagagctagctctgaagttgaatagtgcggctttctacggtgatctttatcagcttaagagtttgattcgagctggaggtgacccgaataagacagattatgacggaagatcgcctttgcatcttgcagcctctagaggatatgaagatattacattatatcttatacaagaatcagttgatgtaaatatcaaagataaattggggagcacacctttactagaagcaatcaagaatgggaatgatcgtgttgcggcgttgcttgttaaagaaggagctacgttgaacatagagaacgcagggactttcctttgcaccgtggttgcgaaaggagacagcgatttcttgaaacggcttcttagtaacggaattgatcctaattccaaagattatgatcacagaacacctcttcatgtagctgcctctgaaggattttatgtcttggcgatccaattggtagaagcaagtgctaatgttcttgcaaaagacagatggggaaacacacctcttgatgaagctttgggttgtgggaacaagatgttgataaagttactcgaagacgctaagaattctcaaatctcttcgtttccgagtggctccaaagagcctaaagataaagtctataagaagaaatgtacagtgtatttttcacatcctggtgattcgaaagagaaaagaaggcgcgggattgtactgtgggtacctcgaagcatcgaggagcttataagaacagcaaaggagcagctgaatgttccggaggcttcttgtgtattatctgaagatgaagccaaaattattgatgtagatttgataagtgatggacaaaaactgtatttggctgttgaaacataatgattcgagcaaatttc

SEQ ID NO: 80023 - protein, 828 aa, Arabidopsis thaliana
  peptide (1)..(828): Ceres Seq. ID no. 12654111
  misc_feature (113)..(323): Pfam Name: Ion transport protein Pfam Description: Ion transport protein
  misc_feature (65)..(828): Homolog of NCBI NO: 27651624 NR Description: shaker-like potassium channel [Vitis vinifera]
  misc_feature (20)..(828): Homolog of NCBI NO: 11414742 NR Description: guard cell outward rectifying K+ channel
  misc_feature (20)..(828): Homolog of NCBI NO: 30693099 NR Description: guard cell outward rectifying K+ channel (GORK)
  misc_feature (10)..(821): Homolog of NCBI NO: 10443349 NR Description: outwardly rectifying potassium channel [Samanea
  misc_feature (7)..(827): Homolog of NCBI NO: 9955728 NR Description: outward rectifying potassium channel [Populus
  misc_feature (22)..(734): Homolog of NCBI NO: 38344540 NR Description: OSJNBa0027P08.8 [Oryza sativa (japonica
  misc_feature (521)..(828): Homolog of NCBI NO: 15146306 NR Description: AT5g37500/mpa22_p_30 [Arabidopsis thaliana]
  misc_feature (71)..(748): Homolog of NCBI NO: 99746 NR Description: potassium channel protein AKT1 - Arabidopsis
  misc_feature (71)..(748): Homolog of NCBI NO: 15225768 NR Description: K+ transporter, AKT1; protein id: At2g26650.1, by cDNA: gi_2569932 [Arabidopsis thaliana]
  misc_feature (71)..(714): Homolog of NCBI NO: 7110220 NR Description: AKT1-like potassium channel [Triticum aestivum]
MGGSSGGGVSYRSGGESDVELEDYEVDDFRDGIVESRGNRFNPLTNFLGLDFAGGSGGKFTVINGIRDISRGSIVHPDNRWYKAWTMFILIWALYSSFFTPLEFGFFRGLPENLFILDIAGQIAFLVDIVLTFFVAYRDSRTYRMIYKRSSIALRYLKSTFIIDLLACMPWDIIYKAAGEKEEVRYLLLIRLYRVHRVILFFHKMEKDIRINYLFTRIVKLIFVELYCTHTAACIFYYLATTLPASQEGYTWIGSLKLGDYSYSKFREIDLWTRYTTSMYFAVVTMATVGYGDIHAVNMREMIFAMVYISFDMILGAYLIGNMTALIVKGSKTERFRDKMADIMRYMNRNKLGRNIRGQITGHLRLQYESSYTEAAVLQDIPVSIRAKIAQTLYLPYIEKVPLFRGCSSEFINQIVIRLHEEFFLPGEVIMEQGSVVDQLYFVCHGVLEEIGITKDGSEEIVAVLQPDHSFGEISILCNIPQPYTVRVAELCRILRLDKQSFMNILEIFFHDGRRILNNLLEGKESNVRIKQLESDITFHISKQEAELALKLNSAAFYGDLYQLKSLIRAGGDPNKTDYDGRSPLHLAASRGYEDITLYLIQESVDVNIKDKLGSTPLLEAIKNGNDRVAALLVKEGATLNIENAGTFLCTVVAKGDSDFLKRLLSNGIDPNSKDYDHRTPLHVAASEGFYVLAIQLVEASANVLAKDRWGNTPLDEALGCGNKMLIKLLEDAKNSQISSFPSGSKEPKDKVYKKKCTVYFSHPGDSKEKRRRGIVLWVPRSIEELIRTAKEQLNVPEASCVLSEDEAKIIDVDLISDGQKLYLAVET

SEQ ID NO: 80024 - protein, 742 aa, Arabidopsis thaliana
  peptide (1)..(742): Ceres Seq. ID no. 12654112
  misc_feature (27)..(237): Pfam Name: Ion transport protein Pfam Description: Ion transport protein
  misc_feature (1)..(742): Homolog of NCBI NO: 27651624 NR Description: shaker-like potassium channel [Vitis vinifera]
  misc_feature (1)..(742): Homolog of NCBI NO: 11414742 NR Description: guard cell outward rectifying K+ channel
  misc_feature (1)..(742): Homolog of NCBI NO: 30693099 NR Description: guard cell outward rectifying K+ channel (GORK)
  misc_feature (1)..(735): Homolog of NCBI NO: 10443349 NR Description: outwardly rectifying potassium channel [Samanea
  misc_feature (1)..(741): Homolog of NCBI NO: 9955728 NR Description: outward rectifying potassium channel [Populus
  misc_feature (1)..(648): Homolog of NCBI NO: 38344540 NR Description: OSJNBa0027P08.8 [Oryza sativa (japonica
  misc_feature (435)..(742): Homolog of NCBI NO: 15146306 NR Description: AT5g37500/mpa22_p_30 [Arabidopsis thaliana]
  misc_feature (1)..(662): Homolog of NCBI NO: 99746 NR Description: potassium channel protein AKT1 - Arabidopsis
  misc_feature (1)..(662): Homolog of NCBI NO: 15225768 NR Description: K+ transporter, AKT1; protein id: At2g26650.1, by cDNA: gi_2569932 [Arabidopsis thaliana]
  misc_feature (1)..(628): Homolog of NCBI NO: 7110220 NR Description: AKT1-like potassium channel [Triticum aestivum]
MFILIWALYSSFFTPLEFGFFRGLPENLFILDIAGQIAFLVDIVLTFFVAYRDSRTYRMIYKRSSIALRYLKSTFIIDLLACMPWDIIYKAAGEKEEVRYLLLIRLYRVHRVILFFHKMEKDIRINYLFTRIVKLIFVELYCTHTAACIFYYLATTLPASQEGYTWIGSLKLGDYSYSKFREIDLWTRYTTSMYFAVVTMATVGYGDIHAVNMREMIFAMVYISFDMILGAYLIGNMTALIVKGSKTERFRDKMADIMRYMNRNKLGRNIRGQITGHLRLQYESSYTEAAVLQDIPVSIRAKIAQTLYLPYIEKVPLFRGCSSEFINQIVIRLHEEFFLPGEVIMEQGSVVDQLYFVCHGVLEEIGITKDGSEEIVAVLQPDHSFGEISILCNIPQPYTVRVAELCRILRLDKQSFMNILEIFFHDGRRILNNLLEGKESNVRIKQLESDITFHISKQEAELALKLNSAAFYGDLYQLKSLIRAGGDPNKTDYDGRSPLHLAASRGYEDITLYLIQESVDVNIKDKLGSTPLLEAIKNGNDRVAALLVKEGATLNIENAGTFLCTVVAKGDSDFLKRLLSNGIDPNSKDYDHRTPLHVAASEGFYVLAIQLVEASANVLAKDRWGNTPLDEALGCGNKMLIKLLEDAKNSQISSFPSGSKEPKDKVYKKKCTVYFSHPGDSKEKRRRGIVLWVPRSIEELIRTAKEQLNVPEASCVLSEDEAKIIDVDLISDGQKLYLAVET

SEQ ID NO: 80025 - protein, 684 aa, Arabidopsis thaliana
  peptide (1)..(684): Ceres Seq. ID no. 12654113
  misc_feature (1)..(179): Pfam Name: Ion transport protein Pfam Description: Ion transport protein
  misc_feature (1)..(684): Homolog of NCBI NO: 27651624 NR Description: shaker-like potassium channel [Vitis vinifera]
  misc_feature (1)..(684): Homolog of NCBI NO: 11414742 NR Description: guard cell outward rectifying K+ channel
  misc_feature (1)..(684): Homolog of NCBI NO: 30693099 NR Description: guard cell outward rectifying K+ channel (GORK)
  misc_feature (1)..(677): Homolog of NCBI NO: 10443349 NR Description: outwardly rectifying potassium channel [Samanea
  misc_feature (1)..(683): Homolog of NCBI NO: 9955728 NR Description: outward rectifying potassium channel [Populus
  misc_feature (1)..(590): Homolog of NCBI NO: 38344540 NR Description: OSJNBa0027P08.8 [Oryza sativa (japonica
  misc_feature (377)..(684): Homolog of NCBI NO: 15146306 NR Description: AT5g37500/mpa22_p_30 [Arabidopsis thaliana]
  misc_feature (1)..(604): Homolog of NCBI NO: 99746 NR Description: potassium channel protein AKT1 - Arabidopsis
  misc_feature (1)..(604): Homolog of NCBI NO: 15225768 NR Description: K+ transporter, AKT1; protein id: At2g26650.1, by cDNA: gi_2569932 [Arabidopsis thaliana]
  misc_feature (1)..(570): Homolog of NCBI NO: 7110220 NR Description: AKT1-like potassium channel [Triticum aestivum]
MIYKRSSIALRYLKSTFIIDLLACMPWDIIYKAAGEKEEVRYLLLIRLYRVHRVILFFHKMEKDIRINYLFTRIVKLIFVELYCTHTAACIFYYLATTLPASQEGYTWIGSLKLGDYSYSKFREIDLWTRYTTSMYFAVVTMATVGYGDIHAVNMREMIFAMVYISFDMILGAYLIGNMTALIVKGSKTERFRDKMADIMRYMNRNKLGRNIRGQITGHLRLQYESSYTEAAVLQDIPVSIRAKIAQTLYLPYIEKVPLFRGCSSEFINQIVIRLHEEFFLPGEVIMEQGSVVDQLYFVCHGVLEEIGITKDGSEEIVAVLQPDHSFGEISILCNIPQPYTVRVAELCRILRLDKQSFMNILEIFFHDGRRILNNLLEGKESNVRIKQLESDITFHISKQEAELALKLNSAAFYGDLYQLKSLIRAGGDPNKTDYDGRSPLHLAASRGYEDITLYLIQESVDVNIKDKLGSTPLLEAIKNGNDRVAALLVKEGATLNIENAGTFLCTVVAKGDSDFLKRLLSNGIDPNSKDYDHRTPLHVAASEGFYVLAIQLVEASANVLAKDRWGNTPLDEALGCGNKMLIKLLEDAKNSQISSFPSGSKEPKDKVYKKKCTVYFSHPGDSKEKRRRGIVLWVPRSIEELIRTAKEQLNVPEASCVLSEDEAKIIDVDLISDGQKLYLAVET

SEQ ID NO: 80026 - DNA, 1228 bp, Arabidopsis thaliana
  misc_feature (1)..(1228): Ceres Seq. ID no. 12654117
  misc_feature: MA Experiment ID: 20000227 Result: Down-regulated in Transcription
  misc_feature: MA Experiment 20000227 PARAMETER Experiment Name: At_Root-Tips-vs-Tops_P Parameter: Tissue Value: Root Tips vs. Root Tops
  misc_feature: MA Experiment ID: 20000439 Result: Up-regulated in Transcription
  misc_feature: MA Experiment 20000439 PARAMETER Experiment Name: At_Roots__P Parameter: Age (day) Value: 14 vs. 21
  misc_feature: MA Experiment 20000439 PARAMETER Experiment Name: At_Roots__P Parameter: Organism Value: A. thaliana
  misc_feature: MA Experiment 20000439 PARAMETER Experiment Name: At_Roots__P Parameter: Tissue Value: Roots vs. Whole Plant
  misc_feature: MA Experiment ID: 20001761 Result: Down-regulated in Transcription
  misc_feature: MA Experiment 20001761 PARAMETER Experiment Name: At_50mM_NH4NO3_L-to-H_P Parameter: Timepoint (hr) Value: 4
  misc_feature: MA Experiment 20001761 PARAMETER Experiment Name: At_50mM_NH4NO3_L-to-H_P Parameter: Tissue Value: Siliques
  misc_feature: MA Experiment 20001761 PARAMETER Experiment Name: At_50mM_NH4NO3_L-to-H_P Parameter: Treatment Value: 50mM NH4NO3 vs 100mM Mannitol
  misc_feature: MA Experiment ID: 20001906 Result: Up-regulated in Transcription
  misc_feature: MA Experiment 20001906 PARAMETER Experiment Name: At_Drought_Reproduction_P Parameter: Age (day) Value: 35
  misc_feature: MA Experiment 20001906 PARAMETER Experiment Name: At_Drought_Reproduction_P Parameter: Organism Value: A. thaliana
  misc_feature: MA Experiment 20001906 PARAMETER Experiment Name: At_Drought_Reproduction_P Parameter: Plant Line Value: WS
  misc_feature: MA Experiment 20001906 PARAMETER Experiment Name: At_Drought_Reproduction_P Parameter: Timepoint (day) Value: 5
  misc_feature: MA Experiment 20001906 PARAMETER Experiment Name: At_Drought_Reproduction_P Parameter: Tissue Value: Siliques
  misc_feature: MA Experiment 20001906 PARAMETER Experiment Name: At_Drought_Reproduction_P Parameter: Treatment Value: Drought vs. No Drought
actaagatcttgccttcaccatttttctctcttctcgattatatctctaacctcaaaggtacatttaatagctagatgttataacaaaatggggagatcaccgtgttgcgatgagagcggattaaagaaagggccatggacgccagaagaagatcagaaactgataaatcacataagaaaacacggccatggaagctggagagctctacccaagcaagccggtttaaaccggtgtgggaagagttgcagattgagatggactaattacttgagaccagatatcaaaagaggaaacttcacagctgaggaagaacaaactatcattaaccttcattctcttcttgggaacaagtggtcgtctatagctggtcatctcccaggaagaacggataacgaaataaagaactattggaacacgcatattagaaagaaacttattcagatgggaatcgatccggtgacccataggccaagaaccgaccatctaaacgttctagccgctctcccgcaactactagctgccgcaaatttcaacaacctcttgaatctaaatcaaaatatacaattggatgcaacaagtgttgcgaaagcccaactgttacatagtatgattcaagtccttagcaacaacaatacctcttcttcctttgacattcatcacacaaccaataatctctttggccaatcttctttcttagagaacctaccaaatattgaaaatccttatgatcaaacccaaggcctctctcacattgacgatcagcctctggattcgttttctagcccgattcgagtagttgcttatcaacatgatcagaattttattccgcccttgatttcgacatctcctgatgagtctaaggaaacccaaatgatggtcaagaacaaggaaatcatgaagtataatgatcatacttcaaacccttcgtcgacctcaacttttacacaagatcaccagccatggtgtgacataattgatgatgaagcaagtgattcttattggaaagagatcatagagcaaacttgttcggagccttggccatttcgtgaatagagatgaaagtaaaacattagtcttatttttttctgtggatatagatatatacatatacgttgttaattaactttcatacaatttgtgtcttaattattttccaaccatgtatacaaacacattgatactgtacaaaactgattatcattatatataagaaaattaattcatgac

SEQ ID NO: 80027 - protein, 350 aa, Arabidopsis thaliana
  peptide (1)..(350): Ceres Seq. ID no. 12654118
  misc_feature (43)..(90): Pfam Name: Myb-like DNA-binding domain Pfam Description: Myb-like DNA-binding domain
  misc_feature (30)..(350): Homolog of NCBI NO: 15233021 NR Description: myb family transcription factor; protein id: supported by cDNA: gi_15375289 [Arabidopsis thaliana] putative MYB family transcription factor [Arabidopsis thaliana]
  misc_feature (30)..(350): Homolog of NCBI NO: 30686014 NR Description: myb DNA-binding protein(AtMYB9) [Arabidopsis
  misc_feature (30)..(339): Homolog of NCBI NO: 11358678 NR Description: probable transcription factor (MYB9) - thaliana >gi|9755729|emb|CAC01841.1| putative transcription
  misc_feature (104)..(350): Homolog of NCBI NO: 11358565 NR Description: myb-related transcription factor MYB9 [imported] Arabidopsis thaliana (fragment) >gi|3941414|gb|AAC83583.1|
  misc_feature (30)..(214): Homolog of NCBI NO: 30024598 NR Description: transcription factor MYB101 [Lotus japonicus]
  misc_feature (30)..(324): Homolog of NCBI NO: 30024600 NR Description: transcription factor MYB102 [Lotus japonicus]
  misc_feature (30)..(339): Homolog of NCBI NO: 30024602 NR Description: transcription factor MYB103 [Lotus japonicus]
LRSCLHHFSLFSIISLTSKVHLIARCYNKMGRSPCCDESGLKKGPWTPEEDQKLINHIRKHGHGSWRALPKQAGLNRCGKSCRLRWTNYLRPDIKRGNFTAEEEQTIINLHSLLGNKWSSIAGHLPGRTDNEIKNYWNTHIRKKLIQMGIDPVTHRPRTDHLNVLAALPQLLAAANFNNLLNLNQNIQLDATSVAKAQLLHSMIQVLSNNNTSSSFDIHHTTNNLFGQSSFLENLPNIENPYDQTQGLSHIDDQPLDSFSSPIRVVAYQHDQNFIPPLISTSPDESKETQMMVKNKEIMKYNDHTSNPSSTSTFTQDHQPWCDIIDDEASDSYWKEIIEQTCSEPWPFRE

SEQ ID NO: 80028 - protein, 321 aa, Arabidopsis thaliana
  peptide (1)..(321): Ceres Seq. ID no. 12654119
  misc_feature (14)..(61): Pfam Name: Myb-like DNA-binding domain Pfam Description: Myb-like DNA-binding domain
  misc_feature (1)..(321): Homolog of NCBI NO: 15233021 NR Description: myb family transcription factor; protein id: supported by cDNA: gi_15375289 [Arabidopsis thaliana] putative MYB family transcription factor [Arabidopsis thaliana]
  misc_feature (1)..(321): Homolog of NCBI NO: 30686014 NR Description: myb DNA-binding protein(AtMYB9) [Arabidopsis
  misc_feature (1)..(310): Homolog of NCBI NO: 11358678 NR Description: probable transcription factor (MYB9) - thaliana >gi|9755729|emb|CAC01841.1| putative transcription
  misc_feature (75)..(321): Homolog of NCBI NO: 11358565 NR Description: myb-related transcription factor MYB9 [imported] Arabidopsis thaliana (fragment) >gi|3941414|gb|AAC83583.1|
  misc_feature (1)..(185): Homolog of NCBI NO: 30024598 NR Description: transcription factor MYB101 [Lotus japonicus]
  misc_feature (1)..(295): Homolog of NCBI NO: 30024600 NR Description: transcription factor MYB102 [Lotus japonicus]
  misc_feature (1)..(310): Homolog of NCBI NO: 30024602 NR Description: transcription factor MYB103 [Lotus japonicus]
MGRSPCCDESGLKKGPWTPEEDQKLINHIRKHGHGSWRALPKQAGLNRCGKSCRLRWTNYLRPDIKRGNFTAEEEQTIINLHSLLGNKWSSIAGHLPGRTDNEIKNYWNTHIRKKLIQMGIDPVTHRPRTDHLNVLAALPQLLAAANFNNLLNLNQNIQLDATSVAKAQLLHSMIQVLSNNNTSSSFDIHHTTNNLFGQSSFLENLPNIENPYDQTQGLSHIDDQPLDSFSSPIRVVAYQHDQNFIPPLISTSPDESKETQMMVKNKEIMKYNDHTSNPSSTSTFTQDHQPWCDIIDDEASDSYWKEIIEQTCSEPWPFRE

SEQ ID NO: 80029 - protein, 203 aa, Arabidopsis thaliana
  peptide (1)..(203): Ceres Seq. ID no. 12654120
  misc_feature (1)..(203): Homolog of NCBI NO: 15233021 NR Description: myb family transcription factor; protein id: supported by cDNA: gi_15375289 [Arabidopsis thaliana] putative MYB family transcription factor [Arabidopsis thaliana]
  misc_feature (1)..(203): Homolog of NCBI NO: 30686014 NR Description: myb DNA-binding protein(AtMYB9) [Arabidopsis
  misc_feature (1)..(192): Homolog of NCBI NO: 11358678 NR Description: probable transcription factor (MYB9) - thaliana >gi|9755729|emb|CAC01841.1| putative transcription
  misc_feature (1)..(203): Homolog of NCBI NO: 11358565 NR Description: myb-related transcription factor MYB9 [imported] Arabidopsis thaliana (fragment) >gi|3941414|gb|AAC83583.1|
  misc_feature (1)..(67): Homolog of NCBI NO: 30024598 NR Description: transcription factor MYB101 [Lotus japonicus]
  misc_feature (1)..(177): Homolog of NCBI NO: 30024600 NR Description: transcription factor MYB102 [Lotus japonicus]
  misc_feature (1)..(192): Homolog of NCBI NO: 30024602 NR Description: transcription factor MYB103 [Lotus japonicus]
MGIDPVTHRPRTDHLNVLAALPQLLAAANFNNLLNLNQNIQLDATSVAKAQLLHSMIQVLSNNNTSSSFDIHHTTNNLFGQSSFLENLPNIENPYDQTQGLSHIDDQPLDSFSSPIRVVAYQHDQNFIPPLISTSPDESKETQMMVKNKEIMKYNDHTSNPSSTSTFTQDHQPWCDIIDDEASDSYWKEIIEQTCSEPWPFRE

SEQ ID NO: 80030 - DNA, 1819 bp, Arabidopsis thaliana
  misc_feature (1)..(1819): Ceres Seq. ID no. 12654121
  misc_feature: MA Experiment ID: 20000180 Result: Down-regulated in Transcription
  misc_feature: MA Experiment 20000180 PARAMETER Experiment Name: At_Germinating_Seeds_P Parameter: Age (hr) Value: 24 vs. 0
  misc_feature: MA Experiment 20000180 PARAMETER Experiment Name: At_Germinating_Seeds_P Parameter: Tissue Value: Germinating Seeds
  misc_feature: MA Experiment ID: 20000437 Result: Up-regulated in Transcription
  misc_feature: MA Experiment 20000437 PARAMETER Experiment Name: At_Drought_P Parameter: Age (day) Value: 8
  misc_feature: MA Experiment 20000437 PARAMETER Experiment Name: At_Drought_P Parameter: Organism Value: A. thaliana
  misc_feature: MA Experiment 20000437 PARAMETER Experiment Name: At_Drought_P Parameter: Plant Line Value: WS
  misc_feature: MA Experiment 20000437 PARAMETER Experiment Name: At_Drought_P Parameter: Timepoint (hr) Value: 24
  misc_feature: MA Experiment 20000437 PARAMETER Experiment Name: At_Drought_P Parameter: Tissue Value: Whole Plant
  misc_feature: MA Experiment 20000437 PARAMETER Experiment Name: At_Drought_P Parameter: Treatment Value: Drought vs. No Drought
  misc_feature: MA Experiment ID: 20001905 Result: Up-regulated in Transcription
  misc_feature: MA Experiment 20001905 PARAMETER Experiment Name: At_Drought_Reproduction_P Parameter: Age (day) Value: 40
  misc_feature: MA Experiment 20001905 PARAMETER Experiment Name: At_Drought_Reproduction_P Parameter: Organism Value: A. thaliana
  misc_feature: MA Experiment 20001905 PARAMETER Experiment Name: At_Drought_Reproduction_P Parameter: Plant Line Value: WS
  misc_feature: MA Experiment 20001905 PARAMETER Experiment Name: At_Drought_Reproduction_P Parameter: Timepoint (day) Value: 10
  misc_feature: MA Experiment 20001905 PARAMETER Experiment Name: At_Drought_Reproduction_P Parameter: Tissue Value: Rosettes
  misc_feature: MA Experiment 20001905 PARAMETER Experiment Name: At_Drought_Reproduction_P Parameter: Treatment Value: Drought vs. No Drought
  misc_feature: MA Experiment ID: 20001911 Result: Up-regulated in Transcription
  misc_feature: MA Experiment 20001911 PARAMETER Experiment Name: At_Drought_Reproduction_P Parameter: Age (day) Value: 40
  misc_feature: MA Experiment 20001911 PARAMETER Experiment Name: At_Drought_Reproduction_P Parameter: Organism Value: A. thaliana
  misc_feature: MA Experiment 20001911 PARAMETER Experiment Name: At_Drought_Reproduction_P Parameter: Plant Line Value: WS
  misc_feature: MA Experiment 20001911 PARAMETER Experiment Name: At_Drought_Reproduction_P Parameter: Timepoint (day) Value: 10
  misc_feature: MA Experiment 20001911 PARAMETER Experiment Name: At_Drought_Reproduction_P Parameter: Tissue Value: Flowers
  misc_feature: MA Experiment 20001911 PARAMETER Experiment Name: At_Drought_Reproduction_P Parameter: Treatment Value: Drought vs. No Drought
cgaatataaatctctgtaaggtttgcgaagaccggagtagtgaatctcggaattgttgaagaagacggtacaccggaatcaattgcgattttgatttatgggaacggtttgcgaatctgtagcgacggcgaaatcttcgacggcggtgatgagctccattccgccttttctgagcaaaacgtacgatatggttgacgatccattgacggacgacgtggtgtcttggagcagcggaaacaacagcttcgtggtttggaacgtgcctgagttcgccaaacagtttctaccaaagtatttcaagcacaacaatttctccagcttcgtcagacagctcaatacttatggttttagaaaagttgatccagaccgctgggagtttgcaaacgagggctttttaagaggccaaaagcaaatactaaagagtattgtccggcgaaaacctgcacaagtgcagcctccacaacaacctcaagttcagcactcatctgtgggtgcgtgcgttgaagtgggcaaatttggactcgaagaggaagtggaaagacttcagcgcgataagaacgtccttatgcaggaacttgtaaggttgaggcagcaacaacaagttaccgaacatcatctgcagaatgtggggcagaaagttcatgtgatggagcagaggcagcaacagatgatgtcctttctagcaaaggctgtccaaagtccaggtttcttaaaccaattttctcagcagagtaatgaagcaaaccaacacatttctgaaagcaacaaaaagaggaggctacctgttgaggaccagatgaattctggcagtcatggggttaatggtcttagccgccagattgtgagatatcagtcatcgatgaacgatgcaacaaacactatgcttcaacagatacagcagatgagtaatgcacctagccatgaatctctctcaagcaataatggtagctttcttttgggcgatgttccaaattctaacatttcagacaatgggagctcctcaaatggatcacctgaagttacattggcagatgtttcatccattcctgcaggcttctatcctgcaatgaagtaccacgagccttgtgaaacaaatcaagtcatggagaccaatttgcctttttctcaaggtgatctcttacctccaacgcaaggagcagcagcttctgggagctcaagttcggatcttgttggatgcgagacagataatggagagtgtttggatccaataatggctgttttggatggcgcactcgaactagaagctgataccttaaatgagttgcttcctgaagtccaagattctttttgggaacagttcattggtgagagcccagtgattggtgagacagatgagttaatctcaggatcagtggaaaatgaactgatattggagcaactagagttacaatcaaccctgagtaatgtgtggagcaagaatcaacaaatgaaccatcttactgaacagatgggacttctcacatcagatgctctcagaaaatgagattgccacaggccacaatctttcctcacgagatgggttaagattttgtggagccgcaacaacaaaaagaatatgaccaaaggaggtactatgtatgtatgtatcaaactgttgtaactctaattcttgtcaatgtataataaaataagagaaatattgccttaaaagatttttgcattgcaatatctttgtttgttactgacagaatgaaaaggagatgcttcaaagtgagagatattcttctgttcttgtgtatgtctttagagatccttgtttatttttgttacattaagtgcaaaaattggcattttggtt

SEQ ID NO: 80031 - protein, 468 aa, Arabidopsis thaliana
  peptide (1)..(468): Ceres Seq. ID no. 12654122
  misc_feature (22)..(195): Pfam Name: HSF-type DNA-binding Pfam Description: HSF-type DNA-binding
  misc_feature (1)..(468): Homolog of NCBI NO: 15228440 NR Description: putative heat shock transcription factor; protein At3g02990.1 [Arabidopsis thaliana] Heat shock factor protein 2 (HSF 2) (Heat shock transcription
  misc_feature (1)..(468): Homolog of NCBI NO: 6624612 NR Description: heat shock factor 2 [Arabidopsis thaliana]
  misc_feature (1)..(468): Homolog of NCBI NO: 25296101 NR Description: heat shock transcription factor HSF3 [imported] - thaliana (fragment) >gi|3256068|emb|CAA74397.1| Heat Shock Factor
  misc_feature (1)..(468): Homolog of NCBI NO: 30686034 NR Description: heat shock transcription factor 3 (HSF3) thaliana] >gi|30686038|ref|NP_850832.1| heat shock transcription
  misc_feature (31)..(468): Homolog of NCBI NO: 11357325 NR Description: Heat Shock Factor 3 - Arabidopsis thaliana
  misc_feature (1)..(389): Homolog of NCBI NO: 27261140 NR Description: HSF3 DNA-binding domain/VP16 activation domain
  misc_feature (2)..(313): Homolog of NCBI NO: 29126355 NR Description: putative heat shock transcription factor [Oryza
  misc_feature (22)..(313): Homolog of NCBI NO: 729775 NR Description: HEAT SHOCK FACTOR PROTEIN HSF8 (HEAT SHOCK FACTOR 8) (HSTF 8) (HEAT STRESS TRANSCRIPTION FACTOR)
  misc_feature (1)..(425): Homolog of NCBI NO: 11386827 NR Description: Heat shock factor protein HSF8 (Heat shock factor 8) (HSTF 8) (Heat stress transcription factor)
  misc_feature (16)..(466): Homolog of NCBI NO: 15223168 NR Description: heat shock transcription factor HSF8, putative; id: At1g32330.1 [Arabidopsis thaliana] >gi|25296102|pir||H86447
MGTVCESVATAKSSTAVMSSIPPFLSKTYDMVDDPLTDDVVSWSSGNNSFVVWNVPEFAKQFLPKYFKHNNFSSFVRQLNTYGFRKVDPDRWEFANEGFLRGQKQILKSIVRRKPAQVQPPQQPQVQHSSVGACVEVGKFGLEEEVERLQRDKNVLMQELVRLRQQQQVTEHHLQNVGQKVHVMEQRQQQMMSFLAKAVQSPGFLNQFSQQSNEANQHISESNKKRRLPVEDQMNSGSHGVNGLSRQIVRYQSSMNDATNTMLQQIQQMSNAPSHESLSSNNGSFLLGDVPNSNISDNGSSSNGSPEVTLADVSSIPAGFYPAMKYHEPCETNQVMETNLPFSQGDLLPPTQGAAASGSSSSDLVGCETDNGECLDPIMAVLDGALELEADTLNELLPEVQDSFWEQFIGESPVIGETDELISGSVENELILEQLELQSTLSNVWSKNQQMNHLTEQMGLLTSDALRK

SEQ ID NO: 80032 - protein, 451 aa, Arabidopsis thaliana
  peptide (1)..(451): Ceres Seq. ID no. 12654123
  misc_feature (5)..(178): Pfam Name: HSF-type DNA-binding Pfam Description: HSF-type DNA-binding
  misc_feature (1)..(451): Homolog of NCBI NO: 15228440 NR Description: putative heat shock transcription factor; protein At3g02990.1 [Arabidopsis thaliana] Heat shock factor protein 2 (HSF 2) (Heat shock transcription
  misc_feature (1)..(451): Homolog of NCBI NO: 6624612 NR Description: heat shock factor 2 [Arabidopsis thaliana]
  misc_feature (1)..(451): Homolog of NCBI NO: 25296101 NR Description: heat shock transcription factor HSF3 [imported] - thaliana (fragment) >gi|3256068|emb|CAA74397.1| Heat Shock Factor
  misc_feature (1)..(451): Homolog of NCBI NO: 30686034 NR Description: heat shock transcription factor 3 (HSF3) thaliana] >gi|30686038|ref|NP_850832.1| heat shock transcription
  misc_feature (14)..(451): Homolog of NCBI NO: 11357325 NR Description: Heat Shock Factor 3 - Arabidopsis thaliana
  misc_feature (1)..(372): Homolog of NCBI NO: 27261140 NR Description: HSF3 DNA-binding domain/VP16 activation domain
  misc_feature (1)..(296): Homolog of NCBI NO: 29126355 NR Description: putative heat shock transcription factor [Oryza
  misc_feature (5)..(296): Homolog of NCBI NO: 729775 NR Description: HEAT SHOCK FACTOR PROTEIN HSF8 (HEAT SHOCK FACTOR 8) (HSTF 8) (HEAT STRESS TRANSCRIPTION FACTOR)
  misc_feature (1)..(408): Homolog of NCBI NO: 11386827 NR Description: Heat shock factor protein HSF8 (Heat shock factor 8) (HSTF 8) (Heat stress transcription factor)
  misc_feature (1)..(449): Homolog of NCBI NO: 15223168 NR Description: heat shock transcription factor HSF8, putative; id: At1g32330.1 [Arabidopsis thaliana] >gi|25296102|pir||H86447
MSSIPPFLSKTYDMVDDPLTDDVVSWSSGNNSFVVWNVPEFAKQFLPKYFKHNNFSSFVRQLNTYGFRKVDPDRWEFANEGFLRGQKQILKSIVRRKPAQVQPPQQPQVQHSSVGACVEVGKFGLEEEVERLQRDKNVLMQELVRLRQQQQVTEHHLQNVGQKVHVMEQRQQQMMSFLAKAVQSPGFLNQFSQQSNEANQHISESNKKRRLPVEDQMNSGSHGVNGLSRQIVRYQSSMNDATNTMLQQIQQMSNAPSHESLSSNNGSFLLGDVPNSNISDNGSSSNGSPEVTLADVSSIPAGFYPAMKYHEPCETNQVMETNLPFSQGDLLPPTQGAAASGSSSSDLVGCETDNGECLDPIMAVLDGALELEADTLNELLPEVQDSFWEQFIGESPVIGETDELISGSVENELILEQLELQSTLSNVWSKNQQMNHLTEQMGLLTSDALRK

SEQ ID NO: 80033 - protein, 438 aa, Arabidopsis thaliana
  peptide (1)..(438): Ceres Seq. ID no. 12654124
  misc_feature (1)..(165): Pfam Name: HSF-type DNA-binding Pfam Description: HSF-type DNA-binding
  misc_feature (1)..(438): Homolog of NCBI NO: 15228440 NR Description: putative heat shock transcription factor; protein At3g02990.1 [Arabidopsis thaliana] Heat shock factor protein 2 (HSF 2) (Heat shock transcription
  misc_feature (1)..(438): Homolog of NCBI NO: 6624612 NR Description: heat shock factor 2 [Arabidopsis thaliana]
  misc_feature (1)..(438): Homolog of NCBI NO: 25296101 NR Description: heat shock transcription factor HSF3 [imported] - thaliana (fragment) >gi|3256068|emb|CAA74397.1| Heat Shock Factor
  misc_feature (1)..(438): Homolog of NCBI NO: 30686034 NR Description: heat shock transcription factor 3 (HSF3) thaliana] >gi|30686038|ref|NP_850832.1| heat shock transcription
  misc_feature (1)..(438): Homolog of NCBI NO: 11357325 NR Description: Heat Shock Factor 3 - Arabidopsis thaliana
  misc_feature (1)..(359): Homolog of NCBI NO: 27261140 NR Description: HSF3 DNA-binding domain/VP16 activation domain
  misc_feature (1)..(283): Homolog of NCBI NO: 29126355 NR Description: putative heat shock transcription factor [Oryza
  misc_feature (1)..(283): Homolog of NCBI NO: 729775 NR Description: HEAT SHOCK FACTOR PROTEIN HSF8 (HEAT SHOCK FACTOR 8) (HSTF 8) (HEAT STRESS TRANSCRIPTION FACTOR)
  misc_feature (1)..(395): Homolog of NCBI NO: 11386827 NR Description: Heat shock factor protein HSF8 (Heat shock factor 8) (HSTF 8) (Heat stress transcription factor)
  misc_feature (1)..(436): Homolog of NCBI NO: 15223168 NR Description: heat shock transcription factor HSF8, putative; id: At1g32330.1 [Arabidopsis thaliana] >gi|25296102|pir||H86447
MVDDPLTDDVVSWSSGNNSFVVWNVPEFAKQFLPKYFKHNNFSSFVRQLNTYGFRKVDPDRWEFANEGFLRGQKQILKSIVRRKPAQVQPPQQPQVQHSSVGACVEVGKFGLEEEVERLQRDKNVLMQELVRLRQQQQVTEHHLQNVGQKVHVMEQRQQQMMSFLAKAVQSPGFLNQFSQQSNEANQHISESNKKRRLPVEDQMNSGSHGVNGLSRQIVRYQSSMNDATNTMLQQIQQMSNAPSHESLSSNNGSFLLGDVPNSNISDNGSSSNGSPEVTLADVSSIPAGFYPAMKYHEPCETNQVMETNLPFSQGDLLPPTQGAAASGSSSSDLVGCETDNGECLDPIMAVLDGALELEADTLNELLPEVQDSFWEQFIGESPVIGETDELISGSVENELILEQLELQSTLSNVWSKNQQMNHLTEQMGLLTSDALRK

SEQ ID NO: 80034 - DNA, 1053 bp, Arabidopsis thaliana
  misc_feature (1)..(1053): Ceres Seq. ID no. 12654137
  misc_feature: MA Experiment ID: 20000346 Result: Up-regulated in Transcription
  misc_feature: MA Experiment 20000346 PARAMETER Experiment Name: At_2mM_SA_Sub_P Parameter: Age (day) Value: 14
  misc_feature: MA Experiment 20000346 PARAMETER Experiment Name: At_2mM_SA_Sub_P Parameter: Organism Value: A. thaliana
  misc_feature: MA Experiment 20000346 PARAMETER Experiment Name: At_2mM_SA_Sub_P Parameter: Plant Line Value: WS
  misc_feature: MA Experiment 20000346 PARAMETER Experiment Name: At_2mM_SA_Sub_P Parameter: Timepoint (hr) Value: 1
  misc_feature: MA Experiment 20000346 PARAMETER Experiment Name: At_2mM_SA_Sub_P Parameter: Tissue Value: Aerial
  misc_feature: MA Experiment 20000346 PARAMETER Experiment Name: At_2mM_SA_Sub_P Parameter: Treatment Value: 2mM SA vs. No Treatment
  misc_feature: MA Experiment ID: 20000440 Result: Up-regulated in Transcription
  misc_feature: MA Experiment 20000440 PARAMETER Experiment Name: At_Closed-Flower__Sub_P Parameter: Tissue Value: Closed Flower vs. Whole Plant
atggcaacctcaggcaatgcgacggtggccaataagcaggtcatactgcgagattacgtcaccggtttccccaaggaatcagacctcatcttcaccgattccaccatcgatttaaagattccggagggatccaagacggttctggtgaagaatctctacttgtcttgcgatccttacatgcgcattcgcatggggaagcccgatcccggcactgctgcgctcgctccacattacattcctggcgagccaatttatgggttttcagtgtcaaaagtgatagattctgggcatccagattacaaaaagggagacttactttggggattagttggatggggggagtacagtcttatcactccagatttttcacattacaagatccaacacaccgatgttcccttatcctactacactggacttctcggtatgcccggtatgactgcctatgctggattttatgaaatatgttctcctaagaaaggagaaaccgtattcgtgtcagctgcgtctggtgcagttggtcagctcgtgggacaatttgcaaagattatgggctgctatgttgttggaagtgcaggcagtaatgaaaaggttgatcttctcaagaacaaattcgggtttgatgatgcattcaattacaaagcagagccagaccttaatgctgccctgaagaggtgtttcccggaaggaatcgacatatactttgagaatgtaggaggcaaaatgctagacgcagtgctcctaaacatgaaactacacggccgtatcgcagtatgtggtatgatctcacagtacaaccttgaggaccaagaaggtgtacacaacctagcaaacgtgatctacaagcggattcggattaaagggttcgtggtctctgattacttcgacaaacacttgaagttcctggattttgtgcttccgtatataagagaagggaagataacgtatgttgaggatgtagttgaaggacttgagaacggaccttcagctttgcttggactattccatggtaagaacgtcggcaaacaactcatagcggttgctcgtgaatga

SEQ ID NO: 80035 - protein, 350 aa, Arabidopsis thaliana
  peptide (1)..(350): Ceres Seq. ID no. 12654138
  misc_feature (111)..(347): Pfam Name: Zinc-binding dehydrogenase Pfam Description: Zinc-binding dehydrogenase
  misc_feature (1)..(350): Homolog of NCBI NO: 15228456 NR Description: putative NADP-dependent oxidoreductase; protein At3g03080.1 [Arabidopsis thaliana]
  misc_feature (8)..(350): Homolog of NCBI NO: 15237888 NR Description: quinone oxidoreductase -like protein; protein id:
  misc_feature (8)..(350): Homolog of NCBI NO: 22326861 NR Description: quinone oxidoreductase - like protein; protein At5g17000.1, supported by cDNA: gi_16604343, supported by cDNA: [Arabidopsis thaliana] >gi|16604344|gb|AAL24178.1|
  misc_feature (8)..(350): Homolog of NCBI NO: 17529140 NR Description: putative quinone oxidoreductase [Arabidopsis
  misc_feature (8)..(350): Homolog of NCBI NO: 21539447 NR Description: quinone oxidoreductase-like protein [Arabidopsis
  misc_feature (11)..(350): Homolog of NCBI NO: 15237890 NR Description: quinone oxidoreductase - like protein; protein At5g16990.1, supported by cDNA: gi_17529037, supported by cDNA:
  misc_feature (1)..(350): Homolog of NCBI NO: 21593645 NR Description: allyl alcohol dehydrogenase, putative
  misc_feature (11)..(350): Homolog of NCBI NO: 21554121 NR Description: quinone oxidoreductase-like protein [Arabidopsis
  misc_feature (1)..(350): Homolog of NCBI NO: 15222685 NR Description: allyl alcohol dehydrogenase, putative; protein
  misc_feature (11)..(350): Homolog of NCBI NO: 1362014 NR Description: probable NADPH2:quinone reductase (EC 1.6.5.5) P2
MATSGNATVANKQVILRDYVTGFPKESDLIFTDSTIDLKIPEGSKTVLVKNLYLSCDPYMRIRMGKPDPGTAALAPHYIPGEPIYGFSVSKVIDSGHPDYKKGDLLWGLVGWGEYSLITPDFSHYKIQHTDVPLSYYTGLLGMPGMTAYAGFYEICSPKKGETVFVSAASGAVGQLVGQFAKIMGCYVVGSAGSNEKVDLLKNKFGFDDAFNYKAEPDLNAALKRCFPEGIDIYFENVGGKMLDAVLLNMKLHGRIAVCGMISQYNLEDQEGVHNLANVIYKRIRIKGFVVSDYFDKHLKFLDFVLPYIREGKITYVEDVVEGLENGPSALLGLFHGKNVGKQLIAVARE

SEQ ID NO: 80036 - protein, 291 aa, Arabidopsis thaliana
  peptide (1)..(291): Ceres Seq. ID no. 12654139
  misc_feature (52)..(288): Pfam Name: Zinc-binding dehydrogenase Pfam Description: Zinc-binding dehydrogenase
  misc_feature (1)..(291): Homolog of NCBI NO: 15228456 NR Description: putative NADP-dependent oxidoreductase; protein At3g03080.1 [Arabidopsis thaliana]
  misc_feature (1)..(291): Homolog of NCBI NO: 15237888 NR Description: quinone oxidoreductase -like protein; protein id:
  misc_feature (1)..(291): Homolog of NCBI NO: 22326861 NR Description: quinone oxidoreductase - like protein; protein At5g17000.1, supported by cDNA: gi_16604343, supported by cDNA: [Arabidopsis thaliana] >gi|16604344|gb|AAL24178.1|
  misc_feature (1)..(291): Homolog of NCBI NO: 17529140 NR Description: putative quinone oxidoreductase [Arabidopsis
  misc_feature (1)..(291): Homolog of NCBI NO: 21539447 NR Description: quinone oxidoreductase-like protein [Arabidopsis
  misc_feature (1)..(291): Homolog of NCBI NO: 15237890 NR Description: quinone oxidoreductase - like protein; protein At5g16990.1, supported by cDNA: gi_17529037, supported by cDNA:
  misc_feature (1)..(291): Homolog of NCBI NO: 21593645 NR Description: allyl alcohol dehydrogenase, putative
  misc_feature (1)..(291): Homolog of NCBI NO: 21554121 NR Description: quinone oxidoreductase-like protein [Arabidopsis
  misc_feature (1)..(291): Homolog of NCBI NO: 15222685 NR Description: allyl alcohol dehydrogenase, putative; protein
  misc_feature (1)..(291): Homolog of NCBI NO: 1362014 NR Description: probable NADPH2:quinone reductase (EC 1.6.5.5) P2
MRIRMGKPDPGTAALAPHYIPGEPIYGFSVSKVIDSGHPDYKKGDLLWGLVGWGEYSLITPDFSHYKIQHTDVPLSYYTGLLGMPGMTAYAGFYEICSPKKGETVFVSAASGAVGQLVGQFAKIMGCYVVGSAGSNEKVDLLKNKFGFDDAFNYKAEPDLNAALKRCFPEGIDIYFENVGGKMLDAVLLNMKLHGRIAVCGMISQYNLEDQEGVHNLANVIYKRIRIKGFVVSDYFDKHLKFLDFVLPYIREGKITYVEDVVEGLENGPSALLGLFHGKNVGKQLIAVARE

SEQ ID NO: 80037 - protein, 287 aa, Arabidopsis thaliana
  peptide (1)..(287): Ceres Seq. ID no. 12654140
  misc_feature (48)..(284): Pfam Name: Zinc-binding dehydrogenase Pfam Description: Zinc-binding dehydrogenase
  misc_feature (1)..(287): Homolog of NCBI NO: 15228456 NR Description: putative NADP-dependent oxidoreductase; protein At3g03080.1 [Arabidopsis thaliana]
  misc_feature (1)..(287): Homolog of NCBI NO: 15237888 NR Description: quinone oxidoreductase -like protein; protein id:
  misc_feature (1)..(287): Homolog of NCBI NO: 22326861 NR Description: quinone oxidoreductase - like protein; protein At5g17000.1, supported by cDNA: gi_16604343, supported by cDNA: [Arabidopsis thaliana] >gi|16604344|gb|AAL24178.1|
  misc_feature (1)..(287): Homolog of NCBI NO: 17529140 NR Description: putative quinone oxidoreductase [Arabidopsis
  misc_feature (1)..(287): Homolog of NCBI NO: 21539447 NR Description: quinone oxidoreductase-like protein [Arabidopsis
  misc_feature (1)..(287): Homolog of NCBI NO: 15237890 NR Description: quinone oxidoreductase - like protein; protein At5g16990.1, supported by cDNA: gi_17529037, supported by cDNA:
  misc_feature (1)..(287): Homolog of NCBI NO: 21593645 NR Description: allyl alcohol dehydrogenase, putative
  misc_feature (1)..(287): Homolog of NCBI NO: 21554121 NR Description: quinone oxidoreductase-like protein [Arabidopsis
  misc_feature (1)..(287): Homolog of NCBI NO: 15222685 NR Description: allyl alcohol dehydrogenase, putative; protein
  misc_feature (1)..(287): Homolog of NCBI NO: 1362014 NR Description: probable NADPH2:quinone reductase (EC 1.6.5.5) P2
MGKPDPGTAALAPHYIPGEPIYGFSVSKVIDSGHPDYKKGDLLWGLVGWGEYSLITPDFSHYKIQHTDVPLSYYTGLLGMPGMTAYAGFYEICSPKKGETVFVSAASGAVGQLVGQFAKIMGCYVVGSAGSNEKVDLLKNKFGFDDAFNYKAEPDLNAALKRCFPEGIDIYFENVGGKMLDAVLLNMKLHGRIAVCGMISQYNLEDQEGVHNLANVIYKRIRIKGFVVSDYFDKHLKFLDFVLPYIREGKITYVEDVVEGLENGPSALLGLFHGKNVGKQLIAVARE

SEQ ID NO: 80038 - DNA, 3418 bp, Arabidopsis thaliana
  misc_feature (1)..(3418): Ceres Seq. ID no. 12654141
  misc_feature: MA Experiment ID: 20001451 Result: Up-regulated in Transcription
  misc_feature: MA Experiment 20001451 PARAMETER Experiment Name: At_Far-red-induction_P Parameter: Age (day) Value: 7
  misc_feature: MA Experiment 20001451 PARAMETER Experiment Name: At_Far-red-induction_P Parameter: Light Value: Far-red vs. White
  misc_feature: MA Experiment 20001451 PARAMETER Experiment Name: At_Far-red-induction_P Parameter: Organism Value: A. thaliana
  misc_feature: MA Experiment 20001451 PARAMETER Experiment Name: At_Far-red-induction_P Parameter: Plant Line Value: Columbia
  misc_feature: MA Experiment 20001451 PARAMETER Experiment Name: At_Far-red-induction_P Parameter: Timepoint (hr) Value: 24
  misc_feature: MA Experiment 20001451 PARAMETER Experiment Name: At_Far-red-induction_P Parameter: Tissue Value: Whole Plant
atggctgccgagaagttaagagacttgagtcagccgattgacgtcgttttactcgatgccactgttgaggccttttactctaccggatctaaggaagaaagagcttctgcggataatatcttgcgggatttgaaagctaatcctgatacttggcttcaagttgttcacattctacagaacaccagtagtacgcataccaaattttttgcccttcaggtgctggaaggtgttataaaatataggtggaatgcattacccgttgaacaacgtgatggaatgaaaaattacatctctgatgtcattgtgcagctgtcaagggatgaagcatctttcagaacggaaaggctttatgtcaacaagttaaatatcatcctggttcagatcgtgaaacaggagtggccggcaaagtggaaaagctttattcctgatttagttatagctgctaagactagtgaaactatctgtgagaattgcatggctattttgaaactcctaagtgaagaggtctttgatttctcaaaaggagagatgactcagcaaaagataaaagaactgaaacagtctctaaacagcgagtttcaactcattcacgagttatgcctatatgtcctctcagcttcccaaagacaagagcttatacgtgctacactctctgcattgcatgcctatctttcttggattccgttgggatacatatttgagtcccctttgctggagatcctacttaaattcttccctgttccagcatataggaatctcacacttcaatgtttgtcagaggttgcatctcttaattttggggacttctacgatatgcaatatgtcaagatgtacagcattttcatgaatcagttgcaggcaattctccctttaaatttaaatatccctgaggcatattcaactggaagtagtgaagaacaggcaagtgcttttatccagaacttggcactgtttttcacttcgtttttcaagttacatataaaaatcctagaatctgcacccgaaaatatttctctattacttgcgggtctgggatatctcattagcatatcgtatgttgatgacactgaagtattcaagaatggtcccatgttatctgttgacgctttggaaactgacagcttttgcttgcttacgagtgaacagatggctttccttcctagtacagttgatggtgttaaatctgaagtcactgagcggcaaaaactttattcagatccaatgtcaaaattaaggggactcatgattagtcgcacggctaagcctgaagaagtgttaattgttgaggacgaaaatgggaacattgttcgtgaaactatgaaggataatgatgttcttgtccagtataagataatgcgggagacattaatctacctctcacaccttgatcatgaagataccgaaaaacagatgttgagtaagctaagcaaacagttgagcggggaggaatgggcatggaacaatctaaacactttatgctgggctattgggtctatttctgggtccatggtagtagaacaggaaaacagatttctcgtgatggttatccgtgatttgttaagtttatgtgaagtcgtcaagggaaaagacaataaagctgttattgcgagcaacatcatgtacgttgttggacaatattcaagattcttaagagcccattggaagtttttgaagacagttgtccataagctgtttgaatttatgcatgagacgcatcctggtgttcaggacatggcttgcgacacattcttaaaaattgttcagaagtgtaagcgaaaatttgttattgttcaggttggagaaagtgagccatttgtgtctgaacttctatcaggccttgctacaatcgtcggagatcttcaacctcatcagattcatacattttatgaatctgttggtagtatgatccaggcagaatcagatcctcagaagaggggggaatacctccagaggttgatggctctcccgaatcagaaatgggcagaaattataggacaagcacgtcaaagtgcagatatcctcaaggaaccagatgtgatacgtactgtgcttaatatcctccagacaaatacgcgcgttgcaacttcactaggaacattcttcctgtctcaaatttcgttgatcttcttggatatgctgaatgtttacagaatgtatagtgaactcgtttcaagcagcattgctaatggtggcccatacgcttcgagaacatctcttgttaaacttttaaggtctgttaagagggaaattcttaagctgatagagacgtttttagataaagctgaaaaccagccacacattggaaaacagtttgttccaccaatgatggatcaagtacttggcgactatgcaagaaatgttcctgatgcaagagaatcagaagtcttgtcactctttgcgacaataatcaacaaatacaaggttgtaatgcgagatgaagttcccctcatatttgaagctgttttccagtgcacattggagatgattactaagaattttgaagattacccagagcaccgtctcaagtttttctcgttacttcgtgctattgctacattttgtttccgtgcgttgatacagttgtcaagtgagcaactgaagctagtgatggattcagttatctgggcatttaggcatactgaaagaaatatcgctgaaactgggctcaatctcttgctcgagatgctgaaaaactttcagaaatctgacttttgtaacaaattctaccaaacatactttctgcaaattgagcaagaagtatttgctgtcttgaccgataccttccacaagcctgggttcaagttgcatgtgttggtgttgcagcacttatttagcctggttgagagcggatcattggcagaaccattgtgggatgctgcaacggtaccgcatccttattcaaataatgtcgcctttgtgcttgagtacaccaccaagcttctaagctcatcattccccaacatgactacaacagaggtgacacagtttgtgaatggactttacgagtcgagaaacgatgttggcagatttaaggataacatacgcgacttccttatacagtccaaggaattttctgctcaggataacaaagatttatatgctgaggaagctgctgcccaaatggagagagagagacaaagaatgctttcgattcctggacttatagctcccagcgaaattcaagacgacatggccgattcttaagtcttgtttttatattttataagaagaaggctctcgaaaagagaaatggaattttttttgtagagatcttgagaaatggaaagcttagaaaagacaagtgttaggttttctaaattacaatcttttttgttggatttgttactattaaatgaaaaatgtttaggatctcaaaattaatcgaacctcaaaccggttataaaccggtcttaatttc

SEQ ID NO: 80039 - protein, 1067 aa, Arabidopsis thaliana
  peptide (1)..(1067): Ceres Seq. ID no. 12654142
  misc_feature (37)..(103): Pfam Name: Importin-beta N-terminal domain Pfam Description: Importin-beta N-terminal domain
  misc_feature (2)..(1066): Homolog of NCBI NO: 5690335 NR Description: CRM1/XPO1 protein [Xenopus laevis]
  misc_feature (2)..(1066): Homolog of NCBI NO: 29789299 NR Description: exportin 1 (CRM1, yeast, homolog) [Rattus >gi|28971720|dbj|BAC65240.1| nuclear export factor CRM1 [Rattus
  misc_feature (2)..(1066): Homolog of NCBI NO: 4507943 NR Description: exportin 1; CRM1, yeast, homolog; Exportin-1 for chromosome region maintenance); exportin 1 (CRM1, yeast, [Homo sapiens] >gi|2626840|dbj|BAA23415.1| CRM1 protein [Homo
  misc_feature (4)..(1060): Homolog of NCBI NO: 11493965 NR Description: crm1 protein [Schizosaccharomyces pombe]
  misc_feature (4)..(1060): Homolog of NCBI NO: 19856107 NR Description: Exportin 1 (Chromosome region maintenance protein
  misc_feature (4)..(1060): Homolog of NCBI NO: 11281651 NR Description: CRM1/exportin 1 - fission yeast
  misc_feature (4)..(1044): Homolog of NCBI NO: 30794645 NR Description: exportin 1 [Trypanosoma brucei brucei]
  misc_feature (4)..(1044): Homolog of NCBI NO: 30790417 NR Description: CRM1 [Trypanosoma brucei]
  misc_feature (4)..(982): Homolog of NCBI NO: 30790419 NR Description: CRM1 [Trypanosoma cruzi]
  misc_feature (398)..(1036): Homolog of NCBI NO: 30790419 NR Description: CRM1 [Trypanosoma cruzi]
MAAEKLRDLSQPIDVVLLDATVEAFYSTGSKEERASADNILRDLKANPDTWLQVVHILQNTSSTHTKFFALQVLEGVIKYRWNALPVEQRDGMKNYISDVIVQLSRDEASFRTERLYVNKLNIILVQIVKQEWPAKWKSFIPDLVIAAKTSETICENCMAILKLLSEEVFDFSKGEMTQQKIKELKQSLNSEFQLIHELCLYVLSASQRQELIRATLSALHAYLSWIPLGYIFESPLLEILLKFFPVPAYRNLTLQCLSEVASLNFGDFYDMQYVKMYSIFMNQLQAILPLNLNIPEAYSTGSSEEQASAFIQNLALFFTSFFKLHIKILESAPENISLLLAGLGYLISISYVDDTEVFKNGPMLSVDALETDSFCLLTSEQMAFLPSTVDGVKSEVTERQKLYSDPMSKLRGLMISRTAKPEEVLIVEDENGNIVRETMKDNDVLVQYKIMRETLIYLSHLDHEDTEKQMLSKLSKQLSGEEWAWNNLNTLCWAIGSISGSMVVEQENRFLVMVIRDLLSLCEVVKGKDNKAVIASNIMYVVGQYSRFLRAHWKFLKTVVHKLFEFMHETHPGVQDMACDTFLKIVQKCKRKFVIVQVGESEPFVSELLSGLATIVGDLQPHQIHTFYESVGSMIQAESDPQKRGEYLQRLMALPNQKWAEIIGQARQSADILKEPDVIRTVLNILQTNTRVATSLGTFFLSQISLIFLDMLNVYRMYSELVSSSIANGGPYASRTSLVKLLRSVKREILKLIETFLDKAENQPHIGKQFVPPMMDQVLGDYARNVPDARESEVLSLFATIINKYKVVMRDEVPLIFEAVFQCTLEMITKNFEDYPEHRLKFFSLLRAIATFCFRALIQLSSEQLKLVMDSVIWAFRHTERNIAETGLNLLLEMLKNFQKSDFCNKFYQTYFLQIEQEVFAVLTDTFHKPGFKLHVLVLQHLFSLVESGSLAEPLWDAATVPHPYSNNVAFVLEYTTKLLSSSFPNMTTTEVTQFVNGLYESRNDVGRFKDNIRDFLIQSKEFSAQDNKDLYAEEAAAQMERERQRMLSIPGLIAPSEIQDDMADS

SEQ ID NO: 80040 - protein, 975 aa, Arabidopsis thaliana
  peptide (1)..(975): Ceres Seq. ID no. 12654143
  misc_feature (1)..(974): Homolog of NCBI NO: 5690335 NR Description: CRM1/XPO1 protein [Xenopus laevis]
  misc_feature (1)..(974): Homolog of NCBI NO: 29789299 NR Description: exportin 1 (CRM1, yeast, homolog) [Rattus >gi|28971720|dbj|BAC65240.1| nuclear export factor CRM1 [Rattus
  misc_feature (1)..(974): Homolog of NCBI NO: 4507943 NR Description: exportin 1; CRM1, yeast, homolog; Exportin-1 for chromosome region maintenance); exportin 1 (CRM1, yeast, [Homo sapiens] >gi|2626840|dbj|BAA23415.1| CRM1 protein [Homo
  misc_feature (1)..(968): Homolog of NCBI NO: 11493965 NR Description: crm1 protein [Schizosaccharomyces pombe]
  misc_feature (1)..(968): Homolog of NCBI NO: 19856107 NR Description: Exportin 1 (Chromosome region maintenance protein
  misc_feature (1)..(968): Homolog of NCBI NO: 11281651 NR Description: CRM1/exportin 1 - fission yeast
  misc_feature (1)..(952): Homolog of NCBI NO: 30794645 NR Description: exportin 1 [Trypanosoma brucei brucei]
  misc_feature (1)..(952): Homolog of NCBI NO: 30790417 NR Description: CRM1 [Trypanosoma brucei]
  misc_feature (1)..(890): Homolog of NCBI NO: 30790419 NR Description: CRM1 [Trypanosoma cruzi]
  misc_feature (306)..(944): Homolog of NCBI NO: 30790419 NR Description: CRM1 [Trypanosoma cruzi]
MKNYISDVIVQLSRDEASFRTERLYVNKLNIILVQIVKQEWPAKWKSFIPDLVIAAKTSETICENCMAILKLLSEEVFDFSKGEMTQQKIKELKQSLNSEFQLIHELCLYVLSASQRQELIRATLSALHAYLSWIPLGYIFESPLLEILLKFFPVPAYRNLTLQCLSEVASLNFGDFYDMQYVKMYSIFMNQLQAILPLNLNIPEAYSTGSSEEQASAFIQNLALFFTSFFKLHIKILESAPENISLLLAGLGYLISISYVDDTEVFKNGPMLSVDALETDSFCLLTSEQMAFLPSTVDGVKSEVTERQKLYSDPMSKLRGLMISRTAKPEEVLIVEDENGNIVRETMKDNDVLVQYKIMRETLIYLSHLDHEDTEKQMLSKLSKQLSGEEWAWNNLNTLCWAIGSISGSMVVEQENRFLVMVIRDLLSLCEVVKGKDNKAVIASNIMYVVGQYSRFLRAHWKFLKTVVHKLFEFMHETHPGVQDMACDTFLKIVQKCKRKFVIVQVGESEPFVSELLSGLATIVGDLQPHQIHTFYESVGSMIQAESDPQKRGEYLQRLMALPNQKWAEIIGQARQSADILKEPDVIRTVLNILQTNTRVATSLGTFFLSQISLIFLDMLNVYRMYSELVSSSIANGGPYASRTSLVKLLRSVKREILKLIETFLDKAENQPHIGKQFVPPMMDQVLGDYARNVPDARESEVLSLFATIINKYKVVMRDEVPLIFEAVFQCTLEMITKNFEDYPEHRLKFFSLLRAIATFCFRALIQLSSEQLKLVMDSVIWAFRHTERNIAETGLNLLLEMLKNFQKSDFCNKFYQTYFLQIEQEVFAVLTDTFHKPGFKLHVLVLQHLFSLVESGSLAEPLWDAATVPHPYSNNVAFVLEYTTKLLSSSFPNMTTTEVTQFVNGLYESRNDVGRFKDNIRDFLIQSKEFSAQDNKDLYAEEAAAQMERERQRMLSIPGLIAPSEIQDDMADS

SEQ ID NO: 80041 - protein, 909 aa, Arabidopsis thaliana
  peptide (1)..(909): Ceres Seq. ID no. 12654144
  misc_feature (1)..(908): Homolog of NCBI NO: 5690335 NR Description: CRM1/XPO1 protein [Xenopus laevis]
  misc_feature (1)..(908): Homolog of NCBI NO: 29789299 NR Description: exportin 1 (CRM1, yeast, homolog) [Rattus >gi|28971720|dbj|BAC65240.1| nuclear export factor CRM1 [Rattus
  misc_feature (1)..(908): Homolog of NCBI NO: 4507943 NR Description: exportin 1; CRM1, yeast, homolog; Exportin-1 for chromosome region maintenance); exportin 1 (CRM1, yeast, [Homo sapiens] >gi|2626840|dbj|BAA23415.1| CRM1 protein [Homo
  misc_feature (1)..(902): Homolog of NCBI NO: 11493965 NR Description: crm1 protein [Schizosaccharomyces pombe]
  misc_feature (1)..(902): Homolog of NCBI NO: 19856107 NR Description: Exportin 1 (Chromosome region maintenance protein
  misc_feature (1)..(902): Homolog of NCBI NO: 11281651 NR Description: CRM1/exportin 1 - fission yeast
  misc_feature (1)..(886): Homolog of NCBI NO: 30794645 NR Description: exportin 1 [Trypanosoma brucei brucei]
  misc_feature (1)..(886): Homolog of NCBI NO: 30790417 NR Description: CRM1 [Trypanosoma brucei]
  misc_feature (1)..(824): Homolog of NCBI NO: 30790419 NR Description: CRM1 [Trypanosoma cruzi]
  misc_feature (240)..(878): Homolog of NCBI NO: 30790419 NR Description: CRM1 [Trypanosoma cruzi]
MAILKLLSEEVFDFSKGEMTQQKIKELKQSLNSEFQLIHELCLYVLSASQRQELIRATLSALHAYLSWIPLGYIFESPLLEILLKFFPVPAYRNLTLQCLSEVASLNFGDFYDMQYVKMYSIFMNQLQAILPLNLNIPEAYSTGSSEEQASAFIQNLALFFTSFFKLHIKILESAPENISLLLAGLGYLISISYVDDTEVFKNGPMLSVDALETDSFCLLTSEQMAFLPSTVDGVKSEVTERQKLYSDPMSKLRGLMISRTAKPEEVLIVEDENGNIVRETMKDNDVLVQYKIMRETLIYLSHLDHEDTEKQMLSKLSKQLSGEEWAWNNLNTLCWAIGSISGSMVVEQENRFLVMVIRDLLSLCEVVKGKDNKAVIASNIMYVVGQYSRFLRAHWKFLKTVVHKLFEFMHETHPGVQDMACDTFLKIVQKCKRKFVIVQVGESEPFVSELLSGLATIVGDLQPHQIHTFYESVGSMIQAESDPQKRGEYLQRLMALPNQKWAEIIGQARQSADILKEPDVIRTVLNILQTNTRVATSLGTFFLSQISLIFLDMLNVYRMYSELVSSSIANGGPYASRTSLVKLLRSVKREILKLIETFLDKAENQPHIGKQFVPPMMDQVLGDYARNVPDARESEVLSLFATIINKYKVVMRDEVPLIFEAVFQCTLEMITKNFEDYPEHRLKFFSLLRAIATFCFRALIQLSSEQLKLVMDSVIWAFRHTERNIAETGLNLLLEMLKNFQKSDFCNKFYQTYFLQIEQEVFAVLTDTFHKPGFKLHVLVLQHLFSLVESGSLAEPLWDAATVPHPYSNNVAFVLEYTTKLLSSSFPNMTTTEVTQFVNGLYESRNDVGRFKDNIRDFLIQSKEFSAQDNKDLYAEEAAAQMERERQRMLSIPGLIAPSEIQDDMADS

SEQ ID NO: 80042 - DNA, 797 bp, Arabidopsis thaliana
  misc_feature (1)..(797): Ceres Seq. ID no. 12654153
  misc_feature: MA Experiment ID: 20000171 Result: Down-regulated in Transcription
  misc_feature: MA Experiment 20000171 PARAMETER Experiment Name: At_42deg_Heat_P Parameter: Age (day) Value: 14
  misc_feature: MA Experiment 20000171 PARAMETER Experiment Name: At_42deg_Heat_P Parameter: Organism Value: A. thaliana
  misc_feature: MA Experiment 20000171 PARAMETER Experiment Name: At_42deg_Heat_P Parameter: Plant Line Value: WS
  misc_feature: MA Experiment 20000171 PARAMETER Experiment Name: At_42deg_Heat_P Parameter: Temperature (deg C) Value: 42 vs. 22
  misc_feature: MA Experiment 20000171 PARAMETER Experiment Name: At_42deg_Heat_P Parameter: Timepoint (hr) Value: 1
  misc_feature: MA Experiment 20000171 PARAMETER Experiment Name: At_42deg_Heat_P Parameter: Tissue Value: Aerial
  misc_feature: MA Experiment ID: 20000173 Result: Down-regulated in Transcription
  misc_feature: MA Experiment 20000173 PARAMETER Experiment Name: At_42deg_Heat_P Parameter: Age (day) Value: 14
  misc_feature: MA Experiment 20000173 PARAMETER Experiment Name: At_42deg_Heat_P Parameter: Organism Value: A. thaliana
  misc_feature: MA Experiment 20000173 PARAMETER Experiment Name: At_42deg_Heat_P Parameter: Plant Line Value: WS
  misc_feature: MA Experiment 20000173 PARAMETER Experiment Name: At_42deg_Heat_P Parameter: Temperature (deg C) Value: 42 vs. 22
  misc_feature: MA Experiment 20000173 PARAMETER Experiment Name: At_42deg_Heat_P Parameter: Timepoint (hr) Value: 6
  misc_feature: MA Experiment 20000173 PARAMETER Experiment Name: At_42deg_Heat_P Parameter: Tissue Value: Aerial
  misc_feature: MA Experiment ID: 20000182 Result: Down-regulated in Transcription
  misc_feature: MA Experiment 20000182 PARAMETER Experiment Name: At_2mM_SA_P Parameter: Age (day) Value: 14
  misc_feature: MA Experiment 20000182 PARAMETER Experiment Name: At_2mM_SA_P Parameter: Organism Value: A. thaliana
  misc_feature: MA Experiment 20000182 PARAMETER Experiment Name: At_2mM_SA_P Parameter: Plant Line Value: WS
  misc_feature: MA Experiment 20000182 PARAMETER Experiment Name: At_2mM_SA_P Parameter: Timepoint (hr) Value: 6
  misc_feature: MA Experiment 20000182 PARAMETER Experiment Name: At_2mM_SA_P Parameter: Tissue Value: Aerial
  misc_feature: MA Experiment 20000182 PARAMETER Experiment Name: At_2mM_SA_P Parameter: Treatment Value: 2mM SA vs. No Treatment
  misc_feature: MA Experiment ID: 20000184 Result: Down-regulated in Transcription
  misc_feature: MA Experiment 20000184 PARAMETER Experiment Name: At_Shoots__P Parameter: Age (day) Value: 7
  misc_feature: MA Experiment 20000184 PARAMETER Experiment Name: At_Shoots__P Parameter: Tissue Value: Shoots vs. Whole Plant
  misc_feature: MA Experiment ID: 20000185 Result: Down-regulated in Transcription
  misc_feature: MA Experiment 20000185 PARAMETER Experiment Name: At_Roots__P Parameter: Age (day) Value: 7 vs. 21
  misc_feature: MA Experiment 20000185 PARAMETER Experiment Name: At_Roots__P Parameter: Organism Value: A. thaliana
  misc_feature: MA Experiment 20000185 PARAMETER Experiment Name: At_Roots__P Parameter: Tissue Value: Roots vs. Whole Plant
  misc_feature: MA Experiment ID: 20000211 Result: Up-regulated in Transcription
  misc_feature: MA Experiment 20000211 PARAMETER Experiment Name: At_0.001percent_MeJA__P Parameter: Age (day) Value: 14
  misc_feature: MA Experiment 20000211 PARAMETER Experiment Name: At_0.001percent_MeJA__P Parameter: Organism Value: A. thaliana
  misc_feature: MA Experiment 20000211 PARAMETER Experiment Name: At_0.001percent_MeJA__P Parameter: Plant Line Value: WS
  misc_feature: MA Experiment 20000211 PARAMETER Experiment Name: At_0.001percent_MeJA__P Parameter: Timepoint (hr) Value: 1
  misc_feature: MA Experiment 20000211 PARAMETER Experiment Name: At_0.001percent_MeJA__P Parameter: Tissue Value: Aerial
  misc_feature: MA Experiment 20000211 PARAMETER Experiment Name: At_0.001percent_MeJA__P Parameter: Treatment Value: 0.001percent MeJA vs. No Treatment
  misc_feature: MA Experiment ID: 20000234 Result: Down-regulated in Transcription
  misc_feature: MA Experiment 20000234 PARAMETER Experiment Name: At_Siliques_P Parameter: Age (day) Value: 21
  misc_feature: MA Experiment 20000234 PARAMETER Experiment Name: At_Siliques_P Parameter: Organism Value: A. thaliana
  misc_feature: MA Experiment 20000234 PARAMETER Experiment Name: At_Siliques_P Parameter: Plant Line Value: WS
  misc_feature: MA Experiment 20000234 PARAMETER Experiment Name: At_Siliques_P Parameter: Tissue Value: Less Than 5mm Siliques vs. Whole Plant
  misc_feature: MA Experiment ID: 20000235 Result: Down-regulated in Transcription
  misc_feature: MA Experiment 20000235 PARAMETER Experiment Name: At_Siliques_P Parameter: Age (day) Value: 21
  misc_feature: MA Experiment 20000235 PARAMETER Experiment Name: At_Siliques_P Parameter: Organism Value: A. thaliana
  misc_feature: MA Experiment 20000235 PARAMETER Experiment Name: At_Siliques_P Parameter: Plant Line Value: WS
  misc_feature: MA Experiment 20000235 PARAMETER Experiment Name: At_Siliques_P Parameter: Tissue Value: 5-10mm Siliques vs. Whole Plant
  misc_feature: MA Experiment ID: 20000264 Result: Down-regulated in Transcription
  misc_feature: MA Experiment 20000264 PARAMETER Experiment Name: At_Open_Flower_P Parameter: Age (day) Value: 21
  misc_feature: MA Experiment 20000264 PARAMETER Experiment Name: At_Open_Flower_P Parameter: Plant Line Value: WS
  misc_feature: MA Experiment 20000264 PARAMETER Experiment Name: At_Open_Flower_P Parameter: Tissue Value: Open Flower vs. Whole Plant
  misc_feature: MA Experiment ID: 20000265 Result: Down-regulated in Transcription
  misc_feature: MA Experiment 20000265 PARAMETER Experiment Name: At_Open_Flower_P Parameter: Age (day) Value: 21
  misc_feature: MA Experiment 20000265 PARAMETER Experiment Name: At_Open_Flower_P Parameter: Plant Line Value: WS
  misc_feature: MA Experiment 20000265 PARAMETER Experiment Name: At_Open_Flower_P Parameter: Tissue Value: Closed Flower vs. Whole Plant
  misc_feature: MA Experiment ID: 20000286 Result: Down-regulated in Transcription
  misc_feature: MA Experiment 20000286 PARAMETER Experiment Name: At_Open_Flower_P Parameter: Age (day) Value: 21
  misc_feature: MA Experiment 20000286 PARAMETER Experiment Name: At_Open_Flower_P Parameter: Plant Line Value: WS
  misc_feature: MA Experiment 20000286 PARAMETER Experiment Name: At_Open_Flower_P Parameter: Tissue Value: Half Open vs. Whole Plant
  misc_feature: MA Experiment ID: 20000436 Result: Down-regulated in Transcription
  misc_feature: MA Experiment 20000436 PARAMETER Experiment Name: At_Drought_P Parameter: Age (day) Value: 7
  misc_feature: MA Experiment 20000436 PARAMETER Experiment Name: At_Drought_P Parameter: Organism Value: A. thaliana
  misc_feature: MA Experiment 20000436 PARAMETER Experiment Name: At_Drought_P Parameter: Plant Line Value: WS
  misc_feature: MA Experiment 20000436 PARAMETER Experiment Name: At_Drought_P Parameter: Timepoint (hr) Value: 12
  misc_feature: MA Experiment 20000436 PARAMETER Experiment Name: At_Drought_P Parameter: Tissue Value: Whole Plant
  misc_feature: MA Experiment 20000436 PARAMETER Experiment Name: At_Drought_P Parameter: Treatment Value: Drought vs. No Drought
  misc_feature: MA Experiment ID: 20000437 Result: Down-regulated in Transcription
  misc_feature: MA Experiment 20000437 PARAMETER Experiment Name: At_Drought_P Parameter: Age (day) Value: 8
  misc_feature: MA Experiment 20000437 PARAMETER Experiment Name: At_Drought_P Parameter: Organism Value: A. thaliana
  misc_feature: MA Experiment 20000437 PARAMETER Experiment Name: At_Drought_P Parameter: Plant Line Value: WS
  misc_feature: MA Experiment 20000437 PARAMETER Experiment Name: At_Drought_P Parameter: Timepoint (hr) Value: 24
  misc_feature: MA Experiment 20000437 PARAMETER Experiment Name: At_Drought_P Parameter: Tissue Value: Whole Plant
  misc_feature: MA Experiment 20000437 PARAMETER Experiment Name: At_Drought_P Parameter: Treatment Value: Drought vs. No Drought
  misc_feature: MA Experiment ID: 20000439 Result: Down-regulated in Transcription
  misc_feature: MA Experiment 20000439 PARAMETER Experiment Name: At_Roots__P Parameter: Age (day) Value: 14 vs. 21
  misc_feature: MA Experiment 20000439 PARAMETER Experiment Name: At_Roots__P Parameter: Organism Value: A. thaliana
  misc_feature: MA Experiment 20000439 PARAMETER Experiment Name: At_Roots__P Parameter: Tissue Value: Roots vs. Whole Plant
  misc_feature: MA Experiment ID: 20000445 Result: Down-regulated in Transcription
  misc_feature: MA Experiment 20000445 PARAMETER Experiment Name: At_100uM_NAA__P Parameter: Age (day) Value: 14
  misc_feature: MA Experiment 20000445 PARAMETER Experiment Name: At_100uM_NAA__P Parameter: Organism Value: A. thaliana
  misc_feature: MA Experiment 20000445 PARAMETER Experiment Name: At_100uM_NAA__P Parameter: Plant Line Value: WS
  misc_feature: MA Experiment 20000445 PARAMETER Experiment Name: At_100uM_NAA__P Parameter: Timepoint (hr) Value: 6
  misc_feature: MA Experiment 20000445 PARAMETER Experiment Name: At_100uM_NAA__P Parameter: Tissue Value: Aerial
  misc_feature: MA Experiment 20000445 PARAMETER Experiment Name: At_100uM_NAA__P Parameter: Treatment Value: 100uM NAA vs. No Treatment
  misc_feature: MA Experiment ID: 20000495 Result: Up-regulated in Transcription
  misc_feature: MA Experiment 20000495 PARAMETER Experiment Name: At_Guard_Cells_P Parameter: Harvest Date Value: 8/2/2002
  misc_feature: MA Experiment 20000495 PARAMETER Experiment Name: At_Guard_Cells_P Parameter: Organism Value: A. thaliana
  misc_feature: MA Experiment 20000495 PARAMETER Experiment Name: At_Guard_Cells_P Parameter: Tissue Value: Guard Cells vs. Leaves
  misc_feature: MA Experiment ID: 20000527 Result: Up-regulated in Transcription
  misc_feature: MA Experiment 20000527 PARAMETER Experiment Name: At_10percent_PEG_P Parameter: Age (day) Value: 20
  misc_feature: MA Experiment 20000527 PARAMETER Experiment Name: At_10percent_PEG_P Parameter: Organism Value: A. thaliana
  misc_feature: MA Experiment 20000527 PARAMETER Experiment Name: At_10percent_PEG_P Parameter: Plant Line Value: WS
  misc_feature: MA Experiment 20000527 PARAMETER Experiment Name: At_10percent_PEG_P Parameter: Timepoint (day) Value: 20
  misc_feature: MA Experiment 20000527 PARAMETER Experiment Name: At_10percent_PEG_P Parameter: Tissue Value: Whole Plant
  misc_feature: MA Experiment 20000527 PARAMETER Experiment Name: At_10percent_PEG_P Parameter: Treatment Value: 10percent PEG vs. No Treatment
  misc_feature: MA Experiment ID: 20000573 Result: Down-regulated in Transcription
  misc_feature: MA Experiment 20000573 PARAMETER Experiment Name: At_100uM_ABA_Mutants__P Parameter: Organism Value: A. thaliana
  misc_feature: MA Experiment 20000573 PARAMETER Experiment Name: At_100uM_ABA_Mutants__P Parameter: Plant Line Value: CS22 vs. Ler wt
  misc_feature: MA Experiment 20000573 PARAMETER Experiment Name: At_100uM_ABA_Mutants__P Parameter: Timepoint (hr) Value: N/A
  misc_feature: MA Experiment 20000573 PARAMETER Experiment Name: At_100uM_ABA_Mutants__P Parameter: Tissue Value: Whole Plant
  misc_feature: MA Experiment 20000573 PARAMETER Experiment Name: At_100uM_ABA_Mutants__P Parameter: Treatment Value: None
  misc_feature: MA Experiment ID: 20000574 Result: Down-regulated in Transcription
  misc_feature: MA Experiment 20000574 PARAMETER Experiment Name: At_100uM_ABA_Mutants__P Parameter: Organism Value: A. thaliana
  misc_feature: MA Experiment 20000574 PARAMETER Experiment Name: At_100uM_ABA_Mutants__P Parameter: Plant Line Value: CS23 vs. Ler wt
  misc_feature: MA Experiment 20000574 PARAMETER Experiment Name: At_100uM_ABA_Mutants__P Parameter: Timepoint (hr) Value: N/A
  misc_feature: MA Experiment 20000574 PARAMETER Experiment Name: At_100uM_ABA_Mutants__P Parameter: Tissue Value: Whole Plant
  misc_feature: MA Experiment 20000574 PARAMETER Experiment Name: At_100uM_ABA_Mutants__P Parameter: Treatment Value: None
  misc_feature: MA Experiment ID: 20000575 Result: Up-regulated in Transcription
  misc_feature: MA Experiment 20000575 PARAMETER Experiment Name: At_100uM_ABA_Mutants__P Parameter: Organism Value: A. thaliana
  misc_feature: MA Experiment 20000575 PARAMETER Experiment Name: At_100uM_ABA_Mutants__P Parameter: Plant Line Value: CS22
  misc_feature: MA Experiment 20000575 PARAMETER Experiment Name: At_100uM_ABA_Mutants__P Parameter: Timepoint (hr) Value: 6
  misc_feature: MA Experiment 20000575 PARAMETER Experiment Name: At_100uM_ABA_Mutants__P Parameter: Tissue Value: Whole Plant
  misc_feature: MA Experiment 20000575 PARAMETER Experiment Name: At_100uM_ABA_Mutants__P Parameter: Treatment Value: 1uM ABA vs. No Treatment
  misc_feature: MA Experiment ID: 20000794 Result: Down-regulated in Transcription
  misc_feature: MA Experiment 20000794 PARAMETER Experiment Name: At_Petals_P Parameter: Age (day) Value: 23-25 days
  misc_feature: MA Experiment 20000794 PARAMETER Experiment Name: At_Petals_P Parameter: Plant Line Value: WS
  misc_feature: MA Experiment 20000794 PARAMETER Experiment Name: At_Petals_P Parameter: Tissue Value: Petals vs. Whole plant
  misc_feature: MA Experiment ID: 20001247 Result: Down-regulated in Transcription
  misc_feature: MA Experiment 20001247 PARAMETER Experiment Name: At_Far-red-induction_P Parameter: Age (day) Value: 7
  misc_feature: MA Experiment 20001247 PARAMETER Experiment Name: At_Far-red-induction_P Parameter: Light Value: Far-red vs. White
  misc_feature: MA Experiment 20001247 PARAMETER Experiment Name: At_Far-red-induction_P Parameter: Organism Value: A. thaliana
  misc_feature: MA Experiment 20001247 PARAMETER Experiment Name: At_Far-red-induction_P Parameter: Plant Line Value: Columbia
  misc_feature: MA Experiment 20001247 PARAMETER Experiment Name: At_Far-red-induction_P Parameter: Timepoint (hr) Value: 1
  misc_feature: MA Experiment 20001247 PARAMETER Experiment Name: At_Far-red-induction_P Parameter: Tissue Value: Whole Plant
  misc_feature: MA Experiment ID: 20001248 Result: Down-regulated in Transcription
  misc_feature: MA Experiment 20001248 PARAMETER Experiment Name: At_Far-red-induction_P Parameter: Age (day) Value: 7
  misc_feature: MA Experiment 20001248 PARAMETER Experiment Name: At_Far-red-induction_P Parameter: Light Value: Far-red vs. White
  misc_feature: MA Experiment 20001248 PARAMETER Experiment Name: At_Far-red-induction_P Parameter: Organism Value: A. thaliana
  misc_feature: MA Experiment 20001248 PARAMETER Experiment Name: At_Far-red-induction_P Parameter: Plant Line Value: Columbia
  misc_feature: MA Experiment 20001248 PARAMETER Experiment Name: At_Far-red-induction_P Parameter: Timepoint (hr) Value: 4
  misc_feature: MA Experiment 20001248 PARAMETER Experiment Name: At_Far-red-induction_P Parameter: Tissue Value: Whole Plant
  misc_feature: MA Experiment ID: 20001450 Result: Down-regulated in Transcription
  misc_feature: MA Experiment 20001450 PARAMETER Experiment Name: At_Far-red-induction_P Parameter: Age (day) Value: 7
  misc_feature: MA Experiment 20001450 PARAMETER Experiment Name: At_Far-red-induction_P Parameter: Light Value: Far-red vs. White
  misc_feature: MA Experiment 20001450 PARAMETER Experiment Name: At_Far-red-induction_P Parameter: Organism Value: A. thaliana
  misc_feature: MA Experiment 20001450 PARAMETER Experiment Name: At_Far-red-induction_P Parameter: Plant Line Value: Columbia
  misc_feature: MA Experiment 20001450 PARAMETER Experiment Name: At_Far-red-induction_P Parameter: Timepoint (hr) Value: 8
  misc_feature: MA Experiment 20001450 PARAMETER Experiment Name: At_Far-red-induction_P Parameter: Tissue Value: Whole Plant
  misc_feature: MA Experiment ID: 20001451 Result: Down-regulated in Transcription
  misc_feature: MA Experiment 20001451 PARAMETER Experiment Name: At_Far-red-induction_P Parameter: Age (day) Value: 7
  misc_feature: MA Experiment 20001451 PARAMETER Experiment Name: At_Far-red-induction_P Parameter: Light Value: Far-red vs. White
  misc_feature: MA Experiment 20001451 PARAMETER Experiment Name: At_Far-red-induction_P Parameter: Organism Value: A. thaliana
  misc_feature: MA Experiment 20001451 PARAMETER Experiment Name: At_Far-red-induction_P Parameter: Plant Line Value: Columbia
  misc_feature: MA Experiment 20001451 PARAMETER Experiment Name: At_Far-red-induction_P Parameter: Timepoint (hr) Value: 24
  misc_feature: MA Experiment 20001451 PARAMETER Experiment Name: At_Far-red-induction_P Parameter: Tissue Value: Whole Plant
  misc_feature: MA Experiment ID: 20001457 Result: Down-regulated in Transcription
  misc_feature: MA Experiment 20001457 PARAMETER Experiment Name: At_50mM_NH4NO3_L-to-H_P Parameter: Age (day) Value: Undefined
  misc_feature: MA Experiment 20001457 PARAMETER Experiment Name: At_50mM_NH4NO3_L-to-H_P Parameter: Organism Value: Undefined
  misc_feature: MA Experiment 20001457 PARAMETER Experiment Name: At_50mM_NH4NO3_L-to-H_P Parameter: Plant Line Value: Undefined
  misc_feature: MA Experiment 20001457 PARAMETER Experiment Name: At_50mM_NH4NO3_L-to-H_P Parameter: Timepoint (hr) Value: 0.5
  misc_feature: MA Experiment 20001457 PARAMETER Experiment Name: At_50mM_NH4NO3_L-to-H_P Parameter: Tissue Value: Siliques
  misc_feature: MA Experiment 20001457 PARAMETER Experiment Name: At_50mM_NH4NO3_L-to-H_P Parameter: Treatment Value: 50mM NH4NO3 vs. 100mM Manitol
  misc_feature: MA Experiment ID: 20001555 Result: Up-regulated in Transcription
  misc_feature: MA Experiment 20001555 PARAMETER Experiment Name: At_Drought_Soil_Dry_P Parameter: Age (day) Value: 24
  misc_feature: MA Experiment 20001555 PARAMETER Experiment Name: At_Drought_Soil_Dry_P Parameter: Organism Value: A. thaliana
  misc_feature: MA Experiment 20001555 PARAMETER Experiment Name: At_Drought_Soil_Dry_P Parameter: Plant Line Value: WS
  misc_feature: MA Experiment 20001555 PARAMETER Experiment Name: At_Drought_Soil_Dry_P Parameter: Post Timepoint (hr) Value: None
  misc_feature: MA Experiment 20001555 PARAMETER Experiment Name: At_Drought_Soil_Dry_P Parameter: Post-Treatment Value: None
  misc_feature: MA Experiment 20001555 PARAMETER Experiment Name: At_Drought_Soil_Dry_P Parameter: Timepoint (day) Value: 10
  misc_feature: MA Experiment 20001555 PARAMETER Experiment Name: At_Drought_Soil_Dry_P Parameter: Treatment Value: Drought vs. No Drought
  misc_feature: MA Experiment ID: 20001560 Result: Up-regulated in Transcription
  misc_feature: MA Experiment 20001560 PARAMETER Experiment Name: At_Drought_Soil_Dry_P Parameter: Age (day) Value: 28
  misc_feature: MA Experiment 20001560 PARAMETER Experiment Name: At_Drought_Soil_Dry_P Parameter: Organism Value: A. thaliana
  misc_feature: MA Experiment 20001560 PARAMETER Experiment Name: At_Drought_Soil_Dry_P Parameter: Plant Line Value: WS
  misc_feature: MA Experiment 20001560 PARAMETER Experiment Name: At_Drought_Soil_Dry_P Parameter: Post Timepoint (hr) Value: None
  misc_feature: MA Experiment 20001560 PARAMETER Experiment Name: At_Drought_Soil_Dry_P Parameter: Post-Treatment Value: None
  misc_feature: MA Experiment 20001560 PARAMETER Experiment Name: At_Drought_Soil_Dry_P Parameter: Timepoint (day) Value: 14
  misc_feature: MA Experiment 20001560 PARAMETER Experiment Name: At_Drought_Soil_Dry_P Parameter: Treatment Value: Drought vs. No Drought
  misc_feature: MA Experiment ID: 20001755 Result: Up-regulated in Transcription
  misc_feature: MA Experiment 20001755 PARAMETER Experiment Name: At_50mM_NH4NO3_L-to-H_P Parameter: Timepoint (hr) Value: 2
  misc_feature: MA Experiment 20001755 PARAMETER Experiment Name: At_50mM_NH4NO3_L-to-H_P Parameter: Tissue Value: Leaf
  misc_feature: MA Experiment 20001755 PARAMETER Experiment Name: At_50mM_NH4NO3_L-to-H_P Parameter: Treatment Value: 50mM NH4NO3 vs 100mM Mannitol
  misc_feature: MA Experiment ID: 20001757 Result: Up-regulated in Transcription
  misc_feature: MA Experiment 20001757 PARAMETER Experiment Name: At_50mM_NH4NO3_L-to-H_P Parameter: Timepoint (hr) Value: 6
  misc_feature: MA Experiment 20001757 PARAMETER Experiment Name: At_50mM_NH4NO3_L-to-H_P Parameter: Tissue Value: Leaf
  misc_feature: MA Experiment 20001757 PARAMETER Experiment Name: At_50mM_NH4NO3_L-to-H_P Parameter: Treatment Value: 50mM NH4NO3 vs 100mM Mannitol
  misc_feature: MA Experiment ID: 20001905 Result: Down-regulated in Transcription
  misc_feature: MA Experiment 20001905 PARAMETER Experiment Name: At_Drought_Reproduction_P Parameter: Age (day) Value: 40
  misc_feature: MA Experiment 20001905 PARAMETER Experiment Name: At_Drought_Reproduction_P Parameter: Organism Value: A. thaliana
  misc_feature: MA Experiment 20001905 PARAMETER Experiment Name: At_Drought_Reproduction_P Parameter: Plant Line Value: WS
  misc_feature: MA Experiment 20001905 PARAMETER Experiment Name: At_Drought_Reproduction_P Parameter: Timepoint (day) Value: 10
  misc_feature: MA Experiment 20001905 PARAMETER Experiment Name: At_Drought_Reproduction_P Parameter: Tissue Value: Rosettes
  misc_feature: MA Experiment 20001905 PARAMETER Experiment Name: At_Drought_Reproduction_P Parameter: Treatment Value: Drought vs. No Drought
  misc_feature: MA Experiment ID: 20001909 Result: Down-regulated in Transcription
  misc_feature: MA Experiment 20001909 PARAMETER Experiment Name: At_Drought_Reproduction_P Parameter: Age (day) Value: 35
  misc_feature: MA Experiment 20001909 PARAMETER Experiment Name: At_Drought_Reproduction_P Parameter: Organism Value: A. thaliana
  misc_feature: MA Experiment 20001909 PARAMETER Experiment Name: At_Drought_Reproduction_P Parameter: Plant Line Value: WS
  misc_feature: MA Experiment 20001909 PARAMETER Experiment Name: At_Drought_Reproduction_P Parameter: Timepoint (day) Value: 5
  misc_feature: MA Experiment 20001909 PARAMETER Experiment Name: At_Drought_Reproduction_P Parameter: Tissue Value: Flowers
  misc_feature: MA Experiment 20001909 PARAMETER Experiment Name: At_Drought_Reproduction_P Parameter: Treatment Value: Drought vs. No Drought
  misc_feature: MA Experiment ID: 20001910 Result: Down-regulated in Transcription
  misc_feature: MA Experiment 20001910 PARAMETER Experiment Name: At_Drought_Reproduction_P Parameter: Age (day) Value: 37
  misc_feature: MA Experiment 20001910 PARAMETER Experiment Name: At_Drought_Reproduction_P Parameter: Organism Value: A. thaliana
  misc_feature: MA Experiment 20001910 PARAMETER Experiment Name: At_Drought_Reproduction_P Parameter: Plant Line Value: WS
  misc_feature: MA Experiment 20001910 PARAMETER Experiment Name: At_Drought_Reproduction_P Parameter: Timepoint (day) Value: 7
  misc_feature: MA Experiment 20001910 PARAMETER Experiment Name: At_Drought_Reproduction_P Parameter: Tissue Value: Flowers
  misc_feature: MA Experiment 20001910 PARAMETER Experiment Name: At_Drought_Reproduction_P Parameter: Treatment Value: Drought vs. No Drought
acaatttcatatcaatagttacgtataaacatataatcagaaaatggtggtcaaagtatatgggcagataaaagcagctaatccacaaagagtattgctctgctttttggaaaaagacatcgagtttgaagtaattcatgtcgatctcgataaacttgaacagaaaaaaccacaacatcttcttcgtcagccgtttggtcaagttccagctattgaagatggatatctgaagctttttgaatcgcgagccatagcgaggtactacgcgacaaagtatgcggaccaaggaacggacctattgggcaagactttggagggacgagccattgtggaccagtgggtggaagttgagaataactatttctacgctgtggctctacccttagttatgaacgtcgtctttaagcccaagtctggtaagccatgcgacgtcgctttggttgaggagctaaaggtcaagttcgacaaggtcctggatgtgtatgagaaccggttagctacgaaccggtacttgggcggtgatgaattcacattagctgatttgagtcatatgcccggtatgagatatatcatgaatgaaaccagtttgagtggtttggttacgtctcgagagaatctcaaccggtggtggaatgagatttcggctagaccggcttggaagaagctcatggaattggctgcctattaatttgtctagtagttcttgtagtcctccgttaatggcttgagtcaagccgcttgacgcttgtactccattcaaatatttgatgatatactaatttaaatttggatcgtct

SEQ ID NO: 80043 - protein, 214 aa, Arabidopsis thaliana
  peptide (1)..(214): Ceres Seq. ID no. 12654154
  misc_feature (1)..(214): Homolog of NCBI NO: 15228488 NR Description: glutathione transferase, putative; protein id: supported by cDNA: gi_1575751, supported by cDNA: gi_20466619
  misc_feature (1)..(214): Homolog of NCBI NO: 15237931 NR Description: glutathione transferase, putative; protein id:
  misc_feature (1)..(211): Homolog of NCBI NO: 1524316 NR Description: glutathione S-transferase [Petunia x hybrida]
MVVKVYGQIKAANPQRVLLCFLEKDIEFEVIHVDLDKLEQKKPQHLLRQPFGQVPAIEDGYLKLFESRAIARYYATKYADQGTDLLGKTLEGRAIVDQWVEVENNYFYAVALPLVMNVVFKPKSGKPCDVALVEELKVKFDKVLDVYENRLATNRYLGGDEFTLADLSHMPGMRYIMNETSLSGLVTSRENLNRWWNEISARPAWKKLMELAAY

SEQ ID NO: 80044 - DNA, 1059 bp, Arabidopsis thaliana
  misc_feature (1)..(1059): Ceres Seq. ID no. 12654174
  misc_feature: MA Experiment ID: 108461 Result: Down-regulated in Transcription
  misc_feature: MA Experiment 108461 PARAMETER Experiment Name: At_Germinating_Seeds_cDNA_P Parameter: Age (day) Value: 1 vs. 0
  misc_feature: MA Experiment 108461 PARAMETER Experiment Name: At_Germinating_Seeds_cDNA_P Parameter: Tissue Value: Germinating Seeds
  misc_feature: MA Experiment ID: 108462 Result: Down-regulated in Transcription
  misc_feature: MA Experiment 108462 PARAMETER Experiment Name: At_Germinating_Seeds_cDNA_P Parameter: Age (day) Value: 2 vs. 0
  misc_feature: MA Experiment 108462 PARAMETER Experiment Name: At_Germinating_Seeds_cDNA_P Parameter: Tissue Value: Germinating Seeds
  misc_feature: MA Experiment ID: 108463 Result: Down-regulated in Transcription
  misc_feature: MA Experiment 108463 PARAMETER Experiment Name: At_Germinating_Seeds_cDNA_P Parameter: Age (day) Value: 3 vs. 0
  misc_feature: MA Experiment 108463 PARAMETER Experiment Name: At_Germinating_Seeds_cDNA_P Parameter: Tissue Value: Germinating Seeds
  misc_feature: MA Experiment ID: 108464 Result: Down-regulated in Transcription
  misc_feature: MA Experiment 108464 PARAMETER Experiment Name: At_Germinating_Seeds_cDNA_P Parameter: Age (day) Value: 4 vs. 0
  misc_feature: MA Experiment 108464 PARAMETER Experiment Name: At_Germinating_Seeds_cDNA_P Parameter: Tissue Value: Germinating Seeds
  misc_feature: MA Experiment ID: 20000224 Result: Up-regulated in Transcription
atggatatgggaccatgcccaaaggtgcactctttgcagcttcggaaagaataccgagaagcaagggcaaaaggtgttgataactacgacagggaattggaagatgccatagacaggcttatcgttgagtgtgataggaagattggtagggcccttaagcgtcttcaagaagaggacgccaaagctgccattgccatttctgtctctgaagtcactcagtcgcctgaaattctcgagttatcggagaaaatcaaagagaagatgaaggaagcagatatccacgatcttgaaggcaaaatggatcttaagattagagctcttgagttagtcgaagagatgaggaccaagagagctgaccaacaggcggtgttgctgttggaagccttcaacaaagatagagcatccttgccacagcccgttccagctcaaccaccatcttccgaattacctccaccggatcctcgcactcaagaaatgataaatgagaaactgaagaaggcagaagatcttggtgaacaaggaatggttgatgaagcccagaaagccctggaagaggctgaagctcttaagaagcttacagttagacgagaacctccagcagattcaacgaagtacaccgctgttgatgtgcgcatcacagaccaaaagttgcgtctatgtgacatatgtggagcattcttgagcgtctatgacagtgatcgccgtttagctgatcattttggggggaagcttcatctaggatacatgctagtccgggacaaattaacagagcttctggatgagaaggccaatatacgcaaggaaagatcaaaggaacggaacagtaaggagagagaatcaagtaaagaccgagagaaagaacaagaaactagtcgtgaacatcgaagagattatgatcgcaggagtagagatcgagataggcaccatgaccgtgatcgtgaacaagacagagactatgatcggtcacactcaagaagcagacgtaggtcacgctcacggtccaggtcaagagatagaccaagggactatgatcgccacaggcgtcacaaccgctactag

SEQ ID NO: 80045 - protein, 352 aa, Arabidopsis thaliana; identical to SEQ ID NO: 25845
  peptide (1)..(352): Ceres Seq. ID no. 12654175
  misc_feature (1)..(286): Pfam Name: LUC7 N_terminus Pfam Description: LUC7 N_terminus
  misc_feature (1)..(352): Homolog of NCBI NO: 21595481 NR Description: unknown [Arabidopsis thaliana]
  misc_feature (1)..(352): Homolog of NCBI NO: 30678827 NR Description: expressed protein [Arabidopsis thaliana]
  misc_feature (48)..(352): Homolog of NCBI NO: 6017114 NR Description: unknown protein [Arabidopsis thaliana]
  misc_feature (1)..(352): Homolog of NCBI NO: 18418301 NR Description: putative protein; protein id: At5g17440.1, by cDNA: gi_15450598, supported by cDNA: gi_17380623 [Arabidopsis >gi|15450599|gb|AAK96571.1| AT5g17440/K3M16_10 [Arabidopsis
  misc_feature (17)..(352): Homolog of NCBI NO: 11357938 NR Description: hypothetical protein K3M16_10 - Arabidopsis >gi|9755768|emb|CAC01888.1| putative protein [Arabidopsis
  misc_feature (1)..(352): Homolog of NCBI NO: 29367401 NR Description: sarcoplasmic reticulum protein-like protein
  misc_feature (93)..(352): Homolog of NCBI NO: 38614131 NR Description: Unknown (protein for MGC:73932) [Mus musculus]
  misc_feature (93)..(351): Homolog of NCBI NO: 33604140 NR Description: LUC7-like 2 [Mus musculus]
  misc_feature (93)..(351): Homolog of NCBI NO: 34855164 NR Description: similar to CGI-74-like SR-rich protein [Rattus
  misc_feature (158)..(342): Homolog of NCBI NO: 27696258 NR Description: Similar to CGI-74 protein [Xenopus laevis]

SEQ ID NO: 80046 - protein, 350 aa, Arabidopsis thaliana; identical to SEQ ID NO: 72287
  peptide (1)..(350): Ceres Seq. ID no. 12654176
  misc_feature (1)..(284): Pfam Name: LUC7 N_terminus Pfam Description: LUC7 N_terminus
  misc_feature (1)..(350): Homolog of NCBI NO: 21595481 NR Description: unknown [Arabidopsis thaliana]
  misc_feature (1)..(350): Homolog of NCBI NO: 30678827 NR Description: expressed protein [Arabidopsis thaliana]
  misc_feature (46)..(350): Homolog of NCBI NO: 6017114 NR Description: unknown protein [Arabidopsis thaliana]
  misc_feature (1)..(350): Homolog of NCBI NO: 18418301 NR Description: putative protein; protein id: At5g17440.1, by cDNA: gi_15450598, supported by cDNA: gi_17380623 [Arabidopsis >gi|15450599|gb|AAK96571.1| AT5g17440/K3M16_10 [Arabidopsis
  misc_feature (15)..(350): Homolog of NCBI NO: 11357938 NR Description: hypothetical protein K3M16_10 - Arabidopsis >gi|9755768|emb|CAC01888.1| putative protein [Arabidopsis
  misc_feature (1)..(350): Homolog of NCBI NO: 29367401 NR Description: sarcoplasmic reticulum protein-like protein
  misc_feature (91)..(350): Homolog of NCBI NO: 38614131 NR Description: Unknown (protein for MGC:73932) [Mus musculus]
  misc_feature (91)..(349): Homolog of NCBI NO: 33604140 NR Description: LUC7-like 2 [Mus musculus]
  misc_feature (91)..(349): Homolog of NCBI NO: 34855164 NR Description: similar to CGI-74-like SR-rich protein [Rattus
  misc_feature (156)..(340): Homolog of NCBI NO: 27696258 NR Description: Similar to CGI-74 protein [Xenopus laevis]

SEQ ID NO: 80047 - protein, 265 aa, Arabidopsis thaliana
  peptide (1)..(265): Ceres Seq. ID no. 12654177
  misc_feature (1)..(199): Pfam Name: LUC7 N_terminus Pfam Description: LUC7 N_terminus
  misc_feature (1)..(265): Homolog of NCBI NO: 21595481 NR Description: unknown [Arabidopsis thaliana]
  misc_feature (1)..(265): Homolog of NCBI NO: 30678827 NR Description: expressed protein [Arabidopsis thaliana]
  misc_feature (1)..(265): Homolog of NCBI NO: 6017114 NR Description: unknown protein [Arabidopsis thaliana]
  misc_feature (1)..(265): Homolog of NCBI NO: 18418301 NR Description: putative protein; protein id: At5g17440.1, by cDNA: gi_15450598, supported by cDNA: gi_17380623 [Arabidopsis >gi|15450599|gb|AAK96571.1| AT5g17440/K3M16_10 [Arabidopsis
  misc_feature (1)..(265): Homolog of NCBI NO: 11357938 NR Description: hypothetical protein K3M16_10 - Arabidopsis >gi|9755768|emb|CAC01888.1| putative protein [Arabidopsis
  misc_feature (1)..(265): Homolog of NCBI NO: 29367401 NR Description: sarcoplasmic reticulum protein-like protein
  misc_feature (6)..(265): Homolog of NCBI NO: 38614131 NR Description: Unknown (protein for MGC:73932) [Mus musculus]
  misc_feature (6)..(264): Homolog of NCBI NO: 33604140 NR Description: LUC7-like 2 [Mus musculus]
  misc_feature (6)..(264): Homolog of NCBI NO: 34855164 NR Description: similar to CGI-74-like SR-rich protein [Rattus
  misc_feature (71)..(255): Homolog of NCBI NO: 27696258 NR Description: Similar to CGI-74 protein [Xenopus laevis]
MKEADIHDLEGKMDLKIRALELVEEMRTKRADQQAVLLLEAFNKDRASLPQPVPAQPPSSELPPPDPRTQEMINEKLKKAEDLGEQGMVDEAQKALEEAEALKKLTVRREPPADSTKYTAVDVRITDQKLRLCDICGAFLSVYDSDRRLADHFGGKLHLGYMLVRDKLTELLDEKANIRKERSKERNSKERESSKDREKEQETSREHRRDYDRRSRDRDRHHDRDREQDRDYDRSHSRSRRRSRSRSRSRDRPRDYDRHRRHNRY

SEQ ID NO: 80048 - DNA, 1841 bp, Arabidopsis thaliana
  misc_feature (1)..(1841): Ceres Seq. ID no. 12654194
  misc_feature: MA Experiment ID: 20000527 Result: Down-regulated in Transcription
  misc_feature: MA Experiment 20000527 PARAMETER Experiment Name: At_10percent_PEG_P Parameter: Age (day) Value: 20
  misc_feature: MA Experiment 20000527 PARAMETER Experiment Name: At_10percent_PEG_P Parameter: Organism Value: A. thaliana
  misc_feature: MA Experiment 20000527 PARAMETER Experiment Name: At_10percent_PEG_P Parameter: Plant Line Value: WS
  misc_feature: MA Experiment 20000527 PARAMETER Experiment Name: At_10percent_PEG_P Parameter: Timepoint (day) Value: 20
  misc_feature: MA Experiment 20000527 PARAMETER Experiment Name: At_10percent_PEG_P Parameter: Tissue Value: Whole Plant
  misc_feature: MA Experiment 20000527 PARAMETER Experiment Name: At_10percent_PEG_P Parameter: Treatment Value: 10percent PEG vs. No Treatment
  misc_feature: MA Experiment ID: 20001555 Result: Up-regulated in Transcription
  misc_feature: MA Experiment 20001555 PARAMETER Experiment Name: At_Drought_Soil_Dry_P Parameter: Age (day) Value: 24
  misc_feature: MA Experiment 20001555 PARAMETER Experiment Name: At_Drought_Soil_Dry_P Parameter: Organism Value: A. thaliana
  misc_feature: MA Experiment 20001555 PARAMETER Experiment Name: At_Drought_Soil_Dry_P Parameter: Plant Line Value: WS
  misc_feature: MA Experiment 20001555 PARAMETER Experiment Name: At_Drought_Soil_Dry_P Parameter: Post Timepoint (hr) Value: None
  misc_feature: MA Experiment 20001555 PARAMETER Experiment Name: At_Drought_Soil_Dry_P Parameter: Post-Treatment Value: None
  misc_feature: MA Experiment 20001555 PARAMETER Experiment Name: At_Drought_Soil_Dry_P Parameter: Timepoint (day) Value: 10
  misc_feature: MA Experiment 20001555 PARAMETER Experiment Name: At_Drought_Soil_Dry_P Parameter: Treatment Value: Drought vs. No Drought
  misc_feature: MA Experiment ID: 20001556 Result: Up-regulated in Transcription
  misc_feature: MA Experiment 20001556 PARAMETER Experiment Name: At_Drought_Soil_Dry_P Parameter: Age (day) Value: 26
  misc_feature: MA Experiment 20001556 PARAMETER Experiment Name: At_Drought_Soil_Dry_P Parameter: Organism Value: A. thaliana
  misc_feature: MA Experiment 20001556 PARAMETER Experiment Name: At_Drought_Soil_Dry_P Parameter: Plant Line Value: WS
  misc_feature: MA Experiment 20001556 PARAMETER Experiment Name: At_Drought_Soil_Dry_P Parameter: Post Timepoint (hr) Value: None
  misc_feature: MA Experiment 20001556 PARAMETER Experiment Name: At_Drought_Soil_Dry_P Parameter: Post-Treatment Value: None
  misc_feature: MA Experiment 20001556 PARAMETER Experiment Name: At_Drought_Soil_Dry_P Parameter: Timepoint (day) Value: 12
  misc_feature: MA Experiment 20001556 PARAMETER Experiment Name: At_Drought_Soil_Dry_P Parameter: Treatment Value: Drought vs. No Drought
  misc_feature: MA Experiment ID: 20001761 Result: Down-regulated in Transcription
  misc_feature: MA Experiment 20001761 PARAMETER Experiment Name: At_50mM_NH4NO3_L-to-H_P Parameter: Timepoint (hr) Value: 4
  misc_feature: MA Experiment 20001761 PARAMETER Experiment Name: At_50mM_NH4NO3_L-to-H_P Parameter: Tissue Value: Siliques
  misc_feature: MA Experiment 20001761 PARAMETER Experiment Name: At_50mM_NH4NO3_L-to-H_P Parameter: Treatment Value: 50mM NH4NO3 vs 100mM Mannitol
  misc_feature: MA Experiment ID: 20001904 Result: Up-regulated in Transcription
  misc_feature: MA Experiment 20001904 PARAMETER Experiment Name: At_Drought_Reproduction_P Parameter: Age (day) Value: 37
  misc_feature: MA Experiment 20001904 PARAMETER Experiment Name: At_Drought_Reproduction_P Parameter: Organism Value: A. thaliana
  misc_feature: MA Experiment 20001904 PARAMETER Experiment Name: At_Drought_Reproduction_P Parameter: Plant Line Value: WS
  misc_feature: MA Experiment 20001904 PARAMETER Experiment Name: At_Drought_Reproduction_P Parameter: Timepoint (day) Value: 7
  misc_feature: MA Experiment 20001904 PARAMETER Experiment Name: At_Drought_Reproduction_P Parameter: Tissue Value: Rosettes
  misc_feature: MA Experiment 20001904 PARAMETER Experiment Name: At_Drought_Reproduction_P Parameter: Treatment Value: Drought vs. No Drought
  misc_feature: MA Experiment ID: 20001906 Result: Up-regulated in Transcription
  misc_feature: MA Experiment 20001906 PARAMETER Experiment Name: At_Drought_Reproduction_P Parameter: Age (day) Value: 35
  misc_feature: MA Experiment 20001906 PARAMETER Experiment Name: At_Drought_Reproduction_P Parameter: Organism Value: A. thaliana
  misc_feature: MA Experiment 20001906 PARAMETER Experiment Name: At_Drought_Reproduction_P Parameter: Plant Line Value: WS
  misc_feature: MA Experiment 20001906 PARAMETER Experiment Name: At_Drought_Reproduction_P Parameter: Timepoint (day) Value: 5
  misc_feature: MA Experiment 20001906 PARAMETER Experiment Name: At_Drought_Reproduction_P Parameter: Tissue Value: Siliques
  misc_feature: MA Experiment 20001906 PARAMETER Experiment Name: At_Drought_Reproduction_P Parameter: Treatment Value: Drought vs. No Drought
  misc_feature: MA Experiment ID: 20001908 Result: Up-regulated in Transcription
  misc_feature: MA Experiment 20001908 PARAMETER Experiment Name: At_Drought_Reproduction_P Parameter: Age (day) Value: 40
  misc_feature: MA Experiment 20001908 PARAMETER Experiment Name: At_Drought_Reproduction_P Parameter: Organism Value: A. thaliana
  misc_feature: MA Experiment 20001908 PARAMETER Experiment Name: At_Drought_Reproduction_P Parameter: Plant Line Value: WS
  misc_feature: MA Experiment 20001908 PARAMETER Experiment Name: At_Drought_Reproduction_P Parameter: Timepoint (day) Value: 10
  misc_feature: MA Experiment 20001908 PARAMETER Experiment Name: At_Drought_Reproduction_P Parameter: Tissue Value: Siliques
  misc_feature: MA Experiment 20001908 PARAMETER Experiment Name: At_Drought_Reproduction_P Parameter: Treatment Value: Drought vs. No Drought
acccaaaacgtttaacattcgaaaaagaaaagaaacggaatgatcgagacgaccaaaggcggttcaggatcgtatccgatcaaaaccatcgtcgttttggttcaagaaaatcgttcttttgaccacaccctaggctggtttaaagaactaaaccgggaaatcgacggcgtcacgaaatctgatcccaaatccaacacggtttcgtcatccgacacaaactctcttcgtgtagtcttcggggatcagtctcagtacgttaacccggatccaggtcactccattcaggatatctacgaacaagtgtttggtaagccatgggattcaggtaaaccggatccaaacccgggtcatcctaacatgtccggttttgctcaaaacgccgagagaaacaagaaagggatgtcctccgcggttatgaacggatttaaaccgaatgctttgccggtttacaaggagttggttcaaaatttcgccatatgtgataggtggtttgcgtcggttccagcgtcgacgcagccaaaccgattgtacgtacactcggcaacatcacatggagcaacgagcaacgacaagaaattgctactcgaagggtttccacagaagacgatattcgagtctctcgatgaagctggttttagctttggcatttactaccaattccctccttccactctcttttataggaatttgagaaagctgaaatatttgacacatttccaccaatacggaatacaattcaagaaagattgcaaagaaggaaagctacccaactacgtcgtggtcgaacaacgttggtttgatctattgtcaactccagccaatgacgatcacccttctcacgatgtctccgagggtcaaaagctcgtgaaagaggtctacgaggcattgagatcgagtcctcaatggaatgagattttatttatcataacgtacgacgagcatggtggattttacgaccatgtacctactccagtcgacggagttcctaatccggatggtatcttgggacctccaccatataattttgagtttaaccggctcggtgttagggttccgactttcttcatctctccttggattgagcctggcacagttattcatgggccaaatgggccgtacccaaggtcacaatatgagcattcgtcaattcccgcaacggtcaagacaattttcaaactcaaagatttcttgtcaaagagagattcatgggctggcacttttgaatctgttattacgagagactcaccaagacaagattgccctgaaacattatcaactccgattaaactaagagggacaatggcaaaagaaaatgcacaattaagcgaatttcaagaagatctcgttataatggctgcgggattaaaaggagactacaaaaacgaagaattaatccacaagctatgtaaagaaacttgcgttgcagatgcatccaaatacgttacaaatgcgtttgagaagtttctggaagagtcaagaaaggcaagagatagaggatgtgatgagaacgacatcgtttattgcgttgatgatgatgatgatcatgttgtgataccaccacaatcacattcagaagcatcaaatgctgctgctcaaccaaaaacgcaaacgtcttttttcaataagttattctcttgctttattcgccatgattgaaagagactaagagaataaatgttataataataatttgtagtcacttctcttgtgtgtgggtggaatttatttaagacaaaaaaaaagaaaaccttactagtctcttgcatatttaatttcgttgtataagaacttccacaattatttgcacatttgatattcttgtataaaaattatatgttaga

SEQ ID NO: 80049 - protein, 538 aa, Arabidopsis thaliana
  peptide (1)..(538): Ceres Seq. ID no. 12654195
  misc_feature (14)..(397): Pfam Name: Phosphoesterase family Pfam Description: Phosphoesterase family
  misc_feature (1)..(538): Homolog of NCBI NO: 18396577 NR Description: expressed protein; protein id: At3g03530.1, by cDNA: gi_14335155 [Arabidopsis thaliana] hypothetical protein [Arabidopsis thaliana]
  misc_feature (1)..(516): Homolog of NCBI NO: 18396579 NR Description: putative phospholipase; protein id: At3g03540.1 thaliana] >gi|6017098|gb|AAF01581.1|AC009895_2 unknown protein thaliana] >gi|6091767|gb|AAF03477.1|AC009327_16 putative
  misc_feature (1)..(535): Homolog of NCBI NO: 15228577 NR Description: unknown protein; protein id: At3g03520.1, by cDNA: gi_17529015 [Arabidopsis thaliana] unknown protein [Arabidopsis thaliana]
  misc_feature (1)..(535): Homolog of NCBI NO: 17529016 NR Description: unknown protein [Arabidopsis thaliana]
  misc_feature (14)..(534): Homolog of NCBI NO: 27573343 NR Description: putative phosphoesterase [Oryza sativa (japonica group)] >gi|29126358|gb|AAO66550.1| putative phosphoesterase
  misc_feature (13)..(493): Homolog of NCBI NO: 21703147 NR Description: At1g07230/F10K1_4 [Arabidopsis thaliana] phosphatidylglycerol specific phospholipase C [Arabidopsis
  misc_feature (13)..(493): Homolog of NCBI NO: 15222342 NR Description: unknown protein; protein id: At1g07230.1
  misc_feature (13)..(494): Homolog of NCBI NO: 15225806 NR Description: putative phospholipase C; protein id: At2g26870.1
  misc_feature (13)..(493): Homolog of NCBI NO: 20161866 NR Description: B1139B11.7 [Oryza sativa (japonica
  misc_feature (13)..(493): Homolog of NCBI NO: 30693062 NR Description: phosphoesterase family [Arabidopsis thaliana] phosphatidylglycerol specific phospholipase C [Arabidopsis
MIETTKGGSGSYPIKTIVVLVQENRSFDHTLGWFKELNREIDGVTKSDPKSNTVSSSDTNSLRVVFGDQSQYVNPDPGHSIQDIYEQVFGKPWDSGKPDPNPGHPNMSGFAQNAERNKKGMSSAVMNGFKPNALPVYKELVQNFAICDRWFASVPASTQPNRLYVHSATSHGATSNDKKLLLEGFPQKTIFESLDEAGFSFGIYYQFPPSTLFYRNLRKLKYLTHFHQYGIQFKKDCKEGKLPNYVVVEQRWFDLLSTPANDDHPSHDVSEGQKLVKEVYEALRSSPQWNEILFIITYDEHGGFYDHVPTPVDGVPNPDGILGPPPYNFEFNRLGVRVPTFFISPWIEPGTVIHGPNGPYPRSQYEHSSIPATVKTIFKLKDFLSKRDSWAGTFESVITRDSPRQDCPETLSTPIKLRGTMAKENAQLSEFQEDLVIMAAGLKGDYKNEELIHKLCKETCVADASKYVTNAFEKFLEESRKARDRGCDENDIVYCVDDDDDHVVIPPQSHSEASNAAAQPKTQTSFFNKLFSCFIRHD

SEQ ID NO: 80050 - protein, 432 aa, Arabidopsis thaliana
  peptide (1)..(432): Ceres Seq. ID no. 12654196
  misc_feature (1)..(291): Pfam Name: Phosphoesterase family Pfam Description: Phosphoesterase family
  misc_feature (1)..(432): Homolog of NCBI NO: 18396577 NR Description: expressed protein; protein id: At3g03530.1, by cDNA: gi_14335155 [Arabidopsis thaliana] hypothetical protein [Arabidopsis thaliana]
  misc_feature (1)..(410): Homolog of NCBI NO: 18396579 NR Description: putative phospholipase; protein id: At3g03540.1 thaliana] >gi|6017098|gb|AAF01581.1|AC009895_2 unknown protein thaliana] >gi|6091767|gb|AAF03477.1|AC009327_16 putative
  misc_feature (1)..(429): Homolog of NCBI NO: 15228577 NR Description: unknown protein; protein id: At3g03520.1, by cDNA: gi_17529015 [Arabidopsis thaliana] unknown protein [Arabidopsis thaliana]
  misc_feature (1)..(429): Homolog of NCBI NO: 17529016 NR Description: unknown protein [Arabidopsis thaliana]
  misc_feature (1)..(428): Homolog of NCBI NO: 27573343 NR Description: putative phosphoesterase [Oryza sativa (japonica group)] >gi|29126358|gb|AAO66550.1| putative phosphoesterase
  misc_feature (1)..(387): Homolog of NCBI NO: 21703147 NR Description: At1g07230/F10K1_4 [Arabidopsis thaliana] phosphatidylglycerol specific phospholipase C [Arabidopsis
  misc_feature (1)..(387): Homolog of NCBI NO: 15222342 NR Description: unknown protein; protein id: At1g07230.1
  misc_feature (1)..(388): Homolog of NCBI NO: 15225806 NR Description: putative phospholipase C; protein id: At2g26870.1
  misc_feature (1)..(387): Homolog of NCBI NO: 20161866 NR Description: B1139B11.7 [Oryza sativa (japonica
  misc_feature (1)..(387): Homolog of NCBI NO: 30693062 NR Description: phosphoesterase family [Arabidopsis thaliana] phosphatidylglycerol specific phospholipase C [Arabidopsis
MSGFAQNAERNKKGMSSAVMNGFKPNALPVYKELVQNFAICDRWFASVPASTQPNRLYVHSATSHGATSNDKKLLLEGFPQKTIFESLDEAGFSFGIYYQFPPSTLFYRNLRKLKYLTHFHQYGIQFKKDCKEGKLPNYVVVEQRWFDLLSTPANDDHPSHDVSEGQKLVKEVYEALRSSPQWNEILFIITYDEHGGFYDHVPTPVDGVPNPDGILGPPPYNFEFNRLGVRVPTFFISPWIEPGTVIHGPNGPYPRSQYEHSSIPATVKTIFKLKDFLSKRDSWAGTFESVITRDSPRQDCPETLSTPIKLRGTMAKENAQLSEFQEDLVIMAAGLKGDYKNEELIHKLCKETCVADASKYVTNAFEKFLEESRKARDRGCDENDIVYCVDDDDDHVVIPPQSHSEASNAAAQPKTQTSFFNKLFSCFIRHD

SEQ ID NO: 80051 - protein, 418 aa, Arabidopsis thaliana
  peptide (1)..(418): Ceres Seq. ID no. 12654197
  misc_feature (1)..(277): Pfam Name: Phosphoesterase family Pfam Description: Phosphoesterase family
  misc_feature (1)..(418): Homolog of NCBI NO: 18396577 NR Description: expressed protein; protein id: At3g03530.1, by cDNA: gi_14335155 [Arabidopsis thaliana] hypothetical protein [Arabidopsis thaliana]
  misc_feature (1)..(396): Homolog of NCBI NO: 18396579 NR Description: putative phospholipase; protein id: At3g03540.1 thaliana] >gi|6017098|gb|AAF01581.1|AC009895_2 unknown protein thaliana] >gi|6091767|gb|AAF03477.1|AC009327_16 putative
  misc_feature (1)..(415): Homolog of NCBI NO: 15228577 NR Description: unknown protein; protein id: At3g03520.1, by cDNA: gi_17529015 [Arabidopsis thaliana] unknown protein [Arabidopsis thaliana]
  misc_feature (1)..(415): Homolog of NCBI NO: 17529016 NR Description: unknown protein [Arabidopsis thaliana]
  misc_feature (1)..(414): Homolog of NCBI NO: 27573343 NR Description: putative phosphoesterase [Oryza sativa (japonica group)] >gi|29126358|gb|AAO66550.1| putative phosphoesterase
  misc_feature (1)..(373): Homolog of NCBI NO: 21703147 NR Description: At1g07230/F10K1_4 [Arabidopsis thaliana] phosphatidylglycerol specific phospholipase C [Arabidopsis
  misc_feature (1)..(373): Homolog of NCBI NO: 15222342 NR Description: unknown protein; protein id: At1g07230.1
  misc_feature (1)..(374): Homolog of NCBI NO: 15225806 NR Description: putative phospholipase C; protein id: At2g26870.1
  misc_feature (1)..(373): Homolog of NCBI NO: 20161866 NR Description: B1139B11.7 [Oryza sativa (japonica
  misc_feature (1)..(373): Homolog of NCBI NO: 30693062 NR Description: phosphoesterase family [Arabidopsis thaliana] phosphatidylglycerol specific phospholipase C [Arabidopsis
MSSAVMNGFKPNALPVYKELVQNFAICDRWFASVPASTQPNRLYVHSATSHGATSNDKKLLLEGFPQKTIFESLDEAGFSFGIYYQFPPSTLFYRNLRKLKYLTHFHQYGIQFKKDCKEGKLPNYVVVEQRWFDLLSTPANDDHPSHDVSEGQKLVKEVYEALRSSPQWNEILFIITYDEHGGFYDHVPTPVDGVPNPDGILGPPPYNFEFNRLGVRVPTFFISPWIEPGTVIHGPNGPYPRSQYEHSSIPATVKTIFKLKDFLSKRDSWAGTFESVITRDSPRQDCPETLSTPIKLRGTMAKENAQLSEFQEDLVIMAAGLKGDYKNEELIHKLCKETCVADASKYVTNAFEKFLEESRKARDRGCDENDIVYCVDDDDDHVVIPPQSHSEASNAAAQPKTQTSFFNKLFSCFIRHD

SEQ ID NO: 80052 - DNA, 1566 bp, Arabidopsis thaliana
  misc_feature (1)..(1566): Ceres Seq. ID no. 12654198
  misc_feature: MA Experiment ID: 20000227 Result: Up-regulated in Transcription
  misc_feature: MA Experiment 20000227 PARAMETER Experiment Name: At_Root-Tips-vs-Tops_P Parameter: Tissue Value: Root Tips vs. Root Tops
  misc_feature: MA Experiment ID: 20001451 Result: Up-regulated in Transcription
  misc_feature: MA Experiment 20001451 PARAMETER Experiment Name: At_Far-red-induction_P Parameter: Age (day) Value: 7
  misc_feature: MA Experiment 20001451 PARAMETER Experiment Name: At_Far-red-induction_P Parameter: Light Value: Far-red vs. White
  misc_feature: MA Experiment 20001451 PARAMETER Experiment Name: At_Far-red-induction_P Parameter: Organism Value: A. thaliana
  misc_feature: MA Experiment 20001451 PARAMETER Experiment Name: At_Far-red-induction_P Parameter: Plant Line Value: Columbia
  misc_feature: MA Experiment 20001451 PARAMETER Experiment Name: At_Far-red-induction_P Parameter: Timepoint (hr) Value: 24
  misc_feature: MA Experiment 20001451 PARAMETER Experiment Name: At_Far-red-induction_P Parameter: Tissue Value: Whole Plant
atggccgagacgaaaaaaggctcagaatcgtatccgatcaaaaccatcgtcgttttggttcaagagaatcgttctttcgaccacacacttggctggttcaaagagctaaaccgggaaattgacggagtcatgaaatcggaccagaaattcaacccgggtttttcctctgacctaaattcccacaacgtcgtctttggcgaccagtctcagtacgttgacccgaatccaggtcactccattcgggatatttacgaacaagtgttcggtaaaccatgggattcgggtcacccggacccaaacccgggtccagctacaatgtccggatttgcccaaaacgccgagcgaaagatgaaagggatgtcttctgcggttatgaacggatttaaaccggacgctttgccggtttacaaggaattggttcaaaatttcgctatatgtgataggtggtttgcgtcggttccgggtgcaacacagccaaaccgattgtttatacattcggcaacatcacacggaacaacgaacaacgagaggaaattactgatcgaaggttttccacaaaagacgatattcgagtcactcgatgaagctggttttacctttgggatttattaccaatgttttcctactactctcttttataggaatttgagaaaactcaagtatttgacacgtttccacgactacggactacaattcaagaaagattgtaaagaagggaatctaccgaactatgttgtggttgaacaacgttggtatgatctattgttgaatcccgctaacgatgatcatccatcacatgacgtctccgaaggccaaaagctcgtgaaagaagtttacgaggccttgagatcgagtcctcaatggaatgagattttattcattataacatatgacgaacacggtggattctacgaccatgtccctactcccctcgacggagttcctaatccggatggtatcttgggacctccaccgtacaattttgaatttaaccggctcggcgttagggttccgactttcttcatctccccttggattgagcctggcacagttcttcatgggtcaaatgggccgtacctaatgtcacaatatgagcattcgtcaattcccgcaacggtcaagaaaattttcaaactcaaagattttttgacaaagagagattcgtgggctggcacttttgaatctgttattacgagaaactcaccaagacaagattgccctgaaacattgtcaaatccggtcaaaatgagagggacggtggcaaaagaaaatgcagaattgagcgactttcaagaagagcttgtaatagttgctgcgggtttaaaaggagactacaaaaacgaagaattgctatacaaactatgcaaaaaaacttgcgtttcagatgcttctaaatacgttacgaaagcgtttgataagtttgtagaagagtctaaaaaggcaagagaaaggggaggtgatgagaacgacatcgttttttgcgttgatgatgatgatgatcataatgttgtgaaaccaccaccatcacaatcagagccatcacatgctactccttggtcaaattaa

SEQ ID NO: 80053 - protein, 521 aa, Arabidopsis thaliana
  peptide (1)..(521): Ceres Seq. ID no. 12654199
  misc_feature (13)..(396): Pfam Name: Phosphoesterase family Pfam Description: Phosphoesterase family
  misc_feature (1)..(521): Homolog of NCBI NO: 18396579 NR Description: putative phospholipase; protein id: At3g03540.1 thaliana] >gi|6017098|gb|AAF01581.1|AC009895_2 unknown protein thaliana] >gi|6091767|gb|AAF03477.1|AC009327_16 putative
  misc_feature (1)..(516): Homolog of NCBI NO: 18396577 NR Description: expressed protein; protein id: At3g03530.1, by cDNA: gi_14335155 [Arabidopsis thaliana] hypothetical protein [Arabidopsis thaliana]
  misc_feature (7)..(505): Homolog of NCBI NO: 15228577 NR Description: unknown protein; protein id: At3g03520.1, by cDNA: gi_17529015 [Arabidopsis thaliana] unknown protein [Arabidopsis thaliana]
  misc_feature (7)..(505): Homolog of NCBI NO: 17529016 NR Description: unknown protein [Arabidopsis thaliana]
  misc_feature (13)..(514): Homolog of NCBI NO: 27573343 NR Description: putative phosphoesterase [Oryza sativa (japonica group)] >gi|29126358|gb|AAO66550.1| putative phosphoesterase
  misc_feature (12)..(492): Homolog of NCBI NO: 20161866 NR Description: B1139B11.7 [Oryza sativa (japonica
  misc_feature (12)..(492): Homolog of NCBI NO: 21703147 NR Description: At1g07230/F10K1_4 [Arabidopsis thaliana] phosphatidylglycerol specific phospholipase C [Arabidopsis
  misc_feature (12)..(492): Homolog of NCBI NO: 15225806 NR Description: putative phospholipase C; protein id: At2g26870.1
  misc_feature (12)..(492): Homolog of NCBI NO: 15222342 NR Description: unknown protein; protein id: At1g07230.1
  misc_feature (6)..(492): Homolog of NCBI NO: 30693062 NR Description: phosphoesterase family [Arabidopsis thaliana] phosphatidylglycerol specific phospholipase C [Arabidopsis
MAETKKGSESYPIKTIVVLVQENRSFDHTLGWFKELNREIDGVMKSDQKFNPGFSSDLNSHNVVFGDQSQYVDPNPGHSIRDIYEQVFGKPWDSGHPDPNPGPATMSGFAQNAERKMKGMSSAVMNGFKPDALPVYKELVQNFAICDRWFASVPGATQPNRLFIHSATSHGTTNNERKLLIEGFPQKTIFESLDEAGFTFGIYYQCFPTTLFYRNLRKLKYLTRFHDYGLQFKKDCKEGNLPNYVVVEQRWYDLLLNPANDDHPSHDVSEGQKLVKEVYEALRSSPQWNEILFIITYDEHGGFYDHVPTPLDGVPNPDGILGPPPYNFEFNRLGVRVPTFFISPWIEPGTVLHGSNGPYLMSQYEHSSIPATVKKIFKLKDFLTKRDSWAGTFESVITRNSPRQDCPETLSNPVKMRGTVAKENAELSDFQEELVIVAAGLKGDYKNEELLYKLCKKTCVSDASKYVTKAFDKFVEESKKARERGGDENDIVFCVDDDDDHNVVKPPPSQSEPSHATPWSN

SEQ ID NO: 80054 - protein, 478 aa, Arabidopsis thaliana
  peptide (1)..(478): Ceres Seq. ID no. 12654200
  misc_feature (1)..(353): Pfam Name: Phosphoesterase family Pfam Description: Phosphoesterase family
  misc_feature (1)..(478): Homolog of NCBI NO: 18396579 NR Description: putative phospholipase; protein id: At3g03540.1 thaliana] >gi|6017098|gb|AAF01581.1|AC009895_2 unknown protein thaliana] >gi|6091767|gb|AAF03477.1|AC009327_16 putative
  misc_feature (1)..(473): Homolog of NCBI NO: 18396577 NR Description: expressed protein; protein id: At3g03530.1, by cDNA: gi_14335155 [Arabidopsis thaliana] hypothetical protein [Arabidopsis thaliana]
  misc_feature (1)..(462): Homolog of NCBI NO: 15228577 NR Description: unknown protein; protein id: At3g03520.1, by cDNA: gi_17529015 [Arabidopsis thaliana] unknown protein [Arabidopsis thaliana]
  misc_feature (1)..(462): Homolog of NCBI NO: 17529016 NR Description: unknown protein [Arabidopsis thaliana]
  misc_feature (1)..(471): Homolog of NCBI NO: 27573343 NR Description: putative phosphoesterase [Oryza sativa (japonica group)] >gi|29126358|gb|AAO66550.1| putative phosphoesterase
  misc_feature (1)..(449): Homolog of NCBI NO: 20161866 NR Description: B1139B11.7 [Oryza sativa (japonica
  misc_feature (1)..(449): Homolog of NCBI NO: 21703147 NR Description: At1g07230/F10K1_4 [Arabidopsis thaliana] phosphatidylglycerol specific phospholipase C [Arabidopsis
  misc_feature (1)..(449): Homolog of NCBI NO: 15225806 NR Description: putative phospholipase C; protein id: At2g26870.1
  misc_feature (1)..(449): Homolog of NCBI NO: 15222342 NR Description: unknown protein; protein id: At1g07230.1
  misc_feature (1)..(449): Homolog of NCBI NO: 30693062 NR Description: phosphoesterase family [Arabidopsis thaliana] phosphatidylglycerol specific phospholipase C [Arabidopsis
MKSDQKFNPGFSSDLNSHNVVFGDQSQYVDPNPGHSIRDIYEQVFGKPWDSGHPDPNPGPATMSGFAQNAERKMKGMSSAVMNGFKPDALPVYKELVQNFAICDRWFASVPGATQPNRLFIHSATSHGTTNNERKLLIEGFPQKTIFESLDEAGFTFGIYYQCFPTTLFYRNLRKLKYLTRFHDYGLQFKKDCKEGNLPNYVVVEQRWYDLLLNPANDDHPSHDVSEGQKLVKEVYEALRSSPQWNEILFIITYDEHGGFYDHVPTPLDGVPNPDGILGPPPYNFEFNRLGVRVPTFFISPWIEPGTVLHGSNGPYLMSQYEHSSIPATVKKIFKLKDFLTKRDSWAGTFESVITRNSPRQDCPETLSNPVKMRGTVAKENAELSDFQEELVIVAAGLKGDYKNEELLYKLCKKTCVSDASKYVTKAFDKFVEESKKARERGGDENDIVFCVDDDDDHNVVKPPPSQSEPSHATPWSN

SEQ ID NO: 80055 - protein, 416 aa, Arabidopsis thaliana
  peptide (1)..(416): Ceres Seq. ID no. 12654201
  misc_feature (1)..(291): Pfam Name: Phosphoesterase family Pfam Description: Phosphoesterase family
  misc_feature (1)..(416): Homolog of NCBI NO: 18396579 NR Description: putative phospholipase; protein id: At3g03540.1 thaliana] >gi|6017098|gb|AAF01581.1|AC009895_2 unknown protein thaliana] >gi|6091767|gb|AAF03477.1|AC009327_16 putative
  misc_feature (1)..(411): Homolog of NCBI NO: 18396577 NR Description: expressed protein; protein id: At3g03530.1, by cDNA: gi_14335155 [Arabidopsis thaliana] hypothetical protein [Arabidopsis thaliana]
  misc_feature (1)..(400): Homolog of NCBI NO: 15228577 NR Description: unknown protein; protein id: At3g03520.1, by cDNA: gi_17529015 [Arabidopsis thaliana] unknown protein [Arabidopsis thaliana]
  misc_feature (1)..(400): Homolog of NCBI NO: 17529016 NR Description: unknown protein [Arabidopsis thaliana]
  misc_feature (1)..(409): Homolog of NCBI NO: 27573343 NR Description: putative phosphoesterase [Oryza sativa (japonica group)] >gi|29126358|gb|AAO66550.1| putative phosphoesterase
  misc_feature (1)..(387): Homolog of NCBI NO: 20161866 NR Description: B1139B11.7 [Oryza sativa (japonica
  misc_feature (1)..(387): Homolog of NCBI NO: 21703147 NR Description: At1g07230/F10K1_4 [Arabidopsis thaliana] phosphatidylglycerol specific phospholipase C [Arabidopsis
  misc_feature (1)..(387): Homolog of NCBI NO: 15225806 NR Description: putative phospholipase C; protein id: At2g26870.1
  misc_feature (1)..(387): Homolog of NCBI NO: 15222342 NR Description: unknown protein; protein id: At1g07230.1
  misc_feature (1)..(387): Homolog of NCBI NO: 30693062 NR Description: phosphoesterase family [Arabidopsis thaliana] phosphatidylglycerol specific phospholipase C [Arabidopsis
MSGFAQNAERKMKGMSSAVMNGFKPDALPVYKELVQNFAICDRWFASVPGATQPNRLFIHSATSHGTTNNERKLLIEGFPQKTIFESLDEAGFTFGIYYQCFPTTLFYRNLRKLKYLTRFHDYGLQFKKDCKEGNLPNYVVVEQRWYDLLLNPANDDHPSHDVSEGQKLVKEVYEALRSSPQWNEILFIITYDEHGGFYDHVPTPLDGVPNPDGILGPPPYNFEFNRLGVRVPTFFISPWIEPGTVLHGSNGPYLMSQYEHSSIPATVKKIFKLKDFLTKRDSWAGTFESVITRNSPRQDCPETLSNPVKMRGTVAKENAELSDFQEELVIVAAGLKGDYKNEELLYKLCKKTCVSDASKYVTKAFDKFVEESKKARERGGDENDIVFCVDDDDDHNVVKPPPSQSEPSHATPWSN

SEQ ID NO: 80056 - DNA, 1056 bp, Arabidopsis thaliana
  misc_feature (1)..(1056): Ceres Seq. ID no. 12654210
  misc_feature: MA Experiment ID: 20000180 Result: Up-regulated in Transcription
  misc_feature: MA Experiment 20000180 PARAMETER Experiment Name: At_Germinating_Seeds_P Parameter: Age (hr) Value: 24 vs. 0
  misc_feature: MA Experiment 20000180 PARAMETER Experiment Name: At_Germinating_Seeds_P Parameter: Tissue Value: Germinating Seeds
  misc_feature: MA Experiment ID: 20000227 Result: Up-regulated in Transcription
  misc_feature: MA Experiment 20000227 PARAMETER Experiment Name: At_Root-Tips-vs-Tops_P Parameter: Tissue Value: Root Tips vs. Root Tops
  misc_feature: MA Experiment ID: 20000439 Result: Up-regulated in Transcription
  misc_feature: MA Experiment 20000439 PARAMETER Experiment Name: At_Roots__P Parameter: Age (day) Value: 14 vs. 21
  misc_feature: MA Experiment 20000439 PARAMETER Experiment Name: At_Roots__P Parameter: Organism Value: A. thaliana
  misc_feature: MA Experiment 20000439 PARAMETER Experiment Name: At_Roots__P Parameter: Tissue Value: Roots vs. Whole Plant
aaactaacttcgctagagaataatggcatctgtttactccaccctaacctactggctcgtccaccacccctacattgccaacttcacgtggaccgaaggtgaaacactaggctccaccgttttctttgtctttgtcgtcgtctccctttacctctccgccacattcctcctccgatacaccgtcgattcactccccacactcggtccccgcattctcaaaccaatcacagccgttcacagcctcattctcttcctcctctccttaaccatggccgttggttgcactctctccctaatctcttcctcggacccgaaggcgcgtctcttcgacgccgtttgtttccccctcgacgtgaaacctaagggaccgcttttcttttgggctcaagtcttttacctctcgaagatccttgagttcgtagacacacttctcatcatactcaacaaatcaatccaacggctctcgttcctccacgtctaccaccacgcaacggttgtgattttgtgctacctctggttacgaacacgtcaatcgatgtttcctgttgggctcgtgttgaactcgacggtccatgtgattatgtacgggtactatttcctctgcgctatcggatcgaggcccaagtggaagaagttggtgacgaattttcaaatggttcagtttgctttcggcatggggttaggagccgcttggatgctcccagagcattatttcgggtcgggttgcgccgggatttggacagtttatttcaatggtgtgtttactgcttctctattggctctcttctacaacttccactccaagaactatgagaagactacaacgtcgcctttgtataagatcgaatcctttatatttattcacggagagaggtgggcaaataaagcgattacattattttccaagaaaaacgattaaattgtcatgattattatatatatatctagtttggatatgttgatgtgtgttgttagttgttactgtaaaatgttgggatgcatggtttgaaattgttttatatattaacgaataagatgacaaaatatataaaaatg

SEQ ID NO: 80057 - protein, 298 aa, Arabidopsis thaliana
  peptide (1)..(298): Ceres Seq. ID no. 12654211
  misc_feature (1)..(277): Pfam Name: GNS1/SUR4 family Pfam Description: GNS1/SUR4 family
  misc_feature (1)..(298): Homolog of NCBI NO: 15230725 NR Description: unknown protein; protein id: At3g06460.1, by cDNA: gi_18252966 [Arabidopsis thaliana] unknown protein [Arabidopsis thaliana]
  misc_feature (1)..(268): Homolog of NCBI NO: 15230729 NR Description: unknown protein; protein id: At3g06470.1 thaliana] >gi|6437542|gb|AAF08569.1|AC011623_2 unknown protein
  misc_feature (11)..(263): Homolog of NCBI NO: 19033556 NR Description: putative long chain fatty acid elongation enzyme
  misc_feature (3)..(259): Homolog of NCBI NO: 15234538 NR Description: putative protein; protein id: At4g36830.1
  misc_feature (20)..(269): Homolog of NCBI NO: 28828933 NR Description: similar to GNS1/SUR4 family protein
  misc_feature (20)..(275): Homolog of NCBI NO: 19569971 NR Description: Hypothetical 36.2 kDa protein in UBP12-CDC6 region. [Dictyostelium discoideum] >gi|28829059|gb|AAM43611.2|
  misc_feature (6)..(267): Homolog of NCBI NO: 15222085 NR Description: hypothetical protein; protein id: At1g75000.1
  misc_feature (19)..(273): Homolog of NCBI NO: 6319882 NR Description: Involved in synthesis of 1,3-beta-glucan, a of the cell wall, and elongation of fatty acids up to 24 carbons;
  misc_feature (118)..(263): Homolog of NCBI NO: 24662491 NR Description: CG32072-PA [Drosophila melanogaster]
  misc_feature (36)..(265): Homolog of NCBI NO: 24649055 NR Description: CG6921-PA [Drosophila melanogaster]
MASVYSTLTYWLVHHPYIANFTWTEGETLGSTVFFVFVVVSLYLSATFLLRYTVDSLPTLGPRILKPITAVHSLILFLLSLTMAVGCTLSLISSSDPKARLFDAVCFPLDVKPKGPLFFWAQVFYLSKILEFVDTLLIILNKSIQRLSFLHVYHHATVVILCYLWLRTRQSMFPVGLVLNSTVHVIMYGYYFLCAIGSRPKWKKLVTNFQMVQFAFGMGLGAAWMLPEHYFGSGCAGIWTVYFNGVFTASLLALFYNFHSKNYEKTTTSPLYKIESFIFIHGERWANKAITLFSKKND

SEQ ID NO: 80058 - protein, 216 aa, Arabidopsis thaliana
  peptide (1)..(216): Ceres Seq. ID no. 12654212
  misc_feature (1)..(195): Pfam Name: GNS1/SUR4 family Pfam Description: GNS1/SUR4 family
  misc_feature (1)..(216): Homolog of NCBI NO: 15230725 NR Description: unknown protein; protein id: At3g06460.1, by cDNA: gi_18252966 [Arabidopsis thaliana] unknown protein [Arabidopsis thaliana]
  misc_feature (1)..(186): Homolog of NCBI NO: 15230729 NR Description: unknown protein; protein id: At3g06470.1 thaliana] >gi|6437542|gb|AAF08569.1|AC011623_2 unknown protein
  misc_feature (1)..(181): Homolog of NCBI NO: 19033556 NR Description: putative long chain fatty acid elongation enzyme
  misc_feature (1)..(177): Homolog of NCBI NO: 15234538 NR Description: putative protein; protein id: At4g36830.1
  misc_feature (1)..(187): Homolog of NCBI NO: 28828933 NR Description: similar to GNS1/SUR4 family protein
  misc_feature (1)..(193): Homolog of NCBI NO: 19569971 NR Description: Hypothetical 36.2 kDa protein in UBP12-CDC6 region. [Dictyostelium discoideum] >gi|28829059|gb|AAM43611.2|
  misc_feature (1)..(185): Homolog of NCBI NO: 15222085 NR Description: hypothetical protein; protein id: At1g75000.1
  misc_feature (1)..(191): Homolog of NCBI NO: 6319882 NR Description: Involved in synthesis of 1,3-beta-glucan, a of the cell wall, and elongation of fatty acids up to 24 carbons;
  misc_feature (36)..(181): Homolog of NCBI NO: 24662491 NR Description: CG32072-PA [Drosophila melanogaster]
  misc_feature (1)..(183): Homolog of NCBI NO: 24649055 NR Description: CG6921-PA [Drosophila melanogaster]
MAVGCTLSLISSSDPKARLFDAVCFPLDVKPKGPLFFWAQVFYLSKILEFVDTLLIILNKSIQRLSFLHVYHHATVVILCYLWLRTRQSMFPVGLVLNSTVHVIMYGYYFLCAIGSRPKWKKLVTNFQMVQFAFGMGLGAAWMLPEHYFGSGCAGIWTVYFNGVFTASLLALFYNFHSKNYEKTTTSPLYKIESFIFIHGERWANKAITLFSKKND

SEQ ID NO: 80059 - DNA, 1082 bp, Arabidopsis thaliana
  misc_feature (1)..(1082): Ceres Seq. ID no. 12654213
  misc_feature: MA Experiment ID: 20000184 Result: Up-regulated in Transcription
  misc_feature: MA Experiment 20000184 PARAMETER Experiment Name: At_Shoots__P Parameter: Age (day) Value: 7
  misc_feature: MA Experiment 20000184 PARAMETER Experiment Name: At_Shoots__P Parameter: Tissue Value: Shoots vs. Whole Plant
  misc_feature: MA Experiment ID: 20000227 Result: Down-regulated in Transcription
  misc_feature: MA Experiment 20000227 PARAMETER Experiment Name: At_Root-Tips-vs-Tops_P Parameter: Tissue Value: Root Tips vs. Root Tops
  misc_feature: MA Experiment ID: 20000234 Result: Down-regulated in Transcription
  misc_feature: MA Experiment 20000234 PARAMETER Experiment Name: At_Siliques_P Parameter: Age (day) Value: 21
  misc_feature: MA Experiment 20000234 PARAMETER Experiment Name: At_Siliques_P Parameter: Organism Value: A. thaliana
  misc_feature: MA Experiment 20000234 PARAMETER Experiment Name: At_Siliques_P Parameter: Plant Line Value: WS
  misc_feature: MA Experiment 20000234 PARAMETER Experiment Name: At_Siliques_P Parameter: Tissue Value: Less Than 5mm Siliques vs. Whole Plant
  misc_feature: MA Experiment ID: 20000235 Result: Down-regulated in Transcription
  misc_feature: MA Experiment 20000235 PARAMETER Experiment Name: At_Siliques_P Parameter: Age (day) Value: 21
  misc_feature: MA Experiment 20000235 PARAMETER Experiment Name: At_Siliques_P Parameter: Organism Value: A. thaliana
  misc_feature: MA Experiment 20000235 PARAMETER Experiment Name: At_Siliques_P Parameter: Plant Line Value: WS
  misc_feature: MA Experiment 20000235 PARAMETER Experiment Name: At_Siliques_P Parameter: Tissue Value: 5-10mm Siliques vs. Whole Plant
  misc_feature: MA Experiment ID: 20000264 Result: Down-regulated in Transcription
  misc_feature: MA Experiment 20000264 PARAMETER Experiment Name: At_Open_Flower_P Parameter: Age (day) Value: 21
  misc_feature: MA Experiment 20000264 PARAMETER Experiment Name: At_Open_Flower_P Parameter: Plant Line Value: WS
  misc_feature: MA Experiment 20000264 PARAMETER Experiment Name: At_Open_Flower_P Parameter: Tissue Value: Open Flower vs. Whole Plant
  misc_feature: MA Experiment ID: 20000265 Result: Down-regulated in Transcription
  misc_feature: MA Experiment 20000265 PARAMETER Experiment Name: At_Open_Flower_P Parameter: Age (day) Value: 21
  misc_feature: MA Experiment 20000265 PARAMETER Experiment Name: At_Open_Flower_P Parameter: Plant Line Value: WS
  misc_feature: MA Experiment 20000265 PARAMETER Experiment Name: At_Open_Flower_P Parameter: Tissue Value: Closed Flower vs. Whole Plant
  misc_feature: MA Experiment ID: 20000286 Result: Down-regulated in Transcription
  misc_feature: MA Experiment 20000286 PARAMETER Experiment Name: At_Open_Flower_P Parameter: Age (day) Value: 21
  misc_feature: MA Experiment 20000286 PARAMETER Experiment Name: At_Open_Flower_P Parameter: Plant Line Value: WS
  misc_feature: MA Experiment 20000286 PARAMETER Experiment Name: At_Open_Flower_P Parameter: Tissue Value: Half Open vs. Whole Plant
  misc_feature: MA Experiment ID: 20000437 Result: Down-regulated in Transcription
  misc_feature: MA Experiment 20000437 PARAMETER Experiment Name: At_Drought_P Parameter: Age (day) Value: 8
  misc_feature: MA Experiment 20000437 PARAMETER Experiment Name: At_Drought_P Parameter: Organism Value: A. thaliana
  misc_feature: MA Experiment 20000437 PARAMETER Experiment Name: At_Drought_P Parameter: Plant Line Value: WS
  misc_feature: MA Experiment 20000437 PARAMETER Experiment Name: At_Drought_P Parameter: Timepoint (hr) Value: 24
  misc_feature: MA Experiment 20000437 PARAMETER Experiment Name: At_Drought_P Parameter: Tissue Value: Whole Plant
  misc_feature: MA Experiment 20000437 PARAMETER Experiment Name: At_Drought_P Parameter: Treatment Value: Drought vs. No Drought
  misc_feature: MA Experiment ID: 20000452 Result: Up-regulated in Transcription
  misc_feature: MA Experiment 20000452 PARAMETER Experiment Name: At_CS6879_Shoots-Roots_P Parameter: Age (day) Value: 14
  misc_feature: MA Experiment 20000452 PARAMETER Experiment Name: At_CS6879_Shoots-Roots_P Parameter: Organism Value: A. thaliana
  misc_feature: MA Experiment 20000452 PARAMETER Experiment Name: At_CS6879_Shoots-Roots_P Parameter: Plant Line Value: CS6879 vs. WS
  misc_feature: MA Experiment 20000452 PARAMETER Experiment Name: At_CS6879_Shoots-Roots_P Parameter: Tissue Value: Shoots
  misc_feature: MA Experiment ID: 20001247 Result: Up-regulated in Transcription
  misc_feature: MA Experiment 20001247 PARAMETER Experiment Name: At_Far-red-induction_P Parameter: Age (day) Value: 7
  misc_feature: MA Experiment 20001247 PARAMETER Experiment Name: At_Far-red-induction_P Parameter: Light Value: Far-red vs. White
  misc_feature: MA Experiment 20001247 PARAMETER Experiment Name: At_Far-red-induction_P Parameter: Organism Value: A. thaliana
  misc_feature: MA Experiment 20001247 PARAMETER Experiment Name: At_Far-red-induction_P Parameter: Plant Line Value: Columbia
  misc_feature: MA Experiment 20001247 PARAMETER Experiment Name: At_Far-red-induction_P Parameter: Timepoint (hr) Value: 1
  misc_feature: MA Experiment 20001247 PARAMETER Experiment Name: At_Far-red-induction_P Parameter: Tissue Value: Whole Plant
aaacttcgtcggcgattcaccggaggctatggcatcaatttactcctctttaacctactggctcgttaaccacccctacatctccaattttacttggatcgaaggtgaaaccctaggctccaccgtctttttcgtatccgtcgtagtctccgtttacctctccgccacgttcctcctccgatccgccatcgattcactcccatcactcagtccacgtatcctcaaaccgatcacagccgtccacagcctaatcctctgtctcctctccttagtcatggccgtcggttgcactctctcaataacctcatctcacgcgtcttcagatccgatggcgcgtttccttcacgcgatttgctttcccgtcgacgttaaacctaacggaccgcttttcttctgggctcaagtcttctacctctcgaagatcctcgagttcggagacacgatcctcatcatactcggcaaatcaatccaacggctatccttcctccacgtgtaccaccacgcgacggttgtggtcatgtgttatctctggctccgaactcgccaatcgatgtttccgattgcgctcgtgacgaattcgacggtacacgtcatcatgtacggttactacttcctctgcgccgttggatcgaggcccaagtggaagagattggtgacggattgtcagattgttcagtttgttttcagtttcgggttatccggttggatgctccgagagcacttattcgggtcgggttgcaccgggatttggggatggtgtttcaacgctgcatttaatgcttctcttttggctctcttttccaacttccattcaaagaattatgtcaagaagccaacgagagaggatggcaaaaaaagcgattagattggtttcttggacaataagtaaaacctctcattgtgtcttgaattgttgattagtttccacacaaaaggattaattgtcttgaattgttgtttattttgaaatttttgtctgtgttgtacttgcaaatgttgagatacttttgtacttgtatgaatataagatgacagaaaatatcaaaatatcacaaaagtcatgacatggactcatcatctct

SEQ ID NO: 80060 - protein, 287 aa, Arabidopsis thaliana
  peptide (1)..(287): Ceres Seq. ID no. 12654214
  misc_feature (10)..(286): Pfam Name: GNS1/SUR4 family Pfam Description: GNS1/SUR4 family
  misc_feature (10)..(287): Homolog of NCBI NO: 15230729 NR Description: unknown protein; protein id: At3g06470.1 thaliana] >gi|6437542|gb|AAF08569.1|AC011623_2 unknown protein
  misc_feature (10)..(279): Homolog of NCBI NO: 15230725 NR Description: unknown protein; protein id: At3g06460.1, by cDNA: gi_18252966 [Arabidopsis thaliana] unknown protein [Arabidopsis thaliana]
  misc_feature (20)..(286): Homolog of NCBI NO: 19033556 NR Description: putative long chain fatty acid elongation enzyme
  misc_feature (12)..(270): Homolog of NCBI NO: 15234538 NR Description: putative protein; protein id: At4g36830.1
  misc_feature (29)..(279): Homolog of NCBI NO: 28828933 NR Description: similar to GNS1/SUR4 family protein
  misc_feature (15)..(272): Homolog of NCBI NO: 15222085 NR Description: hypothetical protein; protein id: At1g75000.1
  misc_feature (29)..(287): Homolog of NCBI NO: 19569971 NR Description: Hypothetical 36.2 kDa protein in UBP12-CDC6 region. [Dictyostelium discoideum] >gi|28829059|gb|AAM43611.2|
  misc_feature (130)..(274): Homolog of NCBI NO: 24662491 NR Description: CG32072-PA [Drosophila melanogaster]
  misc_feature (47)..(282): Homolog of NCBI NO: 9507147 NR Description: elongation of very long chain fatty acids
  misc_feature (47)..(282): Homolog of NCBI NO: 12852862 NR Description: unnamed protein product [Mus musculus]
NFVGDSPEAMASIYSSLTYWLVNHPYISNFTWIEGETLGSTVFFVSVVVSVYLSATFLLRSAIDSLPSLSPRILKPITAVHSLILCLLSLVMAVGCTLSITSSHASSDPMARFLHAICFPVDVKPNGPLFFWAQVFYLSKILEFGDTILIILGKSIQRLSFLHVYHHATVVVMCYLWLRTRQSMFPIALVTNSTVHVIMYGYYFLCAVGSRPKWKRLVTDCQIVQFVFSFGLSGWMLREHLFGSGCTGIWGWCFNAAFNASLLALFSNFHSKNYVKKPTREDGKKSD

SEQ ID NO: 80061 - protein, 278 aa, Arabidopsis thaliana
  peptide (1)..(278): Ceres Seq. ID no. 12654215
  misc_feature (1)..(277): Pfam Name: GNS1/SUR4 family Pfam Description: GNS1/SUR4 family
  misc_feature (1)..(278): Homolog of NCBI NO: 15230729 NR Description: unknown protein; protein id: At3g06470.1 thaliana] >gi|6437542|gb|AAF08569.1|AC011623_2 unknown protein
  misc_feature (1)..(270): Homolog of NCBI NO: 15230725 NR Description: unknown protein; protein id: At3g06460.1, by cDNA: gi_18252966 [Arabidopsis thaliana] unknown protein [Arabidopsis thaliana]
  misc_feature (11)..(277): Homolog of NCBI NO: 19033556 NR Description: putative long chain fatty acid elongation enzyme
  misc_feature (3)..(261): Homolog of NCBI NO: 15234538 NR Description: putative protein; protein id: At4g36830.1
  misc_feature (20)..(270): Homolog of NCBI NO: 28828933 NR Description: similar to GNS1/SUR4 family protein
  misc_feature (6)..(263): Homolog of NCBI NO: 15222085 NR Description: hypothetical protein; protein id: At1g75000.1
  misc_feature (20)..(278): Homolog of NCBI NO: 19569971 NR Description: Hypothetical 36.2 kDa protein in UBP12-CDC6 region. [Dictyostelium discoideum] >gi|28829059|gb|AAM43611.2|
  misc_feature (121)..(265): Homolog of NCBI NO: 24662491 NR Description: CG32072-PA [Drosophila melanogaster]
  misc_feature (38)..(273): Homolog of NCBI NO: 9507147 NR Description: elongation of very long chain fatty acids
  misc_feature (38)..(273): Homolog of NCBI NO: 12852862 NR Description: unnamed protein product [Mus musculus]
MASIYSSLTYWLVNHPYISNFTWIEGETLGSTVFFVSVVVSVYLSATFLLRSAIDSLPSLSPRILKPITAVHSLILCLLSLVMAVGCTLSITSSHASSDPMARFLHAICFPVDVKPNGPLFFWAQVFYLSKILEFGDTILIILGKSIQRLSFLHVYHHATVVVMCYLWLRTRQSMFPIALVTNSTVHVIMYGYYFLCAVGSRPKWKRLVTDCQIVQFVFSFGLSGWMLREHLFGSGCTGIWGWCFNAAFNASLLALFSNFHSKNYVKKPTREDGKKSD

SEQ ID NO: 80062 - protein, 196 aa, Arabidopsis thaliana
  peptide (1)..(196): Ceres Seq. ID no. 12654216
  misc_feature (1)..(195): Pfam Name: GNS1/SUR4 family Pfam Description: GNS1/SUR4 family
  misc_feature (1)..(196): Homolog of NCBI NO: 15230729 NR Description: unknown protein; protein id: At3g06470.1 thaliana] >gi|6437542|gb|AAF08569.1|AC011623_2 unknown protein
  misc_feature (1)..(188): Homolog of NCBI NO: 15230725 NR Description: unknown protein; protein id: At3g06460.1, by cDNA: gi_18252966 [Arabidopsis thaliana] unknown protein [Arabidopsis thaliana]
  misc_feature (1)..(195): Homolog of NCBI NO: 19033556 NR Description: putative long chain fatty acid elongation enzyme
  misc_feature (1)..(179): Homolog of NCBI NO: 15234538 NR Description: putative protein; protein id: At4g36830.1
  misc_feature (1)..(188): Homolog of NCBI NO: 28828933 NR Description: similar to GNS1/SUR4 family protein
  misc_feature (1)..(181): Homolog of NCBI NO: 15222085 NR Description: hypothetical protein; protein id: At1g75000.1
  misc_feature (1)..(196): Homolog of NCBI NO: 19569971 NR Description: Hypothetical 36.2 kDa protein in UBP12-CDC6 region. [Dictyostelium discoideum] >gi|28829059|gb|AAM43611.2|
  misc_feature (39)..(183): Homolog of NCBI NO: 24662491 NR Description: CG32072-PA [Drosophila melanogaster]
  misc_feature (1)..(191): Homolog of NCBI NO: 9507147 NR Description: elongation of very long chain fatty acids
  misc_feature (1)..(191): Homolog of NCBI NO: 12852862 NR Description: unnamed protein product [Mus musculus]
MAVGCTLSITSSHASSDPMARFLHAICFPVDVKPNGPLFFWAQVFYLSKILEFGDTILIILGKSIQRLSFLHVYHHATVVVMCYLWLRTRQSMFPIALVTNSTVHVIMYGYYFLCAVGSRPKWKRLVTDCQIVQFVFSFGLSGWMLREHLFGSGCTGIWGWCFNAAFNASLLALFSNFHSKNYVKKPTREDGKKSD

SEQ ID NO: 80063 - DNA, 3267 bp, Arabidopsis thaliana
  misc_feature (1)..(3267): Ceres Seq. ID no. 12654217
  misc_feature: MA Experiment ID: 20000180 Result: Down-regulated in Transcription
  misc_feature: MA Experiment 20000180 PARAMETER Experiment Name: At_Germinating_Seeds_P Parameter: Age (hr) Value: 24 vs. 0
  misc_feature: MA Experiment 20000180 PARAMETER Experiment Name: At_Germinating_Seeds_P Parameter: Tissue Value: Germinating Seeds
  misc_feature: MA Experiment ID: 20001911 Result: Up-regulated in Transcription
  misc_feature: MA Experiment 20001911 PARAMETER Experiment Name: At_Drought_Reproduction_P Parameter: Age (day) Value: 40
  misc_feature: MA Experiment 20001911 PARAMETER Experiment Name: At_Drought_Reproduction_P Parameter: Organism Value: A. thaliana
  misc_feature: MA Experiment 20001911 PARAMETER Experiment Name: At_Drought_Reproduction_P Parameter: Plant Line Value: WS
  misc_feature: MA Experiment 20001911 PARAMETER Experiment Name: At_Drought_Reproduction_P Parameter: Timepoint (day) Value: 10
  misc_feature: MA Experiment 20001911 PARAMETER Experiment Name: At_Drought_Reproduction_P Parameter: Tissue Value: Flowers
  misc_feature: MA Experiment 20001911 PARAMETER Experiment Name: At_Drought_Reproduction_P Parameter: Treatment Value: Drought vs. No Drought
atggccacaacagaagatactccagcttctgctggtccaagatatgctccagaggacccaactcttccccaaccatggaagggacttattgatggaagcacaggaattctctattactggaatcctgaaaccaatgtcactcagtatgaaagaccttctgcgcctcctccccactctgccacaacaccgaagctagctcagattcctgtaccctcttcaggacaaggtcaccaagctcagcatgaacaagcaaaaccagttggtcatgtgtctcagcagcatggtttccaacaacagccacagcaatttccatcccaacatgtaagaccccaaatgatgcagcagcatccggcccagcaaatgcctcaacaatcaggtcaacagtttccccaacaacagagccaatcgatggtgccgcacccacatgggcatccttctgtacagacttatcagccaacgacgcagcagcagcagcaagggatgcagaatcagcattcacaaatgcctcagcagctgagccatcagtatgctcattcacaacaacattacatgggttttcggcctcacatgcaaacgcaaggacttcaaaattcacatcagacacctcagggtggtccccatggtcagcagtttccgagccagcaagagtacaactcattggctccgaagagggagggggatgagttccatgggggtaagaaaactgggttttctcaaccccatttaccaaattctgaacgttcaccatctcaaaatacccactttgaagccaatgcagcatcacaaaagacgaatgcaaacttggctatggctcagaaatgcaatggacctcaagcaaatgctgcagtcacacagtttcaacagccaggggcgaacctaattcaccagcaacttggacctagggcgccaaatcaaatggaccagacaatgttgcaccagaagtctcacgtttcccctttccaatcaaataatacttatgagaataatctacaatctaggcctggtaatgactcgtacgttaacatgagaatggaagtgccggttaggggtgcccaaccacttcatcctgcagcaatgcctaaggatataaggataagtggtggtccaccaacaaatgctgatcccgccatggggcaaacagggcatggaacatatggacacgctggtccagcttttccaaataaatccttggtgcggcctcattttgtcacatctcctgatgttccccatctctctcccgttgaaatataccgaaaacaacatgaagtcacaacaactggcgagaacattccagcaccatacatcacatttgaatctagtggtctcccacctgaaatccttagagagttgctttctgctggatttccatcgccaacaccgatccaggcccaaacatggccaattgctctgcaaagcagggatatagttgcaattgcaaaaactggttctggtaaaacattgggatacttgatccctgccttcattcttctaaggcactgtcgtaacgactcccgcaatggccccacagttttgatcctagctcctactcgggagctagccacacaaatacaagacgaagcactaaggtttggacggtcttccaggatatcatgcacttgtttgtatggtggagctccaaagggtcctcaattgaaagagttggaacgaggagctgatattgtggtggcaactcctgggcgtctaaatgatatactggagatgaagatgattgatttccagcaggtttcccttcttgtgcttgacgaggcagaccgaatgcttgacatgggttttgaaccccaaatccgtaagattgtgaatgaaatacctcctcggagacagactcttatgtacacagccacttggccaaaagaagtaagaaaaattgcaagcgatcttcttgtgaaccctgtccaagttaacataggcagggtagatgagttggctgctaacaaagcaataacgcagtatgttgaagtagtcccacaaatggagaaagagagacgtttggagcaaatccttaggtcacaagaacgaggttcaaaagttataatattttgctccacgaagaggctttgtgaccatcttgcacgtagtgtcggacgtcattttggcgctgttgtgatccatggagacaagactcaaggtgagagagattgggtgcttaaccagttccgaagcgggaagtcttgtgtactgatagctactgacgttgctgcccggggactcgacataaaagacatacgagttgtgatcaactacgattttccaactggagttgaagactatgtccaccgtattgggagaaccggtcgagctggtgcaactggagttgcattcactttctttacagagcaagattggaaatacgcacctgatttgatcaaagtcctggaaggagcgaaccagcaagtaccgcctcaagtaagagatattgcaatgcgtggtggtggtggtggtggtcccggttatagccaggatcgaagaggtatggttaaccggtttgactctggcggtggtggtacccgttgggattctggtggtgggtttggtgggcgtggtggtgggtttagtggccgtgagggtgggtttggaggccgtgagggtggatttgggggccgtgagggtggatttggaggccgtgggggaagatttggaatgagagatgactcatttggacgtggcgggaatcgtggtcggggttttactggtcctgatgctggtcatatgaatgtgggtggtagaggcggatttggtcggtttggcaataataataatatggagagccgaggctttggtcgtggtagtggtagaggctttggtcgtggtgttggacggtttgacaacagaagaggtagaagtcgcagcagaagtcctgatttggttcggccacggcgccgtagctcgagctatagccggagtcgaagccggagcgggagctatagtcgtagccgtagccgtagcaggagctggtcacgttcaaggagtcgcagccctagacatagccgtgaccgaggtggtcataacaggagcagaagctatagccgtagtcctagtccggtttatgaaagacgagatagagcgccacgtgtttctgggtttgatattaaaccaccagttgaatctgtagtgaacctggacatgaatgccgcggcagcgattgaaaacgtggttcctacatccttgtctgagagacaagggaatggggttgttgaatcggaggtagaagcggctttagtacgaccagtggttgatgaagaaccctaa

SEQ ID NO: 80064 - protein, 1088 aa, Arabidopsis thaliana
  peptide (1)..(1088): Ceres Seq. ID no. 12654218
  misc_feature (448)..(657): Pfam Name: DEAD/DEAH box helicase Pfam Description: DEAD/DEAH box helicase
  misc_feature (433)..(900): Homolog of NCBI NO: 15241445 NR Description: DRH1 DEAD box protein - like; protein id:
  misc_feature (14)..(78): Homolog of NCBI NO: 15241445 NR Description: DRH1 DEAD box protein - like; protein id:
  misc_feature (411)..(449): Homolog of NCBI NO: 15241445 NR Description: DRH1 DEAD box protein - like; protein id:
  misc_feature (368)..(866): Homolog of NCBI NO: 18395852 NR Description: RNA helicase, DRH1; protein id: At3g01540.1, by cDNA: gi_15215693, supported by cDNA: gi_16226724 [Arabidopsis >gi|15215694|gb|AAK91393.1| AT3g01540/F4P13_9 [Arabidopsis
  misc_feature (7)..(70): Homolog of NCBI NO: 18395852 NR Description: RNA helicase, DRH1; protein id: At3g01540.1, by cDNA: gi_15215693, supported by cDNA: gi_16226724 [Arabidopsis >gi|15215694|gb|AAK91393.1| AT3g01540/F4P13_9 [Arabidopsis
  misc_feature (368)..(875): Homolog of NCBI NO: 17065030 NR Description: RNA helicase, DRH1 [Arabidopsis thaliana]
  misc_feature (368)..(875): Homolog of NCBI NO: 30678365 NR Description: DEAD box RNA helicase (DRH1) [Arabidopsis
  misc_feature (7)..(70): Homolog of NCBI NO: 17065030 NR Description: RNA helicase, DRH1 [Arabidopsis thaliana]
  misc_feature (7)..(70): Homolog of NCBI NO: 30678365 NR Description: DEAD box RNA helicase (DRH1) [Arabidopsis
  misc_feature (415)..(1032): Homolog of NCBI NO: 34913856 NR Description: putative RNA helicase, DRH1 [Oryza sativa
MATTEDTPASAGPRYAPEDPTLPQPWKGLIDGSTGILYYWNPETNVTQYERPSAPPPHSATTPKLAQIPVPSSGQGHQAQHEQAKPVGHVSQQHGFQQQPQQFPSQHVRPQMMQQHPAQQMPQQSGQQFPQQQSQSMVPHPHGHPSVQTYQPTTQQQQQGMQNQHSQMPQQLSHQYAHSQQHYMGFRPHMQTQGLQNSHQTPQGGPHGQQFPSQQEYNSLAPKREGDEFHGGKKTGFSQPHLPNSERSPSQNTHFEANAASQKTNANLAMAQKCNGPQANAAVTQFQQPGANLIHQQLGPRAPNQMDQTMLHQKSHVSPFQSNNTYENNLQSRPGNDSYVNMRMEVPVRGAQPLHPAAMPKDIRISGGPPTNADPAMGQTGHGTYGHAGPAFPNKSLVRPHFVTSPDVPHLSPVEIYRKQHEVTTTGENIPAPYITFESSGLPPEILRELLSAGFPSPTPIQAQTWPIALQSRDIVAIAKTGSGKTLGYLIPAFILLRHCRNDSRNGPTVLILAPTRELATQIQDEALRFGRSSRISCTCLYGGAPKGPQLKELERGADIVVATPGRLNDILEMKMIDFQQVSLLVLDEADRMLDMGFEPQIRKIVNEIPPRRQTLMYTATWPKEVRKIASDLLVNPVQVNIGRVDELAANKAITQYVEVVPQMEKERRLEQILRSQERGSKVIIFCSTKRLCDHLARSVGRHFGAVVIHGDKTQGERDWVLNQFRSGKSCVLIATDVAARGLDIKDIRVVINYDFPTGVEDYVHRIGRTGRAGATGVAFTFFTEQDWKYAPDLIKVLEGANQQVPPQVRDIAMRGGGGGGPGYSQDRRGMVNRFDSGGGGTRWDSGGGFGGRGGGFSGREGGFGGREGGFGGREGGFGGRGGRFGMRDDSFGRGGNRGRGFTGPDAGHMNVGGRGGFGRFGNNNNMESRGFGRGSGRGFGRGVGRFDNRRGRSRSRSPDLVRPRRRSSSYSRSRSRSGSYSRSRSRSRSWSRSRSRSPRHSRDRGGHNRSRSYSRSPSPVYERRDRAPRVSGFDIKPPVESVVNLDMNAAAAIENVVPTSLSERQGNGVVESEVEAALVRPVVDEEP

SEQ ID NO: 80065 - protein, 977 aa, Arabidopsis thaliana
  peptide (1)..(977): Ceres Seq. ID no. 12654219
  misc_feature (337)..(546): Pfam Name: DEAD/DEAH box helicase Pfam Description: DEAD/DEAH box helicase
  misc_feature (322)..(789): Homolog of NCBI NO: 15241445 NR Description: DRH1 DEAD box protein - like; protein id:
  misc_feature (300)..(338): Homolog of NCBI NO: 15241445 NR Description: DRH1 DEAD box protein - like; protein id:
  misc_feature (257)..(755): Homolog of NCBI NO: 18395852 NR Description: RNA helicase, DRH1; protein id: At3g01540.1, by cDNA: gi_15215693, supported by cDNA: gi_16226724 [Arabidopsis >gi|15215694|gb|AAK91393.1| AT3g01540/F4P13_9 [Arabidopsis
  misc_feature (257)..(764): Homolog of NCBI NO: 17065030 NR Description: RNA helicase, DRH1 [Arabidopsis thaliana]
  misc_feature (257)..(764): Homolog of NCBI NO: 30678365 NR Description: DEAD box RNA helicase (DRH1) [Arabidopsis
  misc_feature (304)..(921): Homolog of NCBI NO: 34913856 NR Description: putative RNA helicase, DRH1 [Oryza sativa
  misc_feature (301)..(765): Homolog of NCBI NO: 15528719 NR Description: putative RNA helicase, DRH1 [Oryza sativa
  misc_feature (269)..(788): Homolog of NCBI NO: 6137207 NR Description: P72 DEAD box protein [Pisum sativum]
  misc_feature (304)..(793): Homolog of NCBI NO: 1169228 NR Description: RNA helicase-like protein DB10
  misc_feature (362)..(755): Homolog of NCBI NO: 23397305 NR Description: putative RNA helicase, DRH1 [Arabidopsis thaliana]
MMQQHPAQQMPQQSGQQFPQQQSQSMVPHPHGHPSVQTYQPTTQQQQQGMQNQHSQMPQQLSHQYAHSQQHYMGFRPHMQTQGLQNSHQTPQGGPHGQQFPSQQEYNSLAPKREGDEFHGGKKTGFSQPHLPNSERSPSQNTHFEANAASQKTNANLAMAQKCNGPQANAAVTQFQQPGANLIHQQLGPRAPNQMDQTMLHQKSHVSPFQSNNTYENNLQSRPGNDSYVNMRMEVPVRGAQPLHPAAMPKDIRISGGPPTNADPAMGQTGHGTYGHAGPAFPNKSLVRPHFVTSPDVPHLSPVEIYRKQHEVTTTGENIPAPYITFESSGLPPEILRELLSAGFPSPTPIQAQTWPIALQSRDIVAIAKTGSGKTLGYLIPAFILLRHCRNDSRNGPTVLILAPTRELATQIQDEALRFGRSSRISCTCLYGGAPKGPQLKELERGADIVVATPGRLNDILEMKMIDFQQVSLLVLDEADRMLDMGFEPQIRKIVNEIPPRRQTLMYTATWPKEVRKIASDLLVNPVQVNIGRVDELAANKAITQYVEVVPQMEKERRLEQILRSQERGSKVIIFCSTKRLCDHLARSVGRHFGAVVIHGDKTQGERDWVLNQFRSGKSCVLIATDVAARGLDIKDIRVVINYDFPTGVEDYVHRIGRTGRAGATGVAFTFFTEQDWKYAPDLIKVLEGANQQVPPQVRDIAMRGGGGGGPGYSQDRRGMVNRFDSGGGGTRWDSGGGFGGRGGGFSGREGGFGGREGGFGGREGGFGGRGGRFGMRDDSFGRGGNRGRGFTGPDAGHMNVGGRGGFGRFGNNNNMESRGFGRGSGRGFGRGVGRFDNRRGRSRSRSPDLVRPRRRSSSYSRSRSRSGSYSRSRSRSRSWSRSRSRSPRHSRDRGGHNRSRSYSRSPSPVYERRDRAPRVSGFDIKPPVESVVNLDMNAAAAIENVVPTSLSERQGNGVVESEVEAALVRPVVDEEP

SEQ ID NO: 80066 - protein, 976 aa, Arabidopsis thaliana
  peptide (1)..(976): Ceres Seq. ID no. 12654220
  misc_feature (336)..(545): Pfam Name: DEAD/DEAH box helicase Pfam Description: DEAD/DEAH box helicase
  misc_feature (321)..(788): Homolog of NCBI NO: 15241445 NR Description: DRH1 DEAD box protein - like; protein id:
  misc_feature (299)..(337): Homolog of NCBI NO: 15241445 NR Description: DRH1 DEAD box protein - like; protein id:
  misc_feature (256)..(754): Homolog of NCBI NO: 18395852 NR Description: RNA helicase, DRH1; protein id: At3g01540.1, by cDNA: gi_15215693, supported by cDNA: gi_16226724 [Arabidopsis >gi|15215694|gb|AAK91393.1| AT3g01540/F4P13_9 [Arabidopsis
  misc_feature (256)..(763): Homolog of NCBI NO: 17065030 NR Description: RNA helicase, DRH1 [Arabidopsis thaliana]
  misc_feature (256)..(763): Homolog of NCBI NO: 30678365 NR Description: DEAD box RNA helicase (DRH1) [Arabidopsis
  misc_feature (303)..(920): Homolog of NCBI NO: 34913856 NR Description: putative RNA helicase, DRH1 [Oryza sativa
  misc_feature (300)..(764): Homolog of NCBI NO: 15528719 NR Description: putative RNA helicase, DRH1 [Oryza sativa
  misc_feature (268)..(787): Homolog of NCBI NO: 6137207 NR Description: P72 DEAD box protein [Pisum sativum]
  misc_feature (303)..(792): Homolog of NCBI NO: 1169228 NR Description: RNA helicase-like protein DB10
  misc_feature (361)..(754): Homolog of NCBI NO: 23397305 NR Description: putative RNA helicase, DRH1 [Arabidopsis thaliana]
MQQHPAQQMPQQSGQQFPQQQSQSMVPHPHGHPSVQTYQPTTQQQQQGMQNQHSQMPQQLSHQYAHSQQHYMGFRPHMQTQGLQNSHQTPQGGPHGQQFPSQQEYNSLAPKREGDEFHGGKKTGFSQPHLPNSERSPSQNTHFEANAASQKTNANLAMAQKCNGPQANAAVTQFQQPGANLIHQQLGPRAPNQMDQTMLHQKSHVSPFQSNNTYENNLQSRPGNDSYVNMRMEVPVRGAQPLHPAAMPKDIRISGGPPTNADPAMGQTGHGTYGHAGPAFPNKSLVRPHFVTSPDVPHLSPVEIYRKQHEVTTTGENIPAPYITFESSGLPPEILRELLSAGFPSPTPIQAQTWPIALQSRDIVAIAKTGSGKTLGYLIPAFILLRHCRNDSRNGPTVLILAPTRELATQIQDEALRFGRSSRISCTCLYGGAPKGPQLKELERGADIVVATPGRLNDILEMKMIDFQQVSLLVLDEADRMLDMGFEPQIRKIVNEIPPRRQTLMYTATWPKEVRKIASDLLVNPVQVNIGRVDELAANKAITQYVEVVPQMEKERRLEQILRSQERGSKVIIFCSTKRLCDHLARSVGRHFGAVVIHGDKTQGERDWVLNQFRSGKSCVLIATDVAARGLDIKDIRVVINYDFPTGVEDYVHRIGRTGRAGATGVAFTFFTEQDWKYAPDLIKVLEGANQQVPPQVRDIAMRGGGGGGPGYSQDRRGMVNRFDSGGGGTRWDSGGGFGGRGGGFSGREGGFGGREGGFGGREGGFGGRGGRFGMRDDSFGRGGNRGRGFTGPDAGHMNVGGRGGFGRFGNNNNMESRGFGRGSGRGFGRGVGRFDNRRGRSRSRSPDLVRPRRRSSSYSRSRSRSGSYSRSRSRSRSWSRSRSRSPRHSRDRGGHNRSRSYSRSPSPVYERRDRAPRVSGFDIKPPVESVVNLDMNAAAAIENVVPTSLSERQGNGVVESEVEAALVRPVVDEEP

SEQ ID NO: 80067 - DNA, 1392 bp, Arabidopsis thaliana
  misc_feature (1)..(1392): Ceres Seq. ID no. 12654221
  misc_feature: MA Experiment ID: 20000182 Result: Up-regulated in Transcription
  misc_feature: MA Experiment 20000182 PARAMETER Experiment Name: At_2mM_SA_P Parameter: Age (day) Value: 14
  misc_feature: MA Experiment 20000182 PARAMETER Experiment Name: At_2mM_SA_P Parameter: Organism Value: A. thaliana
  misc_feature: MA Experiment 20000182 PARAMETER Experiment Name: At_2mM_SA_P Parameter: Plant Line Value: WS
  misc_feature: MA Experiment 20000182 PARAMETER Experiment Name: At_2mM_SA_P Parameter: Timepoint (hr) Value: 6
  misc_feature: MA Experiment 20000182 PARAMETER Experiment Name: At_2mM_SA_P Parameter: Tissue Value: Aerial
  misc_feature: MA Experiment 20000182 PARAMETER Experiment Name: At_2mM_SA_P Parameter: Treatment Value: 2mM SA vs. No Treatment
  misc_feature: MA Experiment ID: 20000286 Result: Up-regulated in Transcription
  misc_feature: MA Experiment 20000286 PARAMETER Experiment Name: At_Open_Flower_P Parameter: Age (day) Value: 21
  misc_feature: MA Experiment 20000286 PARAMETER Experiment Name: At_Open_Flower_P Parameter: Plant Line Value: WS
  misc_feature: MA Experiment 20000286 PARAMETER Experiment Name: At_Open_Flower_P Parameter: Tissue Value: Half Open vs. Whole Plant
attcaaaactcatcctatctctatctacacataactccaaaaaacaaacaaattttctctctctatctctcttcgcaaaacaacatagaaaaaaagtagaaagtctcaatctttttgctgaacaatcttgttgtggtctcttctgtgtatatcaatggatgaaaaaggaagaagcttgaagaacaacaacatggaagacgagatggacctaaagagaggtccgtggactgctgaagaagattttaagctcatgaattacattgctactaatggagaaggtcgctggaactctctttctcgttgcgccggcctccaacgcaccggtaaaagctgtagactaaggtggttaaactatctccgccctgacgtccgccgtggaaacattacacttgaagaacaactcttgatcctcgaacttcattcccgttggggaaatagatggtcaaaaatcgcacaatatttaccgggaagaacggacaacgagatcaagaactactggaggacgcgggtgcaaaagcatgcgaaacagttgaaatgtgatgtgaatagccaacaattcaaagacacaatgaagtacttgtggatgcctcgactagtcgagaggattcagtcagcctcggcctcatccgcagcagcagccaccaccacaaccaccaccaccacaggatcagccggcacgtcatcttgcatcacaacctctaacaatcaattcatgaattacgactacaacaacaacaacatgggacaacagtttggtgtaatgagcaacaatgattatatcacgcctgaaaattccagcgtggcagtgtctccggcgtcagacttaacggagtactacagcgctccaaaccctaacccggaatactattcgggtcaaatggggaatagttattatccagatcagaatttagtgagttcacaattattaccggataattatttcgactatagtggattattagacgaagatctaacggctatgcaagagcagagtaacctcagctggtttgaaaacattaatggtgctgcttcttcttcagacagtttatggaacattggagaaactgatgaagaattctggttcttacagcagcaacaacagttcaacaataatggtagcttctgaagttagaaaaaaaaaatagaaatcgttttaagttaaattatacactatagtatacgtgtgaaaggaatttgttgtaagggaataattaaaaacaaagaattgttcataggatatatgatcaggttttttataccaagcttgatcatatatcatggcgttttaacaaagcgctaaacttgattggttttgttttttgggggggattgcaatgatattttgtggataattgataaacttggatgaaataatttatgatttaatgtttg

SEQ ID NO: 80068 - protein, 323 aa, Arabidopsis thaliana
  peptide (1)..(323): Ceres Seq. ID no. 12654222
  misc_feature (21)..(68): Pfam Name: Myb-like DNA-binding domain Pfam Description: Myb-like DNA-binding domain
  misc_feature (1)..(323): Homolog of NCBI NO: 15230731 NR Description: myb family transcription factor (MYB108); protein At3g06490.1 [Arabidopsis thaliana] putative transcription factor MYB108 [Arabidopsis thaliana]
  misc_feature (1)..(226): Homolog of NCBI NO: 15240518 NR Description: myb family transcription factor; protein id:
  misc_feature (4)..(313): Homolog of NCBI NO: 7446185 NR Description: dehydration-induced myb-related protein Cpm7 - plantagineum >gi|1002800|gb|AAB58314.1| Cpm7 [Craterostigma
  misc_feature (11)..(313): Homolog of NCBI NO: 7446184 NR Description: myb-related protein Cpm5 - Craterostigma
  misc_feature (11)..(313): Homolog of NCBI NO: 7446183 NR Description: ABA-induced myb-related protein Cpm10 -
  misc_feature (3)..(240): Homolog of NCBI NO: 23476307 NR Description: myb-like transcription factor 5 [Gossypioides
  misc_feature (18)..(164): Homolog of NCBI NO: 19073328 NR Description: typical P-type R2R3 Myb protein [Sorghum bicolor]
  misc_feature (3)..(243): Homolog of NCBI NO: 14249017 NR Description: myb-like transcription factor Myb 5 [Gossypium
  misc_feature (3)..(243): Homolog of NCBI NO: 23476305 NR Description: myb-like transcription factor 5 [Gossypium
  misc_feature (3)..(243): Homolog of NCBI NO: 14249019 NR Description: recombinant myb-like transcription factor Myb 5
MDEKGRSLKNNNMEDEMDLKRGPWTAEEDFKLMNYIATNGEGRWNSLSRCAGLQRTGKSCRLRWLNYLRPDVRRGNITLEEQLLILELHSRWGNRWSKIAQYLPGRTDNEIKNYWRTRVQKHAKQLKCDVNSQQFKDTMKYLWMPRLVERIQSASASSAAAATTTTTTTTGSAGTSSCITTSNNQFMNYDYNNNNMGQQFGVMSNNDYITPENSSVAVSPASDLTEYYSAPNPNPEYYSGQMGNSYYPDQNLVSSQLLPDNYFDYSGLLDEDLTAMQEQSNLSWFENINGAASSSDSLWNIGETDEEFWFLQQQQQFNNNGSF

SEQ ID NO: 80069 - protein, 311 aa, Arabidopsis thaliana
  peptide (1)..(311): Ceres Seq. ID no. 12654223
  misc_feature (9)..(56): Pfam Name: Myb-like DNA-binding domain Pfam Description: Myb-like DNA-binding domain
  misc_feature (1)..(311): Homolog of NCBI NO: 15230731 NR Description: myb family transcription factor (MYB108); protein At3g06490.1 [Arabidopsis thaliana] putative transcription factor MYB108 [Arabidopsis thaliana]
  misc_feature (1)..(214): Homolog of NCBI NO: 15240518 NR Description: myb family transcription factor; protein id:
  misc_feature (1)..(301): Homolog of NCBI NO: 7446185 NR Description: dehydration-induced myb-related protein Cpm7 - plantagineum >gi|1002800|gb|AAB58314.1| Cpm7 [Craterostigma
  misc_feature (1)..(301): Homolog of NCBI NO: 7446184 NR Description: myb-related protein Cpm5 - Craterostigma
  misc_feature (1)..(301): Homolog of NCBI NO: 7446183 NR Description: ABA-induced myb-related protein Cpm10 -
  misc_feature (1)..(228): Homolog of NCBI NO: 23476307 NR Description: myb-like transcription factor 5 [Gossypioides
  misc_feature (6)..(152): Homolog of NCBI NO: 19073328 NR Description: typical P-type R2R3 Myb protein [Sorghum bicolor]
  misc_feature (1)..(231): Homolog of NCBI NO: 14249017 NR Description: myb-like transcription factor Myb 5 [Gossypium
  misc_feature (1)..(231): Homolog of NCBI NO: 23476305 NR Description: myb-like transcription factor 5 [Gossypium
  misc_feature (1)..(231): Homolog of NCBI NO: 14249019 NR Description: recombinant myb-like transcription factor Myb 5
MEDEMDLKRGPWTAEEDFKLMNYIATNGEGRWNSLSRCAGLQRTGKSCRLRWLNYLRPDVRRGNITLEEQLLILELHSRWGNRWSKIAQYLPGRTDNEIKNYWRTRVQKHAKQLKCDVNSQQFKDTMKYLWMPRLVERIQSASASSAAAATTTTTTTTGSAGTSSCITTSNNQFMNYDYNNNNMGQQFGVMSNNDYITPENSSVAVSPASDLTEYYSAPNPNPEYYSGQMGNSYYPDQNLVSSQLLPDNYFDYSGLLDEDLTAMQEQSNLSWFENINGAASSSDSLWNIGETDEEFWFLQQQQQFNNNGSF

SEQ ID NO: 80070 - protein, 307 aa, Arabidopsis thaliana
  peptide (1)..(307): Ceres Seq. ID no. 12654224
  misc_feature (5)..(52): Pfam Name: Myb-like DNA-binding domain Pfam Description: Myb-like DNA-binding domain
  misc_feature (1)..(307): Homolog of NCBI NO: 15230731 NR Description: myb family transcription factor (MYB108); protein At3g06490.1 [Arabidopsis thaliana] putative transcription factor MYB108 [Arabidopsis thaliana]
  misc_feature (1)..(210): Homolog of NCBI NO: 15240518 NR Description: myb family transcription factor; protein id:
  misc_feature (1)..(297): Homolog of NCBI NO: 7446185 NR Description: dehydration-induced myb-related protein Cpm7 - plantagineum >gi|1002800|gb|AAB58314.1| Cpm7 [Craterostigma
  misc_feature (1)..(297): Homolog of NCBI NO: 7446184 NR Description: myb-related protein Cpm5 - Craterostigma
  misc_feature (1)..(297): Homolog of NCBI NO: 7446183 NR Description: ABA-induced myb-related protein Cpm10 -
  misc_feature (1)..(224): Homolog of NCBI NO: 23476307 NR Description: myb-like transcription factor 5 [Gossypioides
  misc_feature (2)..(148): Homolog of NCBI NO: 19073328 NR Description: typical P-type R2R3 Myb protein [Sorghum bicolor]
  misc_feature (1)..(227): Homolog of NCBI NO: 14249017 NR Description: myb-like transcription factor Myb 5 [Gossypium
  misc_feature (1)..(227): Homolog of NCBI NO: 23476305 NR Description: myb-like transcription factor 5 [Gossypium
  misc_feature (1)..(227): Homolog of NCBI NO: 14249019 NR Description: recombinant myb-like transcription factor Myb 5
MDLKRGPWTAEEDFKLMNYIATNGEGRWNSLSRCAGLQRTGKSCRLRWLNYLRPDVRRGNITLEEQLLILELHSRWGNRWSKIAQYLPGRTDNEIKNYWRTRVQKHAKQLKCDVNSQQFKDTMKYLWMPRLVERIQSASASSAAAATTTTTTTTGSAGTSSCITTSNNQFMNYDYNNNNMGQQFGVMSNNDYITPENSSVAVSPASDLTEYYSAPNPNPEYYSGQMGNSYYPDQNLVSSQLLPDNYFDYSGLLDEDLTAMQEQSNLSWFENINGAASSSDSLWNIGETDEEFWFLQQQQQFNNNGSF

SEQ ID NO: 80071 - DNA, 2525 bp, Arabidopsis thaliana
  misc_feature (1)..(2525): Ceres Seq. ID no. 12654306
  misc_feature: MA Experiment ID: 20000306 Result: Up-regulated in Transcription
  misc_feature: MA Experiment 20000306 PARAMETER Experiment Name: At_Germinating_Seeds_Sub_P Parameter: Age (hr) Value: 6 vs. 0
  misc_feature: MA Experiment 20000306 PARAMETER Experiment Name: At_Germinating_Seeds_Sub_P Parameter: Organism Value: A. thaliana
  misc_feature: MA Experiment 20000306 PARAMETER Experiment Name: At_Germinating_Seeds_Sub_P Parameter: Plant Line Value: WS
  misc_feature: MA Experiment 20000306 PARAMETER Experiment Name: At_Germinating_Seeds_Sub_P Parameter: Tissue Value: Germinating Seeds
  misc_feature: MA Experiment ID: 20000307 Result: Up-regulated in Transcription
  misc_feature: MA Experiment 20000307 PARAMETER Experiment Name: At_Germinating_Seeds_Sub_P Parameter: Age (hr) Value: 24 vs. 0
  misc_feature: MA Experiment 20000307 PARAMETER Experiment Name: At_Germinating_Seeds_Sub_P Parameter: Organism Value: A. thaliana
  misc_feature: MA Experiment 20000307 PARAMETER Experiment Name: At_Germinating_Seeds_Sub_P Parameter: Plant Line Value: WS
  misc_feature: MA Experiment 20000307 PARAMETER Experiment Name: At_Germinating_Seeds_Sub_P Parameter: Tissue Value: Germinating Seeds
ctcccaaattctcagatctaatcagatcgacgattcctgatttcatcagcttcgagagagatccttcttttgttcttcgttgaatgtctcgctcccagaacgaggagtttcaacaatggtggaacaagcaacgagataggaacaatcacgacgttctttacgccggcgacgatgaagcattcctcaccgttgaaatccgtactccggccaccgttgaccctgataaggatcggatccggactcgtaccgttcgtcagctctctcgtctctacctcctcaagttcaagcaactcgcatcttccttcctctggatcggtaactctttcctttaccttgttcgcaccgccaatcgccgcattgccaacgataatcctccatccgtgtcttcctccgctagattgtaccgtttaatcaagggatttctcgttgttgttgtgcttcttctctgtttcgagcttgccgcttatttcaagggatggcacttcacacctccctctgttgcctccgccgaggtcgctgtggaggtggtttacgcttggtggttggagatcagggcgtcttaccttgcgccaccgcttcagagcttgaccaatgtatgtatagttctcttcttgattcaatcggttgaccgtctggtgcttgtgcttggatgcttctggatcaagctccgccgtattaagcctgttgcatctatggagtacccgactaaattggttggagagggagttagattggaagattatccaatggtgattgttcagattcctatgtgcaatgaaaaggaggtttaccaacaatctataggagctgtgtgtatgcttgactggccaagggaaagaatgctagttcaggttcttgatgactccagtgaattggatgttcagcagcttataaaagcggaagtacaaaaatggcaacaaaggggtgttcggatagtgtatagacatcgtctcatacgtactggttacaaggctggaaaccttaaagctgcaatgaactgtgaatatgtcaaagactacgagtttgtcgccatatttgatgcagatttccagccacctgcggatttcttgaagaaaactgtgcctcattttaagggtaatgaagaattagccttggtccaaacacggtgggcttttgtgaacaaagacgaaaacttgcttacaagactccagaacataaatttgtctttccactttgaagttgaacagcaggtcaatggtgtttttattaacttctttggctttaatggaactgctggtgtttggagaatcaaagccctcgaggattgcgggggatggttggagcgaacaactgttgaggacatggatattgccgttcgtgcgcatctttgtggatggaagttcatttatctgaatgatgttaagtgtctctgtgaacttccggagtcctatgaggcatataaaaaacagcaataccgctggcattcgggtccaatgcaactgttccgtttgtgcttctttgacattcttcggtcaaaggtgagtgctgccaagaaagcaaatatgatatttctcttcttcttgctacggaagcttatcttgccattctactcattcacgctcttctgcgtcattcttccattaacgatgttcttcccagaggctaacttaccatcttgggttgtttgctatatccctgggatcatgtccatcttaaacatcatcccagccccaagatccttccctttcatagttccgtatctccttttcgaaaacaccatgtcagttaccaaatttggagccatgatctctggtttgttcaagtttgatagttcttacgagtgggtagtcaccaaaaagctagggagatcctctgaggcggatctggttgcatacgcagagtccggctctttggttgagtccacaaccatccaacgatcatcctctgattcaggtctgaccgagcttagcaaactaggagcagcaaagaaagctggcaaaaccaaaagaaaccgtctgtacagaacggaaatcgcactcgcgtttatcctcttggcagcctcggtgagaagcttgttgtctgcgcaagggatccatttctacttcctcttgttccaaggaatcacgttcgttattgtcggtctagatttgatcggggaacaggtcagttagtttatataaccctttttctcagtttaaaactacattgaaccataccaccagaagaacgaacaagacccaaagatcaagtcaggaaggaacgaaccaactcactcgcaggtcttttcgttacagatagatacataaaaacaattcatttaaagtttctgtcttgggaacatgattttatactctacttgggttggtttagattcttcctttttttacggatagtattagagaatggcagaaacaaccgtcggagaggattccaaagacttgcctacctgtctttgttgtggtattaagccaaaccttggtttttttgttgtgcaaaaattgttgttaggttgttggttttttgtttcggatgatgtggcagaaacatattttaagctttgctct

SEQ ID NO: 80072 - protein, 682 aa, Arabidopsis thaliana
  peptide (1)..(682): Ceres Seq. ID no. 12654307
  misc_feature (224)..(402): Pfam Name: Glycosyl transferase Pfam Description: Glycosyl transferase
  misc_feature (8)..(682): Homolog of NCBI NO: 15236004 NR Description: putative protein; protein id: At4g31590.1
  misc_feature (8)..(682): Homolog of NCBI NO: 15224178 NR Description: putative glucosyltransferase; protein id: [Arabidopsis thaliana] >gi|25412230|pir||A84639 probable
  misc_feature (133)..(618): Homolog of NCBI NO: 34419220 NR Description: TPA: cellulose synthase-like C3 [Oryza sativa
  misc_feature (1)..(140): Homolog of NCBI NO: 34419220 NR Description: TPA: cellulose synthase-like C3 [Oryza sativa
  misc_feature (579)..(682): Homolog of NCBI NO: 34419220 NR Description: TPA: cellulose synthase-like C3 [Oryza sativa
  misc_feature (106)..(682): Homolog of NCBI NO: 7635490 NR Description: putative glucosyltransferase [Cicer arietinum]
  misc_feature (21)..(681): Homolog of NCBI NO: 34419218 NR Description: TPA: cellulose synthase-like C2 [Oryza sativa
  misc_feature (29)..(682): Homolog of NCBI NO: 18405677 NR Description: expressed protein; protein id: At3g28180.1, by cDNA: gi_15810494, supported by cDNA: gi_20259272 [Arabidopsis
  misc_feature (103)..(681): Homolog of NCBI NO: 15235900 NR Description: putative glucosyltransferase; protein id: supported by cDNA: 3126. [Arabidopsis thaliana]
  misc_feature (91)..(681): Homolog of NCBI NO: 16974749 NR Description: CSLC9 [Oryza sativa]
MSRSQNEEFQQWWNKQRDRNNHDVLYAGDDEAFLTVEIRTPATVDPDKDRIRTRTVRQLSRLYLLKFKQLASSFLWIGNSFLYLVRTANRRIANDNPPSVSSSARLYRLIKGFLVVVVLLLCFELAAYFKGWHFTPPSVASAEVAVEVVYAWWLEIRASYLAPPLQSLTNVCIVLFLIQSVDRLVLVLGCFWIKLRRIKPVASMEYPTKLVGEGVRLEDYPMVIVQIPMCNEKEVYQQSIGAVCMLDWPRERMLVQVLDDSSELDVQQLIKAEVQKWQQRGVRIVYRHRLIRTGYKAGNLKAAMNCEYVKDYEFVAIFDADFQPPADFLKKTVPHFKGNEELALVQTRWAFVNKDENLLTRLQNINLSFHFEVEQQVNGVFINFFGFNGTAGVWRIKALEDCGGWLERTTVEDMDIAVRAHLCGWKFIYLNDVKCLCELPESYEAYKKQQYRWHSGPMQLFRLCFFDILRSKVSAAKKANMIFLFFLLRKLILPFYSFTLFCVILPLTMFFPEANLPSWVVCYIPGIMSILNIIPAPRSFPFIVPYLLFENTMSVTKFGAMISGLFKFDSSYEWVVTKKLGRSSEADLVAYAESGSLVESTTIQRSSSDSGLTELSKLGAAKKAGKTKRNRLYRTEIALAFILLAASVRSLLSAQGIHFYFLLFQGITFVIVGLDLIGEQVS

SEQ ID NO: 80073 - protein, 479 aa, Arabidopsis thaliana
  peptide (1)..(479): Ceres Seq. ID no. 12654308
  misc_feature (21)..(199): Pfam Name: Glycosyl transferase Pfam Description: Glycosyl transferase
  misc_feature (1)..(479): Homolog of NCBI NO: 15236004 NR Description: putative protein; protein id: At4g31590.1
  misc_feature (1)..(479): Homolog of NCBI NO: 15224178 NR Description: putative glucosyltransferase; protein id: [Arabidopsis thaliana] >gi|25412230|pir||A84639 probable
  misc_feature (1)..(415): Homolog of NCBI NO: 34419220 NR Description: TPA: cellulose synthase-like C3 [Oryza sativa
  misc_feature (376)..(479): Homolog of NCBI NO: 34419220 NR Description: TPA: cellulose synthase-like C3 [Oryza sativa
  misc_feature (1)..(479): Homolog of NCBI NO: 7635490 NR Description: putative glucosyltransferase [Cicer arietinum]
  misc_feature (1)..(478): Homolog of NCBI NO: 34419218 NR Description: TPA: cellulose synthase-like C2 [Oryza sativa
  misc_feature (1)..(479): Homolog of NCBI NO: 18405677 NR Description: expressed protein; protein id: At3g28180.1, by cDNA: gi_15810494, supported by cDNA: gi_20259272 [Arabidopsis
  misc_feature (1)..(478): Homolog of NCBI NO: 15235900 NR Description: putative glucosyltransferase; protein id: supported by cDNA: 3126. [Arabidopsis thaliana]
  misc_feature (1)..(478): Homolog of NCBI NO: 16974749 NR Description: CSLC9 [Oryza sativa]
  misc_feature (1)..(478): Homolog of NCBI NO: 17385963 NR Description: CSLC9 [Oryza sativa]
MEYPTKLVGEGVRLEDYPMVIVQIPMCNEKEVYQQSIGAVCMLDWPRERMLVQVLDDSSELDVQQLIKAEVQKWQQRGVRIVYRHRLIRTGYKAGNLKAAMNCEYVKDYEFVAIFDADFQPPADFLKKTVPHFKGNEELALVQTRWAFVNKDENLLTRLQNINLSFHFEVEQQVNGVFINFFGFNGTAGVWRIKALEDCGGWLERTTVEDMDIAVRAHLCGWKFIYLNDVKCLCELPESYEAYKKQQYRWHSGPMQLFRLCFFDILRSKVSAAKKANMIFLFFLLRKLILPFYSFTLFCVILPLTMFFPEANLPSWVVCYIPGIMSILNIIPAPRSFPFIVPYLLFENTMSVTKFGAMISGLFKFDSSYEWVVTKKLGRSSEADLVAYAESGSLVESTTIQRSSSDSGLTELSKLGAAKKAGKTKRNRLYRTEIALAFILLAASVRSLLSAQGIHFYFLLFQGITFVIVGLDLIGEQVS

SEQ ID NO: 80074 - protein, 461 aa, Arabidopsis thaliana
  peptide (1)..(461): Ceres Seq. ID no. 12654309
  misc_feature (3)..(181): Pfam Name: Glycosyl transferase Pfam Description: Glycosyl transferase
  misc_feature (1)..(461): Homolog of NCBI NO: 15236004 NR Description: putative protein; protein id: At4g31590.1
  misc_feature (1)..(461): Homolog of NCBI NO: 15224178 NR Description: putative glucosyltransferase; protein id: [Arabidopsis thaliana] >gi|25412230|pir||A84639 probable
  misc_feature (1)..(397): Homolog of NCBI NO: 34419220 NR Description: TPA: cellulose synthase-like C3 [Oryza sativa
  misc_feature (358)..(461): Homolog of NCBI NO: 34419220 NR Description: TPA: cellulose synthase-like C3 [Oryza sativa
  misc_feature (1)..(461): Homolog of NCBI NO: 7635490 NR Description: putative glucosyltransferase [Cicer arietinum]
  misc_feature (1)..(460): Homolog of NCBI NO: 34419218 NR Description: TPA: cellulose synthase-like C2 [Oryza sativa
  misc_feature (1)..(461): Homolog of NCBI NO: 18405677 NR Description: expressed protein; protein id: At3g28180.1, by cDNA: gi_15810494, supported by cDNA: gi_20259272 [Arabidopsis
  misc_feature (1)..(460): Homolog of NCBI NO: 15235900 NR Description: putative glucosyltransferase; protein id: supported by cDNA: 3126. [Arabidopsis thaliana]
  misc_feature (1)..(460): Homolog of NCBI NO: 16974749 NR Description: CSLC9 [Oryza sativa]
  misc_feature (1)..(460): Homolog of NCBI NO: 17385963 NR Description: CSLC9 [Oryza sativa]
MVIVQIPMCNEKEVYQQSIGAVCMLDWPRERMLVQVLDDSSELDVQQLIKAEVQKWQQRGVRIVYRHRLIRTGYKAGNLKAAMNCEYVKDYEFVAIFDADFQPPADFLKKTVPHFKGNEELALVQTRWAFVNKDENLLTRLQNINLSFHFEVEQQVNGVFINFFGFNGTAGVWRIKALEDCGGWLERTTVEDMDIAVRAHLCGWKFIYLNDVKCLCELPESYEAYKKQQYRWHSGPMQLFRLCFFDILRSKVSAAKKANMIFLFFLLRKLILPFYSFTLFCVILPLTMFFPEANLPSWVVCYIPGIMSILNIIPAPRSFPFIVPYLLFENTMSVTKFGAMISGLFKFDSSYEWVVTKKLGRSSEADLVAYAESGSLVESTTIQRSSSDSGLTELSKLGAAKKAGKTKRNRLYRTEIALAFILLAASVRSLLSAQGIHFYFLLFQGITFVIVGLDLIGEQVS

SEQ ID NO: 80075 - DNA, 645 bp, Arabidopsis thaliana
  misc_feature (1)..(645): Ceres Seq. ID no. 12654336
  misc_feature: MA Experiment ID: 20000264 Result: Down-regulated in Transcription
  misc_feature: MA Experiment 20000264 PARAMETER Experiment Name: At_Open_Flower_P Parameter: Age (day) Value: 21
  misc_feature: MA Experiment 20000264 PARAMETER Experiment Name: At_Open_Flower_P Parameter: Plant Line Value: WS
  misc_feature: MA Experiment 20000264 PARAMETER Experiment Name: At_Open_Flower_P Parameter: Tissue Value: Open Flower vs. Whole Plant
  misc_feature: MA Experiment ID: 20000439 Result: Down-regulated in Transcription
  misc_feature: MA Experiment 20000439 PARAMETER Experiment Name: At_Roots__P Parameter: Age (day) Value: 14 vs. 21
  misc_feature: MA Experiment 20000439 PARAMETER Experiment Name: At_Roots__P Parameter: Organism Value: A. thaliana
  misc_feature: MA Experiment 20000439 PARAMETER Experiment Name: At_Roots__P Parameter: Tissue Value: Roots vs. Whole Plant
  misc_feature: MA Experiment ID: 20000794 Result: Down-regulated in Transcription
  misc_feature: MA Experiment 20000794 PARAMETER Experiment Name: At_Petals_P Parameter: Age (day) Value: 23-25 days
  misc_feature: MA Experiment 20000794 PARAMETER Experiment Name: At_Petals_P Parameter: Plant Line Value: WS
  misc_feature: MA Experiment 20000794 PARAMETER Experiment Name: At_Petals_P Parameter: Tissue Value: Petals vs. Whole plant
atgtttgtgtgttgtgttgtggcagtggaagggaactctttacccgaagaagatgtagagatgatggagaattcagatgtaatgaagacagtcacagatgaagcttctccaatggtggagccgttcattggtatggagtttgaatcagaagaggctgcaaagtctttctatgacaattacgctacatgcatgggtttcgttatgcgagtggatgctttcaggaggtcaatgcgagatgggactgtggtgtggcgcagactcgtgtgtaataaagaaggatttcgtaggtcgagacctcggagaagcgagagtagaaagcctcgggctataacaagagaagggtgtaaagctctgattgttgtgaaaagagagaaatccggaacatggcttgttactaaatttgagaaagagcataatcatcctctcttgcctctctcccctaatgacgagaaagacgcaaagattagggagctgagtgcagagctgagccgagagagaaggcgttgtactgctttgcaacagcagcttgatatggtccttaaggagatggaagaacattccaaccatctcaccattaacatcaatagtgttatccaaagtgttagagacattgagtccaatactttcaccaaacaacaaacataa

SEQ ID NO: 80076 - protein, 214 aa, Arabidopsis thaliana
  peptide (1)..(214): Ceres Seq. ID no. 12654337
  misc_feature (55)..(208): Pfam Name: FAR1 family Pfam Description: FAR1 family
  misc_feature (1)..(214): Homolog of NCBI NO: 6041845 NR Description: hypothetical protein [Arabidopsis thaliana]
  misc_feature (9)..(214): Homolog of NCBI NO: 30680320 NR Description: expressed protein [Arabidopsis thaliana] unknown protein [Arabidopsis thaliana]
  misc_feature (14)..(205): Homolog of NCBI NO: 30689328 NR Description: expressed protein [Arabidopsis thaliana] unknown protein [Arabidopsis thaliana]
  misc_feature (11)..(205): Homolog of NCBI NO: 11358055 NR Description: hypothetical protein T16L24.20 - Arabidopsis >gi|6996283|emb|CAB75444.1| putative protein [Arabidopsis
  misc_feature (11)..(205): Homolog of NCBI NO: 18411179 NR Description: putative protein; protein id: At3g59470.1, by cDNA: gi_16604381 [Arabidopsis thaliana] AT3g59470/T16L24_20 [Arabidopsis thaliana]
  misc_feature (39)..(144): Homolog of NCBI NO: 15233732 NR Description: hypothetical protein; protein id: At4g38180.1
  misc_feature (136)..(203): Homolog of NCBI NO: 15233732 NR Description: hypothetical protein; protein id: At4g38180.1
  misc_feature (56)..(205): Homolog of NCBI NO: 25370598 NR Description: hypothetical protein At2g43280 [imported] - thaliana >gi|2289005|gb|AAB64334.1| hypothetical protein thaliana] >gi|20197151|gb|AAM14941.1| hypothetical protein
  misc_feature (40)..(211): Homolog of NCBI NO: 15235502 NR Description: putative protein; protein id: At4g12850.1
  misc_feature (40)..(140): Homolog of NCBI NO: 28301931 NR Description: putative transposase [Oryza sativa (japonica
MFVCCVVAVEGNSLPEEDVEMMENSDVMKTVTDEASPMVEPFIGMEFESEEAAKSFYDNYATCMGFVMRVDAFRRSMRDGTVVWRRLVCNKEGFRRSRPRRSESRKPRAITREGCKALIVVKREKSGTWLVTKFEKEHNHPLLPLSPNDEKDAKIRELSAELSRERRRCTALQQQLDMVLKEMEEHSNHLTININSVIQSVRDIESNTFTKQQT

SEQ ID NO: 80077 - protein, 194 aa, Arabidopsis thaliana
  peptide (1)..(194): Ceres Seq. ID no. 12654338
  misc_feature (35)..(188): Pfam Name: FAR1 family Pfam Description: FAR1 family
  misc_feature (1)..(194): Homolog of NCBI NO: 6041845 NR Description: hypothetical protein [Arabidopsis thaliana]
  misc_feature (1)..(194): Homolog of NCBI NO: 30680320 NR Description: expressed protein [Arabidopsis thaliana] unknown protein [Arabidopsis thaliana]
  misc_feature (1)..(185): Homolog of NCBI NO: 30689328 NR Description: expressed protein [Arabidopsis thaliana] unknown protein [Arabidopsis thaliana]
  misc_feature (1)..(185): Homolog of NCBI NO: 11358055 NR Description: hypothetical protein T16L24.20 - Arabidopsis >gi|6996283|emb|CAB75444.1| putative protein [Arabidopsis
  misc_feature (1)..(185): Homolog of NCBI NO: 18411179 NR Description: putative protein; protein id: At3g59470.1, by cDNA: gi_16604381 [Arabidopsis thaliana] AT3g59470/T16L24_20 [Arabidopsis thaliana]
  misc_feature (19)..(124): Homolog of NCBI NO: 15233732 NR Description: hypothetical protein; protein id: At4g38180.1
  misc_feature (116)..(183): Homolog of NCBI NO: 15233732 NR Description: hypothetical protein; protein id: At4g38180.1
  misc_feature (36)..(185): Homolog of NCBI NO: 25370598 NR Description: hypothetical protein At2g43280 [imported] - thaliana >gi|2289005|gb|AAB64334.1| hypothetical protein thaliana] >gi|20197151|gb|AAM14941.1| hypothetical protein
  misc_feature (20)..(191): Homolog of NCBI NO: 15235502 NR Description: putative protein; protein id: At4g12850.1
  misc_feature (20)..(120): Homolog of NCBI NO: 28301931 NR Description: putative transposase [Oryza sativa (japonica
MMENSDVMKTVTDEASPMVEPFIGMEFESEEAAKSFYDNYATCMGFVMRVDAFRRSMRDGTVVWRRLVCNKEGFRRSRPRRSESRKPRAITREGCKALIVVKREKSGTWLVTKFEKEHNHPLLPLSPNDEKDAKIRELSAELSRERRRCTALQQQLDMVLKEMEEHSNHLTININSVIQSVRDIESNTFTKQQT

SEQ ID NO: 80078 - protein, 193 aa, Arabidopsis thaliana
  peptide (1)..(193): Ceres Seq. ID no. 12654339
  misc_feature (34)..(187): Pfam Name: FAR1 family Pfam Description: FAR1 family
  misc_feature (1)..(193): Homolog of NCBI NO: 6041845 NR Description: hypothetical protein [Arabidopsis thaliana]
  misc_feature (1)..(193): Homolog of NCBI NO: 30680320 NR Description: expressed protein [Arabidopsis thaliana] unknown protein [Arabidopsis thaliana]
  misc_feature (1)..(184): Homolog of NCBI NO: 30689328 NR Description: expressed protein [Arabidopsis thaliana] unknown protein [Arabidopsis thaliana]
  misc_feature (1)..(184): Homolog of NCBI NO: 11358055 NR Description: hypothetical protein T16L24.20 - Arabidopsis >gi|6996283|emb|CAB75444.1| putative protein [Arabidopsis
  misc_feature (1)..(184): Homolog of NCBI NO: 18411179 NR Description: putative protein; protein id: At3g59470.1, by cDNA: gi_16604381 [Arabidopsis thaliana] AT3g59470/T16L24_20 [Arabidopsis thaliana]
  misc_feature (18)..(123): Homolog of NCBI NO: 15233732 NR Description: hypothetical protein; protein id: At4g38180.1
  misc_feature (115)..(182): Homolog of NCBI NO: 15233732 NR Description: hypothetical protein; protein id: At4g38180.1
  misc_feature (35)..(184): Homolog of NCBI NO: 25370598 NR Description: hypothetical protein At2g43280 [imported] - thaliana >gi|2289005|gb|AAB64334.1| hypothetical protein thaliana] >gi|20197151|gb|AAM14941.1| hypothetical protein
  misc_feature (19)..(190): Homolog of NCBI NO: 15235502 NR Description: putative protein; protein id: At4g12850.1
  misc_feature (19)..(119): Homolog of NCBI NO: 28301931 NR Description: putative transposase [Oryza sativa (japonica
MENSDVMKTVTDEASPMVEPFIGMEFESEEAAKSFYDNYATCMGFVMRVDAFRRSMRDGTVVWRRLVCNKEGFRRSRPRRSESRKPRAITREGCKALIVVKREKSGTWLVTKFEKEHNHPLLPLSPNDEKDAKIRELSAELSRERRRCTALQQQLDMVLKEMEEHSNHLTININSVIQSVRDIESNTFTKQQT

SEQ ID NO: 80079 - DNA, 2664 bp, Arabidopsis thaliana
  misc_feature (1)..(2664): Ceres Seq. ID no. 12654350
  misc_feature: MA Experiment ID: 20000171 Result: Up-regulated in Transcription
  misc_feature: MA Experiment 20000171 PARAMETER Experiment Name: At_42deg_Heat_P Parameter: Age (day) Value: 14
  misc_feature: MA Experiment 20000171 PARAMETER Experiment Name: At_42deg_Heat_P Parameter: Organism Value: A. thaliana
  misc_feature: MA Experiment 20000171 PARAMETER Experiment Name: At_42deg_Heat_P Parameter: Plant Line Value: WS
  misc_feature: MA Experiment 20000171 PARAMETER Experiment Name: At_42deg_Heat_P Parameter: Temperature (deg C) Value: 42 vs. 22
  misc_feature: MA Experiment 20000171 PARAMETER Experiment Name: At_42deg_Heat_P Parameter: Timepoint (hr) Value: 1
  misc_feature: MA Experiment 20000171 PARAMETER Experiment Name: At_42deg_Heat_P Parameter: Tissue Value: Aerial
atggagagaacaagatcgaaaccggttcggaatctacccgagacaatccattctttgctcggtttgaaatctcatatgacttctgattgggttaaatctgtatgcaacatcgccaagaatacttcttcaacgtcaaagaaagaagaagacgactttgtttctgtcgatttacagagcattagagatcagctctctgcactaactgttcaagtcaacgatcagaacaaactgagaagacaaattcttaatgagttcttggaccttaaagggaacattcgtgtgttttgtcgagtcaaacccttgggagccaccgaaaagttgagaccaccggttgcttcggatacaagaaatgtgatcatcaagttatcagaaaccaagagaaaaacctacaacttcgacagagttttccaacctgattcatcccaagatgatgttttcttagagatcgaaccagtaatcaagtcagttatcgatggctacaacgcttgcattttcgcatacgggcaaaccggtactggaaaaacttatacaatggagggtcttccgaactctccaggtatcgttcctcgagcgatcaagggattgttcaaacaagtcgaggaaagtaatcatatgtttacaatccactttagtatgcttgagatttacatgggaaatcttaaagacttgcttctttctgaagcaactaaacccatttctccaatacctccaagtctttctattcacacagacccaaatggagagatagatattgagaacttggtgaaacttaaagtggatgactttaatgaaatcttaaggttatacaaagtaggttgtcgtagcagagcaactgcctccactaactctaactctgtttccagcagatcacactgtatgatccgtgtatcggtcactagtcttggagctcctgagagacggcgtgaaacaaacaagatttggctagtggatcttggaggaagcgagcgcgtgttgaaaacaagagccactggtcggcgttttgatgaaggcaaagccattaatctctctttatctgctcttggagatgtcatcaactctcttcaacgcaagaactctcacattccttacaggaacagcaagctcacacaggttctaaaagactctctcgggcaagactcaaaaacgttgatgcttgttcatatcagccctaaagaggatgatctatgtgaaaccatatgttctttaaactttgcaacgagggcaaagaatattcatttagggcaggacgaatcaacggaagaacaagcgaaaaaggaggctgtgatgatgaatctgcagaagatgatggaaaagattgaacaagagcgtgagatgtcgttaagaaagatgagaaatctaaacgagacgttggagaaactcactggtaagcctcatgttattgaagaagaagaaaaggatgtggttagagaagtgattcatgtgactccaaagaaaccaagaaacaaatcaagacgtgcttcagatgtttttcctagcttcatgagaccaacagctagcagcaacagaagattatcaggagcagattttagcgtaacccctaattcttcaagcttcaagtctagaaggaactcaatgatatctgtccgagctgaatctgcgtgtcttccggtgaagaagaagaagaacagatttgattctgcatgtgactcatcagacaggagcgtttcgaaatcgactagcattatgcgtcaaaatacagcagatgatgcaacggtgtatagtcaggacatatctgaatgtgacattaagttggtagtgtctgaacacaagccaaaaccgctgcagatggggcctggttctgcgacaaagtcccgctccaacatcagtaacttcgagaaagatgtgatgcagaaaataggtggaacagagttttcaaggattaacagttggcttcgttcgcaatctgaaaacaggagttacgtgcttgacaagactcaacttcctgcgactcatttcctagaaaacctaaacagatcgttggagaagtcaccaacacagagttttacaacggagaagatcactggaaatgaactggaaggtatagaagagactaaaacaaatgagacagtggttaaccctacactgatgcttaaaaaactgtttgagctgcaatgtctctgttctgctgaagaagaggatcagattttgtccagattcccaattcctggctatgaggatgatgatgagtctcgttatcctccaattttagaaaacgatggatttagccagcacatagacaatgaatggtttggagtcaataattacagtgcggattgggagcgagattcaccagccacgatcccgttgttagaatgcgaaccggatctcaaacagctgttaccggaattgggtttggatcgatcacttaaaccaagaggtttggcggtcgccgagggtgcagctccaccattgcttagagcacaagaaaccttgggagaaagaggtaaacgtttgtgttctggcgtgaaatgtttttacaaacgcaaacgcttttctaagattctgtctttttctgttgttgttgcaggaaaaggtccaacgttcatgcagaaacttcaggctttatgcttccgtattcttctgggattagggtttatggatgtgggctttggtaatgacttcttcaacgggttaacaaagtaa

SEQ ID NO: 80080 - protein, 887 aa, Arabidopsis thaliana
  peptide (1)..(887): Ceres Seq. ID no. 12654351
  misc_feature (1)..(679): Homolog of NCBI NO: 34902974 NR Description: unnamed protein product [Oryza sativa (japonica group)] >gi|9558519|dbj|BAB03437.1| unnamed protein product
  misc_feature (48)..(600): Homolog of NCBI NO: 13536981 NR Description: BY-2 kinesin-like protein 5 [Nicotiana tabacum]
  misc_feature (32)..(527): Homolog of NCBI NO: 30690873 NR Description: kinesin-related protein [Arabidopsis thaliana] AT5g27950/F15F15_20 [Arabidopsis thaliana]
  misc_feature (63)..(466): Homolog of NCBI NO: 15240982 NR Description: kinesin-related protein; protein id: At5g27550.1
  misc_feature (76)..(479): Homolog of NCBI NO: 15218418 NR Description: kinesin-related protein; protein id: At1g72250.1
  misc_feature (44)..(422): Homolog of NCBI NO: 1762638 NR Description: microtubule-based motor protein
  misc_feature (76)..(414): Homolog of NCBI NO: 13278552 NR Description: Similar to kinesin family member C3 [Mus musculus]
  misc_feature (76)..(414): Homolog of NCBI NO: 19484068 NR Description: Similar to kinesin family member C3 [Mus musculus]
  misc_feature (76)..(414): Homolog of NCBI NO: 16359321 NR Description: Similar to kinesin family member C3 [Mus musculus]
  misc_feature (76)..(414): Homolog of NCBI NO: 12597627 NR Description: kinesin family member C3 [Mus musculus]
MERTRSKPVRNLPETIHSLLGLKSHMTSDWVKSVCNIAKNTSSTSKKEEDDFVSVDLQSIRDQLSALTVQVNDQNKLRRQILNEFLDLKGNIRVFCRVKPLGATEKLRPPVASDTRNVIIKLSETKRKTYNFDRVFQPDSSQDDVFLEIEPVIKSVIDGYNACIFAYGQTGTGKTYTMEGLPNSPGIVPRAIKGLFKQVEESNHMFTIHFSMLEIYMGNLKDLLLSEATKPISPIPPSLSIHTDPNGEIDIENLVKLKVDDFNEILRLYKVGCRSRATASTNSNSVSSRSHCMIRVSVTSLGAPERRRETNKIWLVDLGGSERVLKTRATGRRFDEGKAINLSLSALGDVINSLQRKNSHIPYRNSKLTQVLKDSLGQDSKTLMLVHISPKEDDLCETICSLNFATRAKNIHLGQDESTEEQAKKEAVMMNLQKMMEKIEQEREMSLRKMRNLNETLEKLTGKPHVIEEEEKDVVREVIHVTPKKPRNKSRRASDVFPSFMRPTASSNRRLSGADFSVTPNSSSFKSRRNSMISVRAESACLPVKKKKNRFDSACDSSDRSVSKSTSIMRQNTADDATVYSQDISECDIKLVVSEHKPKPLQMGPGSATKSRSNISNFEKDVMQKIGGTEFSRINSWLRSQSENRSYVLDKTQLPATHFLENLNRSLEKSPTQSFTTEKITGNELEGIEETKTNETVVNPTLMLKKLFELQCLCSAEEEDQILSRFPIPGYEDDDESRYPPILENDGFSQHIDNEWFGVNNYSADWERDSPATIPLLECEPDLKQLLPELGLDRSLKPRGLAVAEGAAPPLLRAQETLGERGKRLCSGVKCFYKRKRFSKILSFSVVVAGKGPTFMQKLQALCFRILLGLGFMDVGFGNDFFNGLTK

SEQ ID NO: 80081 - protein, 862 aa, Arabidopsis thaliana
  peptide (1)..(862): Ceres Seq. ID no. 12654352
  misc_feature (1)..(654): Homolog of NCBI NO: 34902974 NR Description: unnamed protein product [Oryza sativa (japonica group)] >gi|9558519|dbj|BAB03437.1| unnamed protein product
  misc_feature (23)..(575): Homolog of NCBI NO: 13536981 NR Description: BY-2 kinesin-like protein 5 [Nicotiana tabacum]
  misc_feature (7)..(502): Homolog of NCBI NO: 30690873 NR Description: kinesin-related protein [Arabidopsis thaliana] AT5g27950/F15F15_20 [Arabidopsis thaliana]
  misc_feature (38)..(441): Homolog of NCBI NO: 15240982 NR Description: kinesin-related protein; protein id: At5g27550.1
  misc_feature (51)..(454): Homolog of NCBI NO: 15218418 NR Description: kinesin-related protein; protein id: At1g72250.1
  misc_feature (19)..(397): Homolog of NCBI NO: 1762638 NR Description: microtubule-based motor protein
  misc_feature (51)..(389): Homolog of NCBI NO: 13278552 NR Description: Similar to kinesin family member C3 [Mus musculus]
  misc_feature (51)..(389): Homolog of NCBI NO: 19484068 NR Description: Similar to kinesin family member C3 [Mus musculus]
  misc_feature (51)..(389): Homolog of NCBI NO: 16359321 NR Description: Similar to kinesin family member C3 [Mus musculus]
  misc_feature (51)..(389): Homolog of NCBI NO: 12597627 NR Description: kinesin family member C3 [Mus musculus]
MTSDWVKSVCNIAKNTSSTSKKEEDDFVSVDLQSIRDQLSALTVQVNDQNKLRRQILNEFLDLKGNIRVFCRVKPLGATEKLRPPVASDTRNVIIKLSETKRKTYNFDRVFQPDSSQDDVFLEIEPVIKSVIDGYNACIFAYGQTGTGKTYTMEGLPNSPGIVPRAIKGLFKQVEESNHMFTIHFSMLEIYMGNLKDLLLSEATKPISPIPPSLSIHTDPNGEIDIENLVKLKVDDFNEILRLYKVGCRSRATASTNSNSVSSRSHCMIRVSVTSLGAPERRRETNKIWLVDLGGSERVLKTRATGRRFDEGKAINLSLSALGDVINSLQRKNSHIPYRNSKLTQVLKDSLGQDSKTLMLVHISPKEDDLCETICSLNFATRAKNIHLGQDESTEEQAKKEAVMMNLQKMMEKIEQEREMSLRKMRNLNETLEKLTGKPHVIEEEEKDVVREVIHVTPKKPRNKSRRASDVFPSFMRPTASSNRRLSGADFSVTPNSSSFKSRRNSMISVRAESACLPVKKKKNRFDSACDSSDRSVSKSTSIMRQNTADDATVYSQDISECDIKLVVSEHKPKPLQMGPGSATKSRSNISNFEKDVMQKIGGTEFSRINSWLRSQSENRSYVLDKTQLPATHFLENLNRSLEKSPTQSFTTEKITGNELEGIEETKTNETVVNPTLMLKKLFELQCLCSAEEEDQILSRFPIPGYEDDDESRYPPILENDGFSQHIDNEWFGVNNYSADWERDSPATIPLLECEPDLKQLLPELGLDRSLKPRGLAVAEGAAPPLLRAQETLGERGKRLCSGVKCFYKRKRFSKILSFSVVVAGKGPTFMQKLQALCFRILLGLGFMDVGFGNDFFNGLTK

SEQ ID NO: 80082 - protein, 710 aa, Arabidopsis thaliana
  peptide (1)..(710): Ceres Seq. ID no. 12654353
  misc_feature (1)..(502): Homolog of NCBI NO: 34902974 NR Description: unnamed protein product [Oryza sativa (japonica group)] >gi|9558519|dbj|BAB03437.1| unnamed protein product
  misc_feature (1)..(423): Homolog of NCBI NO: 13536981 NR Description: BY-2 kinesin-like protein 5 [Nicotiana tabacum]
  misc_feature (1)..(350): Homolog of NCBI NO: 30690873 NR Description: kinesin-related protein [Arabidopsis thaliana] AT5g27950/F15F15_20 [Arabidopsis thaliana]
  misc_feature (1)..(289): Homolog of NCBI NO: 15240982 NR Description: kinesin-related protein; protein id: At5g27550.1
  misc_feature (1)..(302): Homolog of NCBI NO: 15218418 NR Description: kinesin-related protein; protein id: At1g72250.1
  misc_feature (1)..(245): Homolog of NCBI NO: 1762638 NR Description: microtubule-based motor protein
  misc_feature (1)..(237): Homolog of NCBI NO: 13278552 NR Description: Similar to kinesin family member C3 [Mus musculus]
  misc_feature (1)..(237): Homolog of NCBI NO: 19484068 NR Description: Similar to kinesin family member C3 [Mus musculus]
  misc_feature (1)..(237): Homolog of NCBI NO: 16359321 NR Description: Similar to kinesin family member C3 [Mus musculus]
  misc_feature (1)..(237): Homolog of NCBI NO: 12597627 NR Description: kinesin family member C3 [Mus musculus]
MEGLPNSPGIVPRAIKGLFKQVEESNHMFTIHFSMLEIYMGNLKDLLLSEATKPISPIPPSLSIHTDPNGEIDIENLVKLKVDDFNEILRLYKVGCRSRATASTNSNSVSSRSHCMIRVSVTSLGAPERRRETNKIWLVDLGGSERVLKTRATGRRFDEGKAINLSLSALGDVINSLQRKNSHIPYRNSKLTQVLKDSLGQDSKTLMLVHISPKEDDLCETICSLNFATRAKNIHLGQDESTEEQAKKEAVMMNLQKMMEKIEQEREMSLRKMRNLNETLEKLTGKPHVIEEEEKDVVREVIHVTPKKPRNKSRRASDVFPSFMRPTASSNRRLSGADFSVTPNSSSFKSRRNSMISVRAESACLPVKKKKNRFDSACDSSDRSVSKSTSIMRQNTADDATVYSQDISECDIKLVVSEHKPKPLQMGPGSATKSRSNISNFEKDVMQKIGGTEFSRINSWLRSQSENRSYVLDKTQLPATHFLENLNRSLEKSPTQSFTTEKITGNELEGIEETKTNETVVNPTLMLKKLFELQCLCSAEEEDQILSRFPIPGYEDDDESRYPPILENDGFSQHIDNEWFGVNNYSADWERDSPATIPLLECEPDLKQLLPELGLDRSLKPRGLAVAEGAAPPLLRAQETLGERGKRLCSGVKCFYKRKRFSKILSFSVVVAGKGPTFMQKLQALCFRILLGLGFMDVGFGNDFFNGLTK

SEQ ID NO: 80083 - DNA, 1909 bp, Arabidopsis thaliana
  misc_feature (1)..(1909): Ceres Seq. ID no. 12654374
  misc_feature: MA Experiment ID: 20001911 Result: Up-regulated in Transcription
  misc_feature: MA Experiment 20001911 PARAMETER Experiment Name: At_Drought_Reproduction_P Parameter: Age (day) Value: 40
  misc_feature: MA Experiment 20001911 PARAMETER Experiment Name: At_Drought_Reproduction_P Parameter: Organism Value: A. thaliana
  misc_feature: MA Experiment 20001911 PARAMETER Experiment Name: At_Drought_Reproduction_P Parameter: Plant Line Value: WS
  misc_feature: MA Experiment 20001911 PARAMETER Experiment Name: At_Drought_Reproduction_P Parameter: Timepoint (day) Value: 10
  misc_feature: MA Experiment 20001911 PARAMETER Experiment Name: At_Drought_Reproduction_P Parameter: Tissue Value: Flowers
  misc_feature: MA Experiment 20001911 PARAMETER Experiment Name: At_Drought_Reproduction_P Parameter: Treatment Value: Drought vs. No Drought
tctctctctctctcttcttcttcttctccgttcgtgctctggactcgctcgaaatcgatccgatgataatttatgcagctcgaaacttaatttagaatcatacctttttctggatttggctgacgaatccgttttcaattgcacgagttgcttcgccaggtttatcaacttaagaatgtctaattatcaaggggatgatgctgagtacatggaagatgtggatgatgaaatggatgaggatgatttagatgaggattttcgtggggatgatatggctgcctctgattccgatgtcgatgagtttgactactctaataataaaatagctgacacttcagctgaccaagcccggaaagggaaagacatccaggggattccttgggacaggcttagtattacgagagagacatacagacaaactagactagaacagtataaaaattatgaaaatgtccctaactctggggaatcttcagggaaagattgcatggccacacagaaaggggctcttttttatgatttctggcggaatacaagatctatcaaatcaagtattcttcatttccagttgaggaatttggtttgggcaacttctaagcacgatgtctaccttatgtcacaatatttggtgagccactattctactttgacatccggaaagcatgatgttctcaatgttcaaggtcatgtttccccatctgagaaacatcctggaagtttgttggagggatttacaaagactcaagtgagtacactcgcagtgagagataaatttttagttgccggtggatttcaaggagaacttatatgcaagcatcttgatagacctggtgtgagcttttgttcacgtactacttatgatgataatgctataaccaatgctattgagatttataacaaacccagtggggcacttcattttactgcgtcgaataatgattgtggagtcagagattttgatatggagagataccagcttgttaaccagtttcgctttccatggccggtgaatcacacatctttaagtcctgatggtaaattgttgacgattgtgggagacaaccctgaaagccttctggtagaccccaacactggaaagacactggcaacgctatcaggacatctggacttttcctttgcatcagcatggcacccagatggattcacgttctccacaggtaaccaggacaagacctgccgggtttgggacattcgtaacctgtcaaaatctgttgctgtcttgaggggtaaccttggagcaatccgatccattcgctacacatctgatgggaagtacatggccatggctgagccggctgactttgtccatgtgtatgatgtctcaaacgggtatgaaacggagcaagagatcgacttctttggggagatctcgggaatatcatttagccccgacacagaagcactcttcataggcgtttgggaccgcacttacggaagtctaattgagtatagccggcgccacaactactcctaccttgattcatttctatgatcacccgacataccagaggaataaaagagccgatacatatgtgctgctgcactctcctgtcgctctgttaaactaagaaacccgagaaaagagaaaacataaactcaagtcgatctctaatggtgtaaatgatgtgttgtgcaagtactagtaggaatgttgtcacagagagcggatttagttagttaatgttcatttcttgtatgagtgttggagttcgtgtattgtacataagtatatgaggttcgggtgagtttgcatcaagtctcaactcttggcaaagagacaactttactcgagtctgtggctcgttatttggctatggtcacttgtagaggaactcaatttgagatgtttctgccgattgttggatcaaattatatatcatgatgtttc

SEQ ID NO: 80084 - protein, 503 aa, Arabidopsis thaliana
  peptide (1)..(503): Ceres Seq. ID no. 12654375
  misc_feature (59)..(503): Homolog of NCBI NO: 18405485 NR Description: expressed protein; protein id: At1g55680.1, by cDNA: gi_13430435, supported by cDNA: gi_17979110 [Arabidopsis >gi|13430436|gb|AAK25840.1|AF360130_1 unknown protein
  misc_feature (59)..(503): Homolog of NCBI NO: 18399975 NR Description: expressed protein; protein id: At3g13340.1, by cDNA: gi_15081810 [Arabidopsis thaliana] AT3g13340/MDC11_13 [Arabidopsis thaliana]
  misc_feature (59)..(503): Homolog of NCBI NO: 25405994 NR Description: protein F20N2.10 [imported] - Arabidopsis >gi|8778499|gb|AAF79507.1|AC002328_15 F20N2.10 [Arabidopsis
  misc_feature (59)..(503): Homolog of NCBI NO: 18423837 NR Description: WD-repeat protein-like; protein id: At5g56190.1,
  misc_feature (59)..(503): Homolog of NCBI NO: 21536732 NR Description: WD-repeat protein-like [Arabidopsis thaliana]
  misc_feature (59)..(503): Homolog of NCBI NO: 9758639 NR Description: WD-repeat protein-like [Arabidopsis thaliana]
  misc_feature (85)..(503): Homolog of NCBI NO: 9294540 NR Description: WD domain protein-like [Arabidopsis thaliana]
  misc_feature (59)..(501): Homolog of NCBI NO: 13937195 NR Description: At1g78070/F28K19_28 [Arabidopsis thaliana]
  misc_feature (125)..(503): Homolog of NCBI NO: 27948448 NR Description: GAMYB-binding protein [Hordeum vulgare subsp.
  misc_feature (299)..(501): Homolog of NCBI NO: 25405023 NR Description: protein F28K19.28 [imported] - Arabidopsis >gi|6573770|gb|AAF17690.1|AC009243_17 F28K19.28 [Arabidopsis
LSLSLLLLLRSCSGLARNRSDDNLCSSKLNLESYLFLDLADESVFNCTSCFARFINLRMSNYQGDDAEYMEDVDDEMDEDDLDEDFRGDDMAASDSDVDEFDYSNNKIADTSADQARKGKDIQGIPWDRLSITRETYRQTRLEQYKNYENVPNSGESSGKDCMATQKGALFYDFWRNTRSIKSSILHFQLRNLVWATSKHDVYLMSQYLVSHYSTLTSGKHDVLNVQGHVSPSEKHPGSLLEGFTKTQVSTLAVRDKFLVAGGFQGELICKHLDRPGVSFCSRTTYDDNAITNAIEIYNKPSGALHFTASNNDCGVRDFDMERYQLVNQFRFPWPVNHTSLSPDGKLLTIVGDNPESLLVDPNTGKTLATLSGHLDFSFASAWHPDGFTFSTGNQDKTCRVWDIRNLSKSVAVLRGNLGAIRSIRYTSDGKYMAMAEPADFVHVYDVSNGYETEQEIDFFGEISGISFSPDTEALFIGVWDRTYGSLIEYSRRHNYSYLDSFL

SEQ ID NO: 80085 - protein, 445 aa, Arabidopsis thaliana
  peptide (1)..(445): Ceres Seq. ID no. 12654376
  misc_feature (1)..(445): Homolog of NCBI NO: 18405485 NR Description: expressed protein; protein id: At1g55680.1, by cDNA: gi_13430435, supported by cDNA: gi_17979110 [Arabidopsis >gi|13430436|gb|AAK25840.1|AF360130_1 unknown protein
  misc_feature (1)..(445): Homolog of NCBI NO: 18399975 NR Description: expressed protein; protein id: At3g13340.1, by cDNA: gi_15081810 [Arabidopsis thaliana] AT3g13340/MDC11_13 [Arabidopsis thaliana]
  misc_feature (1)..(445): Homolog of NCBI NO: 25405994 NR Description: protein F20N2.10 [imported] - Arabidopsis >gi|8778499|gb|AAF79507.1|AC002328_15 F20N2.10 [Arabidopsis
  misc_feature (1)..(445): Homolog of NCBI NO: 18423837 NR Description: WD-repeat protein-like; protein id: At5g56190.1,
  misc_feature (1)..(445): Homolog of NCBI NO: 21536732 NR Description: WD-repeat protein-like [Arabidopsis thaliana]
  misc_feature (1)..(445): Homolog of NCBI NO: 9758639 NR Description: WD-repeat protein-like [Arabidopsis thaliana]
  misc_feature (27)..(445): Homolog of NCBI NO: 9294540 NR Description: WD domain protein-like [Arabidopsis thaliana]
  misc_feature (1)..(443): Homolog of NCBI NO: 13937195 NR Description: At1g78070/F28K19_28 [Arabidopsis thaliana]
  misc_feature (67)..(445): Homolog of NCBI NO: 27948448 NR Description: GAMYB-binding protein [Hordeum vulgare subsp.
  misc_feature (241)..(443): Homolog of NCBI NO: 25405023 NR Description: protein F28K19.28 [imported] - Arabidopsis >gi|6573770|gb|AAF17690.1|AC009243_17 F28K19.28 [Arabidopsis
MSNYQGDDAEYMEDVDDEMDEDDLDEDFRGDDMAASDSDVDEFDYSNNKIADTSADQARKGKDIQGIPWDRLSITRETYRQTRLEQYKNYENVPNSGESSGKDCMATQKGALFYDFWRNTRSIKSSILHFQLRNLVWATSKHDVYLMSQYLVSHYSTLTSGKHDVLNVQGHVSPSEKHPGSLLEGFTKTQVSTLAVRDKFLVAGGFQGELICKHLDRPGVSFCSRTTYDDNAITNAIEIYNKPSGALHFTASNNDCGVRDFDMERYQLVNQFRFPWPVNHTSLSPDGKLLTIVGDNPESLLVDPNTGKTLATLSGHLDFSFASAWHPDGFTFSTGNQDKTCRVWDIRNLSKSVAVLRGNLGAIRSIRYTSDGKYMAMAEPADFVHVYDVSNGYETEQEIDFFGEISGISFSPDTEALFIGVWDRTYGSLIEYSRRHNYSYLDSFL

SEQ ID NO: 80086 - protein, 434 aa, Arabidopsis thaliana
  peptide (1)..(434): Ceres Seq. ID no. 12654377
  misc_feature (1)..(434): Homolog of NCBI NO: 18405485 NR Description: expressed protein; protein id: At1g55680.1, by cDNA: gi_13430435, supported by cDNA: gi_17979110 [Arabidopsis >gi|13430436|gb|AAK25840.1|AF360130_1 unknown protein
  misc_feature (1)..(434): Homolog of NCBI NO: 18399975 NR Description: expressed protein; protein id: At3g13340.1, by cDNA: gi_15081810 [Arabidopsis thaliana] AT3g13340/MDC11_13 [Arabidopsis thaliana]
  misc_feature (1)..(434): Homolog of NCBI NO: 25405994 NR Description: protein F20N2.10 [imported] - Arabidopsis >gi|8778499|gb|AAF79507.1|AC002328_15 F20N2.10 [Arabidopsis
  misc_feature (1)..(434): Homolog of NCBI NO: 18423837 NR Description: WD-repeat protein-like; protein id: At5g56190.1,
  misc_feature (1)..(434): Homolog of NCBI NO: 21536732 NR Description: WD-repeat protein-like [Arabidopsis thaliana]
  misc_feature (1)..(434): Homolog of NCBI NO: 9758639 NR Description: WD-repeat protein-like [Arabidopsis thaliana]
  misc_feature (16)..(434): Homolog of NCBI NO: 9294540 NR Description: WD domain protein-like [Arabidopsis thaliana]
  misc_feature (1)..(432): Homolog of NCBI NO: 13937195 NR Description: At1g78070/F28K19_28 [Arabidopsis thaliana]
  misc_feature (56)..(434): Homolog of NCBI NO: 27948448 NR Description: GAMYB-binding protein [Hordeum vulgare subsp.
  misc_feature (230)..(432): Homolog of NCBI NO: 25405023 NR Description: protein F28K19.28 [imported] - Arabidopsis >gi|6573770|gb|AAF17690.1|AC009243_17 F28K19.28 [Arabidopsis
MEDVDDEMDEDDLDEDFRGDDMAASDSDVDEFDYSNNKIADTSADQARKGKDIQGIPWDRLSITRETYRQTRLEQYKNYENVPNSGESSGKDCMATQKGALFYDFWRNTRSIKSSILHFQLRNLVWATSKHDVYLMSQYLVSHYSTLTSGKHDVLNVQGHVSPSEKHPGSLLEGFTKTQVSTLAVRDKFLVAGGFQGELICKHLDRPGVSFCSRTTYDDNAITNAIEIYNKPSGALHFTASNNDCGVRDFDMERYQLVNQFRFPWPVNHTSLSPDGKLLTIVGDNPESLLVDPNTGKTLATLSGHLDFSFASAWHPDGFTFSTGNQDKTCRVWDIRNLSKSVAVLRGNLGAIRSIRYTSDGKYMAMAEPADFVHVYDVSNGYETEQEIDFFGEISGISFSPDTEALFIGVWDRTYGSLIEYSRRHNYSYLDSFL

SEQ ID NO: 80087 - DNA, 990 bp, Arabidopsis thaliana
  misc_feature (1)..(990): Ceres Seq. ID no. 12654390
  misc_feature: MA Experiment ID: 20000169 Result: Up-regulated in Transcription
  misc_feature: MA Experiment 20000169 PARAMETER Experiment Name: At_100uM_ABA_P Parameter: Age (day) Value: 14
  misc_feature: MA Experiment 20000169 PARAMETER Experiment Name: At_100uM_ABA_P Parameter: Organism Value: A. thaliana
  misc_feature: MA Experiment 20000169 PARAMETER Experiment Name: At_100uM_ABA_P Parameter: Plant Line Value: WS
  misc_feature: MA Experiment 20000169 PARAMETER Experiment Name: At_100uM_ABA_P Parameter: Timepoint (hr) Value: 6
  misc_feature: MA Experiment 20000169 PARAMETER Experiment Name: At_100uM_ABA_P Parameter: Tissue Value: Aerial
  misc_feature: MA Experiment 20000169 PARAMETER Experiment Name: At_100uM_ABA_P Parameter: Treatment Value: 100uM ABA vs. No Treatment
  misc_feature: MA Experiment ID: 20000184 Result: Down-regulated in Transcription
  misc_feature: MA Experiment 20000184 PARAMETER Experiment Name: At_Shoots__P Parameter: Age (day) Value: 7
  misc_feature: MA Experiment 20000184 PARAMETER Experiment Name: At_Shoots__P Parameter: Tissue Value: Shoots vs. Whole Plant
  misc_feature: MA Experiment ID: 20000227 Result: Down-regulated in Transcription
  misc_feature: MA Experiment 20000227 PARAMETER Experiment Name: At_Root-Tips-vs-Tops_P Parameter: Tissue Value: Root Tips vs. Root Tops
  misc_feature: MA Experiment ID: 20000264 Result: Up-regulated in Transcription
  misc_feature: MA Experiment 20000264 PARAMETER Experiment Name: At_Open_Flower_P Parameter: Age (day) Value: 21
  misc_feature: MA Experiment 20000264 PARAMETER Experiment Name: At_Open_Flower_P Parameter: Plant Line Value: WS
  misc_feature: MA Experiment 20000264 PARAMETER Experiment Name: At_Open_Flower_P Parameter: Tissue Value: Open Flower vs. Whole Plant
  misc_feature: MA Experiment ID: 20000267 Result: Up-regulated in Transcription
  misc_feature: MA Experiment 20000267 PARAMETER Experiment Name: At_Drought_P Parameter: Age (day) Value: 7
  misc_feature: MA Experiment 20000267 PARAMETER Experiment Name: At_Drought_P Parameter: Organism Value: A. thaliana
  misc_feature: MA Experiment 20000267 PARAMETER Experiment Name: At_Drought_P Parameter: Plant Line Value: WS
  misc_feature: MA Experiment 20000267 PARAMETER Experiment Name: At_Drought_P Parameter: Timepoint (hr) Value: 6
  misc_feature: MA Experiment 20000267 PARAMETER Experiment Name: At_Drought_P Parameter: Tissue Value: Whole Plant
  misc_feature: MA Experiment 20000267 PARAMETER Experiment Name: At_Drought_P Parameter: Treatment Value: Drought vs. No Drought
  misc_feature: MA Experiment ID: 20000269 Result: Up-regulated in Transcription
  misc_feature: MA Experiment 20000269 PARAMETER Experiment Name: At_1mM_KNO3_L-vs-H_Roots_P Parameter: Age (day) Value: 7,10,12
  misc_feature: MA Experiment 20000269 PARAMETER Experiment Name: At_1mM_KNO3_L-vs-H_Roots_P Parameter: Organism Value: A. thaliana
  misc_feature: MA Experiment 20000269 PARAMETER Experiment Name: At_1mM_KNO3_L-vs-H_Roots_P Parameter: Plant Line Value: WS
  misc_feature: MA Experiment 20000269 PARAMETER Experiment Name: At_1mM_KNO3_L-vs-H_Roots_P Parameter: Timepoint (day) Value: 7,10,12
  misc_feature: MA Experiment 20000269 PARAMETER Experiment Name: At_1mM_KNO3_L-vs-H_Roots_P Parameter: Tissue Value: Roots
  misc_feature: MA Experiment 20000269 PARAMETER Experiment Name: At_1mM_KNO3_L-vs-H_Roots_P Parameter: Treatment Value: 1mM KNO3 vs. 50mM KNO3
  misc_feature: MA Experiment ID: 20000286 Result: Up-regulated in Transcription
  misc_feature: MA Experiment 20000286 PARAMETER Experiment Name: At_Open_Flower_P Parameter: Age (day) Value: 21
  misc_feature: MA Experiment 20000286 PARAMETER Experiment Name: At_Open_Flower_P Parameter: Plant Line Value: WS
  misc_feature: MA Experiment 20000286 PARAMETER Experiment Name: At_Open_Flower_P Parameter: Tissue Value: Half Open vs. Whole Plant
  misc_feature: MA Experiment ID: 20000436 Result: Up-regulated in Transcription
  misc_feature: MA Experiment 20000436 PARAMETER Experiment Name: At_Drought_P Parameter: Age (day) Value: 7
  misc_feature: MA Experiment 20000436 PARAMETER Experiment Name: At_Drought_P Parameter: Organism Value: A. thaliana
  misc_feature: MA Experiment 20000436 PARAMETER Experiment Name: At_Drought_P Parameter: Plant Line Value: WS
  misc_feature: MA Experiment 20000436 PARAMETER Experiment Name: At_Drought_P Parameter: Timepoint (hr) Value: 12
  misc_feature: MA Experiment 20000436 PARAMETER Experiment Name: At_Drought_P Parameter: Tissue Value: Whole Plant
  misc_feature: MA Experiment 20000436 PARAMETER Experiment Name: At_Drought_P Parameter: Treatment Value: Drought vs. No Drought
  misc_feature: MA Experiment ID: 20000437 Result: Up-regulated in Transcription
  misc_feature: MA Experiment 20000437 PARAMETER Experiment Name: At_Drought_P Parameter: Age (day) Value: 8
  misc_feature: MA Experiment 20000437 PARAMETER Experiment Name: At_Drought_P Parameter: Organism Value: A. thaliana
  misc_feature: MA Experiment 20000437 PARAMETER Experiment Name: At_Drought_P Parameter: Plant Line Value: WS
  misc_feature: MA Experiment 20000437 PARAMETER Experiment Name: At_Drought_P Parameter: Timepoint (hr) Value: 24
  misc_feature: MA Experiment 20000437 PARAMETER Experiment Name: At_Drought_P Parameter: Tissue Value: Whole Plant
  misc_feature: MA Experiment 20000437 PARAMETER Experiment Name: At_Drought_P Parameter: Treatment Value: Drought vs. No Drought
  misc_feature: MA Experiment ID: 20000439 Result: Up-regulated in Transcription
  misc_feature: MA Experiment 20000439 PARAMETER Experiment Name: At_Roots__P Parameter: Age (day) Value: 14 vs. 21
  misc_feature: MA Experiment 20000439 PARAMETER Experiment Name: At_Roots__P Parameter: Organism Value: A. thaliana
  misc_feature: MA Experiment 20000439 PARAMETER Experiment Name: At_Roots__P Parameter: Tissue Value: Roots vs. Whole Plant
  misc_feature: MA Experiment ID: 20000453 Result: Up-regulated in Transcription
  misc_feature: MA Experiment 20000453 PARAMETER Experiment Name: At_100uM_ABA_P Parameter: Age (day) Value: 15
  misc_feature: MA Experiment 20000453 PARAMETER Experiment Name: At_100uM_ABA_P Parameter: Organism Value: A. thaliana
  misc_feature: MA Experiment 20000453 PARAMETER Experiment Name: At_100uM_ABA_P Parameter: Plant Line Value: WS
  misc_feature: MA Experiment 20000453 PARAMETER Experiment Name: At_100uM_ABA_P Parameter: Timepoint (hr) Value: 24
  misc_feature: MA Experiment 20000453 PARAMETER Experiment Name: At_100uM_ABA_P Parameter: Tissue Value: Aerial
  misc_feature: MA Experiment 20000453 PARAMETER Experiment Name: At_100uM_ABA_P Parameter: Treatment Value: 100uM ABA vs. No Treatment
  misc_feature: MA Experiment ID: 20000709 Result: Down-regulated in Transcription
  misc_feature: MA Experiment 20000709 PARAMETER Experiment Name: At_15mM_NH4NO3_L-to-H_P Parameter: Age (hr) Value: 14
  misc_feature: MA Experiment 20000709 PARAMETER Experiment Name: At_15mM_NH4NO3_L-to-H_P Parameter: Organism Value: A. thaliana
  misc_feature: MA Experiment 20000709 PARAMETER Experiment Name: At_15mM_NH4NO3_L-to-H_P Parameter: Plant Line Value: WS
  misc_feature: MA Experiment 20000709 PARAMETER Experiment Name: At_15mM_NH4NO3_L-to-H_P Parameter: Timepoint (hr) Value: 4
  misc_feature: MA Experiment 20000709 PARAMETER Experiment Name: At_15mM_NH4NO3_L-to-H_P Parameter: Tissue Value: Aerial
  misc_feature: MA Experiment 20000709 PARAMETER Experiment Name: At_15mM_NH4NO3_L-to-H_P Parameter: Treatment Value: 15mM NH4NO3 vs. 30mM Mannitol
  misc_feature: MA Experiment ID: 20000794 Result: Up-regulated in Transcription
  misc_feature: MA Experiment 20000794 PARAMETER Experiment Name: At_Petals_P Parameter: Age (day) Value: 23-25 days
  misc_feature: MA Experiment 20000794 PARAMETER Experiment Name: At_Petals_P Parameter: Plant Line Value: WS
  misc_feature: MA Experiment 20000794 PARAMETER Experiment Name: At_Petals_P Parameter: Tissue Value: Petals vs. Whole plant
  misc_feature: MA Experiment ID: 20001451 Result: Down-regulated in Transcription
  misc_feature: MA Experiment 20001451 PARAMETER Experiment Name: At_Far-red-induction_P Parameter: Age (day) Value: 7
  misc_feature: MA Experiment 20001451 PARAMETER Experiment Name: At_Far-red-induction_P Parameter: Light Value: Far-red vs. White
  misc_feature: MA Experiment 20001451 PARAMETER Experiment Name: At_Far-red-induction_P Parameter: Organism Value: A. thaliana
  misc_feature: MA Experiment 20001451 PARAMETER Experiment Name: At_Far-red-induction_P Parameter: Plant Line Value: Columbia
  misc_feature: MA Experiment 20001451 PARAMETER Experiment Name: At_Far-red-induction_P Parameter: Timepoint (hr) Value: 24
  misc_feature: MA Experiment 20001451 PARAMETER Experiment Name: At_Far-red-induction_P Parameter: Tissue Value: Whole Plant
  misc_feature: MA Experiment ID: 20001458 Result: Down-regulated in Transcription
  misc_feature: MA Experiment 20001458 PARAMETER Experiment Name: At_50mM_NH4NO3_L-to-H_P Parameter: Age (day) Value: Undefined
  misc_feature: MA Experiment 20001458 PARAMETER Experiment Name: At_50mM_NH4NO3_L-to-H_P Parameter: Organism Value: Undefined
  misc_feature: MA Experiment 20001458 PARAMETER Experiment Name: At_50mM_NH4NO3_L-to-H_P Parameter: Plant Line Value: Undefined
  misc_feature: MA Experiment 20001458 PARAMETER Experiment Name: At_50mM_NH4NO3_L-to-H_P Parameter: Timepoint (hr) Value: 2
  misc_feature: MA Experiment 20001458 PARAMETER Experiment Name: At_50mM_NH4NO3_L-to-H_P Parameter: Tissue Value: Siliques
  misc_feature: MA Experiment 20001458 PARAMETER Experiment Name: At_50mM_NH4NO3_L-to-H_P Parameter: Treatment Value: 50mM NH4NO3 vs. 100mM Manitol
  misc_feature: MA Experiment ID: 20001554 Result: Up-regulated in Transcription
  misc_feature: MA Experiment 20001554 PARAMETER Experiment Name: At_Drought_Soil_Dry_P Parameter: Age (day) Value: 21
  misc_feature: MA Experiment 20001554 PARAMETER Experiment Name: At_Drought_Soil_Dry_P Parameter: Organism Value: A. thaliana
  misc_feature: MA Experiment 20001554 PARAMETER Experiment Name: At_Drought_Soil_Dry_P Parameter: Plant Line Value: WS
  misc_feature: MA Experiment 20001554 PARAMETER Experiment Name: At_Drought_Soil_Dry_P Parameter: Post Timepoint (hr) Value: None
  misc_feature: MA Experiment 20001554 PARAMETER Experiment Name: At_Drought_Soil_Dry_P Parameter: Post-Treatment Value: None
  misc_feature: MA Experiment 20001554 PARAMETER Experiment Name: At_Drought_Soil_Dry_P Parameter: Timepoint (day) Value: 7
  misc_feature: MA Experiment 20001554 PARAMETER Experiment Name: At_Drought_Soil_Dry_P Parameter: Treatment Value: Drought vs. No Drought
  misc_feature: MA Experiment ID: 20001555 Result: Up-regulated in Transcription
  misc_feature: MA Experiment 20001555 PARAMETER Experiment Name: At_Drought_Soil_Dry_P Parameter: Age (day) Value: 24
  misc_feature: MA Experiment 20001555 PARAMETER Experiment Name: At_Drought_Soil_Dry_P Parameter: Organism Value: A. thaliana
  misc_feature: MA Experiment 20001555 PARAMETER Experiment Name: At_Drought_Soil_Dry_P Parameter: Plant Line Value: WS
  misc_feature: MA Experiment 20001555 PARAMETER Experiment Name: At_Drought_Soil_Dry_P Parameter: Post Timepoint (hr) Value: None
  misc_feature: MA Experiment 20001555 PARAMETER Experiment Name: At_Drought_Soil_Dry_P Parameter: Post-Treatment Value: None
  misc_feature: MA Experiment 20001555 PARAMETER Experiment Name: At_Drought_Soil_Dry_P Parameter: Timepoint (day) Value: 10
  misc_feature: MA Experiment 20001555 PARAMETER Experiment Name: At_Drought_Soil_Dry_P Parameter: Treatment Value: Drought vs. No Drought
  misc_feature: MA Experiment ID: 20001558 Result: Down-regulated in Transcription
  misc_feature: MA Experiment 20001558 PARAMETER Experiment Name: At_Drought_Soil_Dry_P Parameter: Age (day) Value: 27
  misc_feature: MA Experiment 20001558 PARAMETER Experiment Name: At_Drought_Soil_Dry_P Parameter: Organism Value: A. thaliana
  misc_feature: MA Experiment 20001558 PARAMETER Experiment Name: At_Drought_Soil_Dry_P Parameter: Plant Line Value: WS
  misc_feature: MA Experiment 20001558 PARAMETER Experiment Name: At_Drought_Soil_Dry_P Parameter: Post Timepoint (hr) Value: 6
  misc_feature: MA Experiment 20001558 PARAMETER Experiment Name: At_Drought_Soil_Dry_P Parameter: Post-Treatment Value: Re-Water vs. No Drought
  misc_feature: MA Experiment 20001558 PARAMETER Experiment Name: At_Drought_Soil_Dry_P Parameter: Timepoint (day) Value: 13
  misc_feature: MA Experiment 20001558 PARAMETER Experiment Name: At_Drought_Soil_Dry_P Parameter: Treatment Value: Drought vs. No Drought
  misc_feature: MA Experiment ID: 20001560 Result: Down-regulated in Transcription
  misc_feature: MA Experiment 20001560 PARAMETER Experiment Name: At_Drought_Soil_Dry_P Parameter: Age (day) Value: 28
  misc_feature: MA Experiment 20001560 PARAMETER Experiment Name: At_Drought_Soil_Dry_P Parameter: Organism Value: A. thaliana
  misc_feature: MA Experiment 20001560 PARAMETER Experiment Name: At_Drought_Soil_Dry_P Parameter: Plant Line Value: WS
  misc_feature: MA Experiment 20001560 PARAMETER Experiment Name: At_Drought_Soil_Dry_P Parameter: Post Timepoint (hr) Value: None
  misc_feature: MA Experiment 20001560 PARAMETER Experiment Name: At_Drought_Soil_Dry_P Parameter: Post-Treatment Value: None
  misc_feature: MA Experiment 20001560 PARAMETER Experiment Name: At_Drought_Soil_Dry_P Parameter: Timepoint (day) Value: 14
  misc_feature: MA Experiment 20001560 PARAMETER Experiment Name: At_Drought_Soil_Dry_P Parameter: Treatment Value: Drought vs. No Drought
  misc_feature: MA Experiment ID: 20001757 Result: Down-regulated in Transcription
  misc_feature: MA Experiment 20001757 PARAMETER Experiment Name: At_50mM_NH4NO3_L-to-H_P Parameter: Timepoint (hr) Value: 6
  misc_feature: MA Experiment 20001757 PARAMETER Experiment Name: At_50mM_NH4NO3_L-to-H_P Parameter: Tissue Value: Leaf
  misc_feature: MA Experiment 20001757 PARAMETER Experiment Name: At_50mM_NH4NO3_L-to-H_P Parameter: Treatment Value: 50mM NH4NO3 vs 100mM Mannitol
  misc_feature: MA Experiment ID: 20001911 Result: Down-regulated in Transcription
  misc_feature: MA Experiment 20001911 PARAMETER Experiment Name: At_Drought_Reproduction_P Parameter: Age (day) Value: 40
  misc_feature: MA Experiment 20001911 PARAMETER Experiment Name: At_Drought_Reproduction_P Parameter: Organism Value: A. thaliana
  misc_feature: MA Experiment 20001911 PARAMETER Experiment Name: At_Drought_Reproduction_P Parameter: Plant Line Value: WS
  misc_feature: MA Experiment 20001911 PARAMETER Experiment Name: At_Drought_Reproduction_P Parameter: Timepoint (day) Value: 10
  misc_feature: MA Experiment 20001911 PARAMETER Experiment Name: At_Drought_Reproduction_P Parameter: Tissue Value: Flowers
  misc_feature: MA Experiment 20001911 PARAMETER Experiment Name: At_Drought_Reproduction_P Parameter: Treatment Value: Drought vs. No Drought
atgactgattctgcttacagagtagacaccatttctagactcgcccaatggcgaatccacaatctttcttcctccacttaccgcaagtccgatcctttcaagatgggtctttggaattggcacttgtctgtggagaaaagcaagatgctattaaatgttaagttgtatccagaggtatcaaaccttaccagagaaaatccaccggttgcttcctttgctcttcgtgttgtctcttctactggtgagagaaaggctctatctcatccagaagtaatagataagcggattaagacaaacgaagattttatttggactattgaagttcccttaactgggaaaatcatcatcgacgtcgagtttcttgacttgaaggttttgtctcaagatagtggagaactttactctatctgggccaacggttcaactgagaatcaatcgcaagtaactgcggtaacatcccttggacgtatgttgacagaaagcatttacaccgacataacgatcaatgcctctgatggaagcattggagctcaccgagcagttctcgctgcccgttcacctgttttccgcagcatgtttttacacgacctgaaagagaaagaactatcagaaataaacgtactcgacatgccacttgatgcttgccaagcttttctcagttatatctacggcaatatccaaaacgaagactttcttatacacagattggcactcctccaagcagctgagaaatatgatattgctgatttaaaagaggcgtgccacttgagtcttctagacgatatcgacacaaagaatgtgcttgagaggctacagaatgcttatctctatcaattacctgaactgaaggctagctgcatgagatatcttgtgaagtttggcaaaatatttgagatccgagacgagttcaacatattcatgcaatgcgcagacagagatttgatttctgaaatcttccacgaagtcctcagtacctggaaaggattttag

SEQ ID NO: 80088 - protein, 329 aa, Arabidopsis thaliana
  peptide (1)..(329): Ceres Seq. ID no. 12654391
  misc_feature (154)..(262): Pfam Name: BTB/POZ domain Pfam Description: BTB/POZ domain
  misc_feature (1)..(329): Homolog of NCBI NO: 15222771 NR Description: hypothetical protein; protein id: At1g55760.1
  misc_feature (1)..(292): Homolog of NCBI NO: 8778495 NR Description: F20N2.15 [Arabidopsis thaliana]
  misc_feature (7)..(327): Homolog of NCBI NO: 15219092 NR Description: unknown protein; protein id: At1g21780.1, by cDNA: 36526. [Arabidopsis thaliana] >gi|25518571|pir||E86351
  misc_feature (22)..(327): Homolog of NCBI NO: 38637050 NR Description: POZ domain protein family-like [Oryza sativa
  misc_feature (143)..(291): Homolog of NCBI NO: 27661061 NR Description: similar to speckle-type POZ protein [Homo
  misc_feature (143)..(291): Homolog of NCBI NO: 34858214 NR Description: similar to speckle-type POZ protein-like 1; POZ
  misc_feature (65)..(291): Homolog of NCBI NO: 34858205 NR Description: similar to speckle-type POZ protein-like 1; POZ
  misc_feature (143)..(291): Homolog of NCBI NO: 34858187 NR Description: similar to speckle-type POZ protein-like 1; POZ
  misc_feature (142)..(322): Homolog of NCBI NO: 25150010 NR Description: Maternal Effect embryonic Lethal MEL-26,
  misc_feature (143)..(291): Homolog of NCBI NO: 34858216 NR Description: similar to speckle-type POZ protein-like 1; POZ
MTDSAYRVDTISRLAQWRIHNLSSSTYRKSDPFKMGLWNWHLSVEKSKMLLNVKLYPEVSNLTRENPPVASFALRVVSSTGERKALSHPEVIDKRIKTNEDFIWTIEVPLTGKIIIDVEFLDLKVLSQDSGELYSIWANGSTENQSQVTAVTSLGRMLTESIYTDITINASDGSIGAHRAVLAARSPVFRSMFLHDLKEKELSEINVLDMPLDACQAFLSYIYGNIQNEDFLIHRLALLQAAEKYDIADLKEACHLSLLDDIDTKNVLERLQNAYLYQLPELKASCMRYLVKFGKIFEIRDEFNIFMQCADRDLISEIFHEVLSTWKGF

SEQ ID NO: 80089 - protein, 295 aa, Arabidopsis thaliana
  peptide (1)..(295): Ceres Seq. ID no. 12654392
  misc_feature (120)..(228): Pfam Name: BTB/POZ domain Pfam Description: BTB/POZ domain
  misc_feature (1)..(295): Homolog of NCBI NO: 15222771 NR Description: hypothetical protein; protein id: At1g55760.1
  misc_feature (1)..(258): Homolog of NCBI NO: 8778495 NR Description: F20N2.15 [Arabidopsis thaliana]
  misc_feature (1)..(293): Homolog of NCBI NO: 15219092 NR Description: unknown protein; protein id: At1g21780.1, by cDNA: 36526. [Arabidopsis thaliana] >gi|25518571|pir||E86351
  misc_feature (1)..(293): Homolog of NCBI NO: 38637050 NR Description: POZ domain protein family-like [Oryza sativa
  misc_feature (109)..(257): Homolog of NCBI NO: 27661061 NR Description: similar to speckle-type POZ protein [Homo
  misc_feature (109)..(257): Homolog of NCBI NO: 34858214 NR Description: similar to speckle-type POZ protein-like 1; POZ
  misc_feature (31)..(257): Homolog of NCBI NO: 34858205 NR Description: similar to speckle-type POZ protein-like 1; POZ
  misc_feature (109)..(257): Homolog of NCBI NO: 34858187 NR Description: similar to speckle-type POZ protein-like 1; POZ
  misc_feature (108)..(288): Homolog of NCBI NO: 25150010 NR Description: Maternal Effect embryonic Lethal MEL-26,
  misc_feature (109)..(257): Homolog of NCBI NO: 34858216 NR Description: similar to speckle-type POZ protein-like 1; POZ
MGLWNWHLSVEKSKMLLNVKLYPEVSNLTRENPPVASFALRVVSSTGERKALSHPEVIDKRIKTNEDFIWTIEVPLTGKIIIDVEFLDLKVLSQDSGELYSIWANGSTENQSQVTAVTSLGRMLTESIYTDITINASDGSIGAHRAVLAARSPVFRSMFLHDLKEKELSEINVLDMPLDACQAFLSYIYGNIQNEDFLIHRLALLQAAEKYDIADLKEACHLSLLDDIDTKNVLERLQNAYLYQLPELKASCMRYLVKFGKIFEIRDEFNIFMQCADRDLISEIFHEVLSTWKGF

SEQ ID NO: 80090 - protein, 281 aa, Arabidopsis thaliana
  peptide (1)..(281): Ceres Seq. ID no. 12654393
  misc_feature (106)..(214): Pfam Name: BTB/POZ domain Pfam Description: BTB/POZ domain
  misc_feature (1)..(281): Homolog of NCBI NO: 15222771 NR Description: hypothetical protein; protein id: At1g55760.1
  misc_feature (1)..(244): Homolog of NCBI NO: 8778495 NR Description: F20N2.15 [Arabidopsis thaliana]
  misc_feature (1)..(279): Homolog of NCBI NO: 15219092 NR Description: unknown protein; protein id: At1g21780.1, by cDNA: 36526. [Arabidopsis thaliana] >gi|25518571|pir||E86351
  misc_feature (1)..(279): Homolog of NCBI NO: 38637050 NR Description: POZ domain protein family-like [Oryza sativa
  misc_feature (95)..(243): Homolog of NCBI NO: 27661061 NR Description: similar to speckle-type POZ protein [Homo
  misc_feature (95)..(243): Homolog of NCBI NO: 34858214 NR Description: similar to speckle-type POZ protein-like 1; POZ
  misc_feature (17)..(243): Homolog of NCBI NO: 34858205 NR Description: similar to speckle-type POZ protein-like 1; POZ
  misc_feature (95)..(243): Homolog of NCBI NO: 34858187 NR Description: similar to speckle-type POZ protein-like 1; POZ
  misc_feature (94)..(274): Homolog of NCBI NO: 25150010 NR Description: Maternal Effect embryonic Lethal MEL-26,
  misc_feature (95)..(243): Homolog of NCBI NO: 34858216 NR Description: similar to speckle-type POZ protein-like 1; POZ
MLLNVKLYPEVSNLTRENPPVASFALRVVSSTGERKALSHPEVIDKRIKTNEDFIWTIEVPLTGKIIIDVEFLDLKVLSQDSGELYSIWANGSTENQSQVTAVTSLGRMLTESIYTDITINASDGSIGAHRAVLAARSPVFRSMFLHDLKEKELSEINVLDMPLDACQAFLSYIYGNIQNEDFLIHRLALLQAAEKYDIADLKEACHLSLLDDIDTKNVLERLQNAYLYQLPELKASCMRYLVKFGKIFEIRDEFNIFMQCADRDLISEIFHEVLSTWKGF

SEQ ID NO: 80091 - DNA, 2309 bp, Arabidopsis thaliana
  misc_feature (1)..(2309): Ceres Seq. ID no. 12654405
  misc_feature: MA Experiment ID: 20000166 Result: Down-regulated in Transcription
  misc_feature: MA Experiment 20000166 PARAMETER Experiment Name: At_100uM_ABA_P Parameter: Age (day) Value: 14
  misc_feature: MA Experiment 20000166 PARAMETER Experiment Name: At_100uM_ABA_P Parameter: Organism Value: A. thaliana
  misc_feature: MA Experiment 20000166 PARAMETER Experiment Name: At_100uM_ABA_P Parameter: Plant Line Value: WS
  misc_feature: MA Experiment 20000166 PARAMETER Experiment Name: At_100uM_ABA_P Parameter: Timepoint (hr) Value: 1
  misc_feature: MA Experiment 20000166 PARAMETER Experiment Name: At_100uM_ABA_P Parameter: Tissue Value: Aerial
  misc_feature: MA Experiment 20000166 PARAMETER Experiment Name: At_100uM_ABA_P Parameter: Treatment Value: 100uM ABA vs. No Treatment
  misc_feature: MA Experiment ID: 20000173 Result: Down-regulated in Transcription
  misc_feature: MA Experiment 20000173 PARAMETER Experiment Name: At_42deg_Heat_P Parameter: Age (day) Value: 14
  misc_feature: MA Experiment 20000173 PARAMETER Experiment Name: At_42deg_Heat_P Parameter: Organism Value: A. thaliana
  misc_feature: MA Experiment 20000173 PARAMETER Experiment Name: At_42deg_Heat_P Parameter: Plant Line Value: WS
  misc_feature: MA Experiment 20000173 PARAMETER Experiment Name: At_42deg_Heat_P Parameter: Temperature (deg C) Value: 42 vs. 22
  misc_feature: MA Experiment 20000173 PARAMETER Experiment Name: At_42deg_Heat_P Parameter: Timepoint (hr) Value: 6
  misc_feature: MA Experiment 20000173 PARAMETER Experiment Name: At_42deg_Heat_P Parameter: Tissue Value: Aerial
  misc_feature: MA Experiment ID: 20000184 Result: Down-regulated in Transcription
  misc_feature: MA Experiment 20000184 PARAMETER Experiment Name: At_Shoots__P Parameter: Age (day) Value: 7
  misc_feature: MA Experiment 20000184 PARAMETER Experiment Name: At_Shoots__P Parameter: Tissue Value: Shoots vs. Whole Plant
  misc_feature: MA Experiment ID: 20000213 Result: Down-regulated in Transcription
  misc_feature: MA Experiment 20000213 PARAMETER Experiment Name: At_4deg_Cold_P Parameter: Timepoint (hr) Value: 2
  misc_feature: MA Experiment ID: 20000234 Result: Down-regulated in Transcription
  misc_feature: MA Experiment 20000234 PARAMETER Experiment Name: At_Siliques_P Parameter: Age (day) Value: 21
  misc_feature: MA Experiment 20000234 PARAMETER Experiment Name: At_Siliques_P Parameter: Organism Value: A. thaliana
  misc_feature: MA Experiment 20000234 PARAMETER Experiment Name: At_Siliques_P Parameter: Plant Line Value: WS
  misc_feature: MA Experiment 20000234 PARAMETER Experiment Name: At_Siliques_P Parameter: Tissue Value: Less Than 5mm Siliques vs. Whole Plant
  misc_feature: MA Experiment ID: 20000235 Result: Down-regulated in Transcription
  misc_feature: MA Experiment 20000235 PARAMETER Experiment Name: At_Siliques_P Parameter: Age (day) Value: 21
  misc_feature: MA Experiment 20000235 PARAMETER Experiment Name: At_Siliques_P Parameter: Organism Value: A. thaliana
  misc_feature: MA Experiment 20000235 PARAMETER Experiment Name: At_Siliques_P Parameter: Plant Line Value: WS
  misc_feature: MA Experiment 20000235 PARAMETER Experiment Name: At_Siliques_P Parameter: Tissue Value: 5-10mm Siliques vs. Whole Plant
  misc_feature: MA Experiment ID: 20000264 Result: Down-regulated in Transcription
  misc_feature: MA Experiment 20000264 PARAMETER Experiment Name: At_Open_Flower_P Parameter: Age (day) Value: 21
  misc_feature: MA Experiment 20000264 PARAMETER Experiment Name: At_Open_Flower_P Parameter: Plant Line Value: WS
  misc_feature: MA Experiment 20000264 PARAMETER Experiment Name: At_Open_Flower_P Parameter: Tissue Value: Open Flower vs. Whole Plant
  misc_feature: MA Experiment ID: 20000265 Result: Down-regulated in Transcription
  misc_feature: MA Experiment 20000265 PARAMETER Experiment Name: At_Open_Flower_P Parameter: Age (day) Value: 21
  misc_feature: MA Experiment 20000265 PARAMETER Experiment Name: At_Open_Flower_P Parameter: Plant Line Value: WS
  misc_feature: MA Experiment 20000265 PARAMETER Experiment Name: At_Open_Flower_P Parameter: Tissue Value: Closed Flower vs. Whole Plant
  misc_feature: MA Experiment ID: 20000286 Result: Down-regulated in Transcription
  misc_feature: MA Experiment 20000286 PARAMETER Experiment Name: At_Open_Flower_P Parameter: Age (day) Value: 21
  misc_feature: MA Experiment 20000286 PARAMETER Experiment Name: At_Open_Flower_P Parameter: Plant Line Value: WS
  misc_feature: MA Experiment 20000286 PARAMETER Experiment Name: At_Open_Flower_P Parameter: Tissue Value: Half Open vs. Whole Plant
  misc_feature: MA Experiment ID: 20000436 Result: Down-regulated in Transcription
  misc_feature: MA Experiment 20000436 PARAMETER Experiment Name: At_Drought_P Parameter: Age (day) Value: 7
  misc_feature: MA Experiment 20000436 PARAMETER Experiment Name: At_Drought_P Parameter: Organism Value: A. thaliana
  misc_feature: MA Experiment 20000436 PARAMETER Experiment Name: At_Drought_P Parameter: Plant Line Value: WS
  misc_feature: MA Experiment 20000436 PARAMETER Experiment Name: At_Drought_P Parameter: Timepoint (hr) Value: 12
  misc_feature: MA Experiment 20000436 PARAMETER Experiment Name: At_Drought_P Parameter: Tissue Value: Whole Plant
  misc_feature: MA Experiment 20000436 PARAMETER Experiment Name: At_Drought_P Parameter: Treatment Value: Drought vs. No Drought
  misc_feature: MA Experiment ID: 20000438 Result: Down-regulated in Transcription
  misc_feature: MA Experiment 20000438 PARAMETER Experiment Name: At_Shoots__P Parameter: Age (day) Value: 14
  misc_feature: MA Experiment 20000438 PARAMETER Experiment Name: At_Shoots__P Parameter: Tissue Value: Shoots vs. Whole Plant
  misc_feature: MA Experiment ID: 20001248 Result: Up-regulated in Transcription
  misc_feature: MA Experiment 20001248 PARAMETER Experiment Name: At_Far-red-induction_P Parameter: Age (day) Value: 7
  misc_feature: MA Experiment 20001248 PARAMETER Experiment Name: At_Far-red-induction_P Parameter: Light Value: Far-red vs. White
  misc_feature: MA Experiment 20001248 PARAMETER Experiment Name: At_Far-red-induction_P Parameter: Organism Value: A. thaliana
  misc_feature: MA Experiment 20001248 PARAMETER Experiment Name: At_Far-red-induction_P Parameter: Plant Line Value: Columbia
  misc_feature: MA Experiment 20001248 PARAMETER Experiment Name: At_Far-red-induction_P Parameter: Timepoint (hr) Value: 4
  misc_feature: MA Experiment 20001248 PARAMETER Experiment Name: At_Far-red-induction_P Parameter: Tissue Value: Whole Plant
  misc_feature: MA Experiment ID: 20001557 Result: Up-regulated in Transcription
  misc_feature: MA Experiment 20001557 PARAMETER Experiment Name: At_Drought_Soil_Dry_P Parameter: Age (day) Value: 27
  misc_feature: MA Experiment 20001557 PARAMETER Experiment Name: At_Drought_Soil_Dry_P Parameter: Organism Value: A. thaliana
  misc_feature: MA Experiment 20001557 PARAMETER Experiment Name: At_Drought_Soil_Dry_P Parameter: Plant Line Value: WS
  misc_feature: MA Experiment 20001557 PARAMETER Experiment Name: At_Drought_Soil_Dry_P Parameter: Post Timepoint (hr) Value: 3
  misc_feature: MA Experiment 20001557 PARAMETER Experiment Name: At_Drought_Soil_Dry_P Parameter: Post-Treatment Value: Re-Water vs. No Drought
  misc_feature: MA Experiment 20001557 PARAMETER Experiment Name: At_Drought_Soil_Dry_P Parameter: Timepoint (day) Value: 13
  misc_feature: MA Experiment 20001557 PARAMETER Experiment Name: At_Drought_Soil_Dry_P Parameter: Treatment Value: Drought vs. No Drought
  misc_feature: MA Experiment ID: 20001905 Result: Down-regulated in Transcription
  misc_feature: MA Experiment 20001905 PARAMETER Experiment Name: At_Drought_Reproduction_P Parameter: Age (day) Value: 40
  misc_feature: MA Experiment 20001905 PARAMETER Experiment Name: At_Drought_Reproduction_P Parameter: Organism Value: A. thaliana
  misc_feature: MA Experiment 20001905 PARAMETER Experiment Name: At_Drought_Reproduction_P Parameter: Plant Line Value: WS
  misc_feature: MA Experiment 20001905 PARAMETER Experiment Name: At_Drought_Reproduction_P Parameter: Timepoint (day) Value: 10
  misc_feature: MA Experiment 20001905 PARAMETER Experiment Name: At_Drought_Reproduction_P Parameter: Tissue Value: Rosettes
  misc_feature: MA Experiment 20001905 PARAMETER Experiment Name: At_Drought_Reproduction_P Parameter: Treatment Value: Drought vs. No Drought
  misc_feature: MA Experiment ID: 20001911 Result: Up-regulated in Transcription
  misc_feature: MA Experiment 20001911 PARAMETER Experiment Name: At_Drought_Reproduction_P Parameter: Age (day) Value: 40
  misc_feature: MA Experiment 20001911 PARAMETER Experiment Name: At_Drought_Reproduction_P Parameter: Organism Value: A. thaliana
  misc_feature: MA Experiment 20001911 PARAMETER Experiment Name: At_Drought_Reproduction_P Parameter: Plant Line Value: WS
  misc_feature: MA Experiment 20001911 PARAMETER Experiment Name: At_Drought_Reproduction_P Parameter: Timepoint (day) Value: 10
  misc_feature: MA Experiment 20001911 PARAMETER Experiment Name: At_Drought_Reproduction_P Parameter: Tissue Value: Flowers
  misc_feature: MA Experiment 20001911 PARAMETER Experiment Name: At_Drought_Reproduction_P Parameter: Treatment Value: Drought vs. No Drought
ctcttatccctctcaccttctcacttggcaccgttgcagagagagaaccaaacatggtaaacaaagacgaccggattagaccggttcatgaagccgacggtgaaccgctttttgagactaggagaagaaccggtagagtgattgcgtaccggtttttctcagcctcggttttcgtgtgtatctgtttgatttggttctacagaattggtgagattggtgataaccgtaccgttttagatcgattaatctggtttgttatgtttattgtggagatttggttcggtttatattgggtagtcacacaatcttcccggtggaatccggtttggcgatttcccttctccgatagactctctcggagatacggaagcgaccttccgaggctcgacgtcttcgtttgcacggcggatccggtgattgagccgccgttgttggtggtaaacacagtcttatctgtgacggctcttgactacccaccggagaaactcgccgtttatctctcagatgacggtggttctgagctgacgttctatgctctcacggaggcagctgagtttgctaaaacttgggttcccttctgcaagaagttcaacgttgagccaacatctcccgctgcttacttgtcttccaaggcaaactgtcttgattctgcggctgaggaggtggctaagctgtatagagaaatggcggcgaggattgaaacggcggcgagactgggacgaataccggaggaggcgcgggtgaagtacggtgacgggttttcacagtgggatgctgacgctactcgaagaaaccatggaaccattcttcaagttttggtagatggaagagaagggaatacaatagcaataccaacgttggtgtatttatcaagagaaaagagacctcaacatcatcataacttcaaggctggagcaatgaacgcattgctgagggtttcttcgaaaattacttgtgggaaaatcatactaaacttggactgtgatatgtacgcaaacaactcaaagtcaacacgcgacgcgctctgcatcctcctcgatgagaaagagggaaaagagattgctttcgtgcagtttccgcagtgttttgacaatgttacaagaaatgatttgtatggaagcatgatgcgagtaggaattgatgtggaatttcttggattggatggaaatggtggtccgttatacattggaactggatgctttcacagaagagatgtgatctgtggaagaaagtatggagaggaagaagaagaagaagaatctgagagaattcacgaaaatttagagcctgagatgattaaggctctcgcgagctgcacttatgaggaaaacactcaatggggaaaggagatgggtgtgaaatatggttgcccggtagaggatgtaataactggtttgacgattcagtgtcgcggatggaaatcagcctacctgaacccggaaaagcaagcatttctcggggtagcgccgaccaatttgcatcaaatgctagtgcagcagaggagatggtcagagggagactttcagattatgctttcgaagtatagtccggtttggtatggaaaaggaaagatcagtttaggactgatacttggttactgttgctattgtctttgggctccatcttcactacctgtgctcatttactctgttttgacttctctctgtctcttcaaaggcattcctctgtttccaaaggtctcgagctcgtggtttattccgtttggatacgtcactgttgcagctaccgcatatagcctagccgagttcttgtggtgcggagggacgttccgtggatggtggaacgagcaaaggatgtggctttatagaagaacaagctcgtttcttttcggatttatggacacgattaagaagctacttggagtttctgagtctgcgtttgtgatcacagcaaaagtagcagaagaagaagcagcagagagatacaaggaagaggtaatggagtttggagtggagtctcccatgtttctcgtcctcggaacactcggtatgctcaatctcttctgcttcgccgcagcggttgcgagacttgtttccggagacggtggagatttgaaaacaatggggatgcaatttgtgataacaggagtactagttgtcataaactggcctctgtataaaggtatgttgttgaggcaagacaaaggaaagatgccaatgagcgttacagttaaatcagttgttttagctttatctgcctgtacctgtttagcgtttttgtaagattgattaacaacagtcaaaaaagtaatcaaaataatgaccagcagttataatatgtaattttct

SEQ ID NO: 80092 - protein, 746 aa, Arabidopsis thaliana
  peptide (1)..(746): Ceres Seq. ID no. 12654406
  misc_feature (33)..(740): Homolog of NCBI NO: 16519227 NR Description: cellulose synthase-like protein OsCslE2 [Oryza
  misc_feature (35)..(739): Homolog of NCBI NO: 16519225 NR Description: cellulose synthase-like protein OsCslE1 [Oryza
  misc_feature (45)..(728): Homolog of NCBI NO: 30686386 NR Description: cellulose synthase - related [Arabidopsis >gi|17979143|gb|AAL49829.1| unknown protein [Arabidopsis >gi|20465365|gb|AAM20086.1| unknown protein [Arabidopsis
  misc_feature (33)..(454): Homolog of NCBI NO: 2262116 NR Description: cellulose synthase isolog [Arabidopsis thaliana]
  misc_feature (435)..(735): Homolog of NCBI NO: 2262116 NR Description: cellulose synthase isolog [Arabidopsis thaliana]
  misc_feature (45)..(728): Homolog of NCBI NO: 2262115 NR Description: cellulose synthase isolog [Arabidopsis thaliana]
  misc_feature (309)..(728): Homolog of NCBI NO: 7487588 NR Description: hypothetical protein T32A16.170 - Arabidopsis >gi|4972104|emb|CAB43900.1| putative protein [Arabidopsis >gi|7269249|emb|CAB81318.1| putative protein [Arabidopsis
  misc_feature (45)..(297): Homolog of NCBI NO: 7487588 NR Description: hypothetical protein T32A16.170 - Arabidopsis >gi|4972104|emb|CAB43900.1| putative protein [Arabidopsis >gi|7269249|emb|CAB81318.1| putative protein [Arabidopsis
  misc_feature (310)..(735): Homolog of NCBI NO: 15233649 NR Description: cellulose synthase catalytic subunit - like protein id: At4g23990.1 [Arabidopsis thaliana]
  misc_feature (33)..(286): Homolog of NCBI NO: 15233649 NR Description: cellulose synthase catalytic subunit - like protein id: At4g23990.1 [Arabidopsis thaliana]
LIPLTFSLGTVAEREPNMVNKDDRIRPVHEADGEPLFETRRRTGRVIAYRFFSASVFVCICLIWFYRIGEIGDNRTVLDRLIWFVMFIVEIWFGLYWVVTQSSRWNPVWRFPFSDRLSRRYGSDLPRLDVFVCTADPVIEPPLLVVNTVLSVTALDYPPEKLAVYLSDDGGSELTFYALTEAAEFAKTWVPFCKKFNVEPTSPAAYLSSKANCLDSAAEEVAKLYREMAARIETAARLGRIPEEARVKYGDGFSQWDADATRRNHGTILQVLVDGREGNTIAIPTLVYLSREKRPQHHHNFKAGAMNALLRVSSKITCGKIILNLDCDMYANNSKSTRDALCILLDEKEGKEIAFVQFPQCFDNVTRNDLYGSMMRVGIDVEFLGLDGNGGPLYIGTGCFHRRDVICGRKYGEEEEEEESERIHENLEPEMIKALASCTYEENTQWGKEMGVKYGCPVEDVITGLTIQCRGWKSAYLNPEKQAFLGVAPTNLHQMLVQQRRWSEGDFQIMLSKYSPVWYGKGKISLGLILGYCCYCLWAPSSLPVLIYSVLTSLCLFKGIPLFPKVSSSWFIPFGYVTVAATAYSLAEFLWCGGTFRGWWNEQRMWLYRRTSSFLFGFMDTIKKLLGVSESAFVITAKVAEEEAAERYKEEVMEFGVESPMFLVLGTLGMLNLFCFAAAVARLVSGDGGDLKTMGMQFVITGVLVVINWPLYKGMLLRQDKGKMPMSVTVKSVVLALSACTCLAFL

SEQ ID NO: 80093 - protein, 729 aa, Arabidopsis thaliana
  peptide (1)..(729): Ceres Seq. ID no. 12654407
  misc_feature (16)..(723): Homolog of NCBI NO: 16519227 NR Description: cellulose synthase-like protein OsCslE2 [Oryza
  misc_feature (18)..(722): Homolog of NCBI NO: 16519225 NR Description: cellulose synthase-like protein OsCslE1 [Oryza
  misc_feature (28)..(711): Homolog of NCBI NO: 30686386 NR Description: cellulose synthase - related [Arabidopsis >gi|17979143|gb|AAL49829.1| unknown protein [Arabidopsis >gi|20465365|gb|AAM20086.1| unknown protein [Arabidopsis
  misc_feature (16)..(437): Homolog of NCBI NO: 2262116 NR Description: cellulose synthase isolog [Arabidopsis thaliana]
  misc_feature (418)..(718): Homolog of NCBI NO: 2262116 NR Description: cellulose synthase isolog [Arabidopsis thaliana]
  misc_feature (28)..(711): Homolog of NCBI NO: 2262115 NR Description: cellulose synthase isolog [Arabidopsis thaliana]
  misc_feature (292)..(711): Homolog of NCBI NO: 7487588 NR Description: hypothetical protein T32A16.170 - Arabidopsis >gi|4972104|emb|CAB43900.1| putative protein [Arabidopsis >gi|7269249|emb|CAB81318.1| putative protein [Arabidopsis
  misc_feature (28)..(280): Homolog of NCBI NO: 7487588 NR Description: hypothetical protein T32A16.170 - Arabidopsis >gi|4972104|emb|CAB43900.1| putative protein [Arabidopsis >gi|7269249|emb|CAB81318.1| putative protein [Arabidopsis
  misc_feature (293)..(718): Homolog of NCBI NO: 15233649 NR Description: cellulose synthase catalytic subunit - like protein id: At4g23990.1 [Arabidopsis thaliana]
  misc_feature (16)..(269): Homolog of NCBI NO: 15233649 NR Description: cellulose synthase catalytic subunit - like protein id: At4g23990.1 [Arabidopsis thaliana]
MVNKDDRIRPVHEADGEPLFETRRRTGRVIAYRFFSASVFVCICLIWFYRIGEIGDNRTVLDRLIWFVMFIVEIWFGLYWVVTQSSRWNPVWRFPFSDRLSRRYGSDLPRLDVFVCTADPVIEPPLLVVNTVLSVTALDYPPEKLAVYLSDDGGSELTFYALTEAAEFAKTWVPFCKKFNVEPTSPAAYLSSKANCLDSAAEEVAKLYREMAARIETAARLGRIPEEARVKYGDGFSQWDADATRRNHGTILQVLVDGREGNTIAIPTLVYLSREKRPQHHHNFKAGAMNALLRVSSKITCGKIILNLDCDMYANNSKSTRDALCILLDEKEGKEIAFVQFPQCFDNVTRNDLYGSMMRVGIDVEFLGLDGNGGPLYIGTGCFHRRDVICGRKYGEEEEEEESERIHENLEPEMIKALASCTYEENTQWGKEMGVKYGCPVEDVITGLTIQCRGWKSAYLNPEKQAFLGVAPTNLHQMLVQQRRWSEGDFQIMLSKYSPVWYGKGKISLGLILGYCCYCLWAPSSLPVLIYSVLTSLCLFKGIPLFPKVSSSWFIPFGYVTVAATAYSLAEFLWCGGTFRGWWNEQRMWLYRRTSSFLFGFMDTIKKLLGVSESAFVITAKVAEEEAAERYKEEVMEFGVESPMFLVLGTLGMLNLFCFAAAVARLVSGDGGDLKTMGMQFVITGVLVVINWPLYKGMLLRQDKGKMPMSVTVKSVVLALSACTCLAFL

SEQ ID NO: 80094 - protein, 661 aa, Arabidopsis thaliana
  peptide (1)..(661): Ceres Seq. ID no. 12654408
  misc_feature (1)..(655): Homolog of NCBI NO: 16519227 NR Description: cellulose synthase-like protein OsCslE2 [Oryza
  misc_feature (1)..(654): Homolog of NCBI NO: 16519225 NR Description: cellulose synthase-like protein OsCslE1 [Oryza
  misc_feature (1)..(643): Homolog of NCBI NO: 30686386 NR Description: cellulose synthase - related [Arabidopsis >gi|17979143|gb|AAL49829.1| unknown protein [Arabidopsis >gi|20465365|gb|AAM20086.1| unknown protein [Arabidopsis
  misc_feature (1)..(369): Homolog of NCBI NO: 2262116 NR Description: cellulose synthase isolog [Arabidopsis thaliana]
  misc_feature (350)..(650): Homolog of NCBI NO: 2262116 NR Description: cellulose synthase isolog [Arabidopsis thaliana]
  misc_feature (1)..(643): Homolog of NCBI NO: 2262115 NR Description: cellulose synthase isolog [Arabidopsis thaliana]
  misc_feature (224)..(643): Homolog of NCBI NO: 7487588 NR Description: hypothetical protein T32A16.170 - Arabidopsis >gi|4972104|emb|CAB43900.1| putative protein [Arabidopsis >gi|7269249|emb|CAB81318.1| putative protein [Arabidopsis
  misc_feature (1)..(212): Homolog of NCBI NO: 7487588 NR Description: hypothetical protein T32A16.170 - Arabidopsis >gi|4972104|emb|CAB43900.1| putative protein [Arabidopsis >gi|7269249|emb|CAB81318.1| putative protein [Arabidopsis
  misc_feature (225)..(650): Homolog of NCBI NO: 15233649 NR Description: cellulose synthase catalytic subunit - like protein id: At4g23990.1 [Arabidopsis thaliana]
  misc_feature (1)..(201): Homolog of NCBI NO: 15233649 NR Description: cellulose synthase catalytic subunit - like protein id: At4g23990.1 [Arabidopsis thaliana]
MFIVEIWFGLYWVVTQSSRWNPVWRFPFSDRLSRRYGSDLPRLDVFVCTADPVIEPPLLVVNTVLSVTALDYPPEKLAVYLSDDGGSELTFYALTEAAEFAKTWVPFCKKFNVEPTSPAAYLSSKANCLDSAAEEVAKLYREMAARIETAARLGRIPEEARVKYGDGFSQWDADATRRNHGTILQVLVDGREGNTIAIPTLVYLSREKRPQHHHNFKAGAMNALLRVSSKITCGKIILNLDCDMYANNSKSTRDALCILLDEKEGKEIAFVQFPQCFDNVTRNDLYGSMMRVGIDVEFLGLDGNGGPLYIGTGCFHRRDVICGRKYGEEEEEEESERIHENLEPEMIKALASCTYEENTQWGKEMGVKYGCPVEDVITGLTIQCRGWKSAYLNPEKQAFLGVAPTNLHQMLVQQRRWSEGDFQIMLSKYSPVWYGKGKISLGLILGYCCYCLWAPSSLPVLIYSVLTSLCLFKGIPLFPKVSSSWFIPFGYVTVAATAYSLAEFLWCGGTFRGWWNEQRMWLYRRTSSFLFGFMDTIKKLLGVSESAFVITAKVAEEEAAERYKEEVMEFGVESPMFLVLGTLGMLNLFCFAAAVARLVSGDGGDLKTMGMQFVITGVLVVINWPLYKGMLLRQDKGKMPMSVTVKSVVLALSACTCLAFL

SEQ ID NO: 80095 - DNA, 1377 bp, Arabidopsis thaliana
  misc_feature (1)..(1377): Ceres Seq. ID no. 12654409
  misc_feature: MA Experiment ID: 20000173 Result: Up-regulated in Transcription
  misc_feature: MA Experiment 20000173 PARAMETER Experiment Name: At_42deg_Heat_P Parameter: Age (day) Value: 14
  misc_feature: MA Experiment 20000173 PARAMETER Experiment Name: At_42deg_Heat_P Parameter: Organism Value: A. thaliana
  misc_feature: MA Experiment 20000173 PARAMETER Experiment Name: At_42deg_Heat_P Parameter: Plant Line Value: WS
  misc_feature: MA Experiment 20000173 PARAMETER Experiment Name: At_42deg_Heat_P Parameter: Temperature (deg C) Value: 42 vs. 22
  misc_feature: MA Experiment 20000173 PARAMETER Experiment Name: At_42deg_Heat_P Parameter: Timepoint (hr) Value: 6
  misc_feature: MA Experiment 20000173 PARAMETER Experiment Name: At_42deg_Heat_P Parameter: Tissue Value: Aerial
atgaataatggtgcgtttgtcccgccactctctggtagaccaaattatgcttcacatttcaaaatcccttttttgttgcatcgaagatcgggaaggtcagaattgtttgggtttttgaatcgaattttgagatatttgaaggtgggcatctgtgaaattgtgatgagttcggcgaatttggaagatttgaacaaggtctgggaaataaaggctttgaagaggaaacctagagaagatgaagcgaggaagattctggagaaagtagctaatcaggttcagccgattatgactagacgaaaatggcgcgtcaagcttctctctgaattctgcccaacaaatccaaggcttttgggggtgaatgtaaatagaggcgtgcaagtgaaattgaggcttaggagggtaaaccatgatttagatttcttatcgtatcatgaaattctcgacaccatgctccacgagctttgccacaacgctcatggtcctcataacgcaagtttctataagctttgggatgaacttcgaaaggaatgcgaggagttgatgtcaaagggtattacagggacgggacagggatttgatatgcctggtaagcgtttgggtggactttctcgtcagccttctctatcatttctcagagcaactgcagctacagcagcagaaaaaagagtgcgtgcgggaactcttttaccttcaggacctcaacgtcttggtggtgatagcagcattatgtcagatcttagtccaattcaggctgctgcaatggctgcagaaaggcgtttacttgatgatatttggtgtggttcccaatccacagatgctttagaagatgaagagaatgatagtgacacatataaggaacctgtttccatcagggaaacttgtacgagcgtgaatggaaagtcagtaaaacgatgtaatagctggtccaatgcccattcttgtcctccatcttccagtcatcaacagggatcagatgtcattgatttgactgaagaatcttttgaaataagatgtactaaaagaaatcgcagcccaggtgatcagggtccttcttgtgccaaagatgtaccgaacgctggtgtcatgaagtcatcgattcctttgccatcgacgagttacaatgcaaaccaaagcagagaagaatccacaatgtgggagtgtgcagaatgcaccttattgaacccgtcattggctccaatatgtgagctatgcactgccgcaaagccaaaggaaagggagatgaagcacaaagtctggtcttgcaaattctgcacgcttgaaaatgaggtgaagttagagaaatgtgaggcttgtggtcagtggaggtactcgtatggagcaccattgtcaactggtgctcctaatgtcggcacttga

SEQ ID NO: 80096 - protein, 458 aa, Arabidopsis thaliana
  peptide (1)..(458): Ceres Seq. ID no. 12654410
  misc_feature (379)..(410): Pfam Name: Zn-finger in Ran binding protein and others Pfam Description: Zn-finger in Ran binding protein and others
  misc_feature (1)..(458): Homolog of NCBI NO: 18405600 NR Description: hypothetical protein; protein id: At1g55915.1
  misc_feature (1)..(458): Homolog of NCBI NO: 8778309 NR Description: F14J16.17 [Arabidopsis thaliana]
  misc_feature (62)..(319): Homolog of NCBI NO: 14719278 NR Description: hypothetical protein 4 [Zea mays]
  misc_feature (73)..(281): Homolog of NCBI NO: 40746554 NR Description: hypothetical protein AN0304.2 [Aspergillus
  misc_feature (66)..(267): Homolog of NCBI NO: 6321926 NR Description: weak suppressor of smt3; Wss1p [Saccharomyces
  misc_feature (308)..(455): Homolog of NCBI NO: 14719278 NR Description: hypothetical protein 4 [Zea mays]
  misc_feature (55)..(187): Homolog of NCBI NO: 23507896 NR Description: hypothetical protein [Plasmodium falciparum 3D7]
  misc_feature (78)..(222): Homolog of NCBI NO: 9957265 NR Description: ORF556 [Trypanosoma brucei]
  misc_feature (384)..(440): Homolog of NCBI NO: 9957265 NR Description: ORF556 [Trypanosoma brucei]
  misc_feature (76)..(183): Homolog of NCBI NO: 19075821 NR Description: putative Zn-protease [Schizosaccharomyces pombe]
MNNGAFVPPLSGRPNYASHFKIPFLLHRRSGRSELFGFLNRILRYLKVGICEIVMSSANLEDLNKVWEIKALKRKPREDEARKILEKVANQVQPIMTRRKWRVKLLSEFCPTNPRLLGVNVNRGVQVKLRLRRVNHDLDFLSYHEILDTMLHELCHNAHGPHNASFYKLWDELRKECEELMSKGITGTGQGFDMPGKRLGGLSRQPSLSFLRATAATAAEKRVRAGTLLPSGPQRLGGDSSIMSDLSPIQAAAMAAERRLLDDIWCGSQSTDALEDEENDSDTYKEPVSIRETCTSVNGKSVKRCNSWSNAHSCPPSSSHQQGSDVIDLTEESFEIRCTKRNRSPGDQGPSCAKDVPNAGVMKSSIPLPSTSYNANQSREESTMWECAECTLLNPSLAPICELCTAAKPKEREMKHKVWSCKFCTLENEVKLEKCEACGQWRYSYGAPLSTGAPNVGT

SEQ ID NO: 80097 - protein, 404 aa, Arabidopsis thaliana
  peptide (1)..(404): Ceres Seq. ID no. 12654411
  misc_feature (325)..(356): Pfam Name: Zn-finger in Ran binding protein and others Pfam Description: Zn-finger in Ran binding protein and others
  misc_feature (1)..(404): Homolog of NCBI NO: 18405600 NR Description: hypothetical protein; protein id: At1g55915.1
  misc_feature (1)..(404): Homolog of NCBI NO: 8778309 NR Description: F14J16.17 [Arabidopsis thaliana]
  misc_feature (8)..(265): Homolog of NCBI NO: 14719278 NR Description: hypothetical protein 4 [Zea mays]
  misc_feature (19)..(227): Homolog of NCBI NO: 40746554 NR Description: hypothetical protein AN0304.2 [Aspergillus
  misc_feature (12)..(213): Homolog of NCBI NO: 6321926 NR Description: weak suppressor of smt3; Wss1p [Saccharomyces
  misc_feature (254)..(401): Homolog of NCBI NO: 14719278 NR Description: hypothetical protein 4 [Zea mays]
  misc_feature (1)..(133): Homolog of NCBI NO: 23507896 NR Description: hypothetical protein [Plasmodium falciparum 3D7]
  misc_feature (24)..(168): Homolog of NCBI NO: 9957265 NR Description: ORF556 [Trypanosoma brucei]
  misc_feature (330)..(386): Homolog of NCBI NO: 9957265 NR Description: ORF556 [Trypanosoma brucei]
  misc_feature (22)..(129): Homolog of NCBI NO: 19075821 NR Description: putative Zn-protease [Schizosaccharomyces pombe]
MSSANLEDLNKVWEIKALKRKPREDEARKILEKVANQVQPIMTRRKWRVKLLSEFCPTNPRLLGVNVNRGVQVKLRLRRVNHDLDFLSYHEILDTMLHELCHNAHGPHNASFYKLWDELRKECEELMSKGITGTGQGFDMPGKRLGGLSRQPSLSFLRATAATAAEKRVRAGTLLPSGPQRLGGDSSIMSDLSPIQAAAMAAERRLLDDIWCGSQSTDALEDEENDSDTYKEPVSIRETCTSVNGKSVKRCNSWSNAHSCPPSSSHQQGSDVIDLTEESFEIRCTKRNRSPGDQGPSCAKDVPNAGVMKSSIPLPSTSYNANQSREESTMWECAECTLLNPSLAPICELCTAAKPKEREMKHKVWSCKFCTLENEVKLEKCEACGQWRYSYGAPLSTGAPNVGT

SEQ ID NO: 80098 - protein, 363 aa, Arabidopsis thaliana
  peptide (1)..(363): Ceres Seq. ID no. 12654412
  misc_feature (284)..(315): Pfam Name: Zn-finger in Ran binding protein and others Pfam Description: Zn-finger in Ran binding protein and others
  misc_feature (1)..(363): Homolog of NCBI NO: 18405600 NR Description: hypothetical protein; protein id: At1g55915.1
  misc_feature (1)..(363): Homolog of NCBI NO: 8778309 NR Description: F14J16.17 [Arabidopsis thaliana]
  misc_feature (1)..(224): Homolog of NCBI NO: 14719278 NR Description: hypothetical protein 4 [Zea mays]
  misc_feature (1)..(186): Homolog of NCBI NO: 40746554 NR Description: hypothetical protein AN0304.2 [Aspergillus
  misc_feature (1)..(172): Homolog of NCBI NO: 6321926 NR Description: weak suppressor of smt3; Wss1p [Saccharomyces
  misc_feature (213)..(360): Homolog of NCBI NO: 14719278 NR Description: hypothetical protein 4 [Zea mays]
  misc_feature (1)..(92): Homolog of NCBI NO: 23507896 NR Description: hypothetical protein [Plasmodium falciparum 3D7]
  misc_feature (1)..(127): Homolog of NCBI NO: 9957265 NR Description: ORF556 [Trypanosoma brucei]
  misc_feature (289)..(345): Homolog of NCBI NO: 9957265 NR Description: ORF556 [Trypanosoma brucei]
  misc_feature (1)..(88): Homolog of NCBI NO: 19075821 NR Description: putative Zn-protease [Schizosaccharomyces pombe]
MTRRKWRVKLLSEFCPTNPRLLGVNVNRGVQVKLRLRRVNHDLDFLSYHEILDTMLHELCHNAHGPHNASFYKLWDELRKECEELMSKGITGTGQGFDMPGKRLGGLSRQPSLSFLRATAATAAEKRVRAGTLLPSGPQRLGGDSSIMSDLSPIQAAAMAAERRLLDDIWCGSQSTDALEDEENDSDTYKEPVSIRETCTSVNGKSVKRCNSWSNAHSCPPSSSHQQGSDVIDLTEESFEIRCTKRNRSPGDQGPSCAKDVPNAGVMKSSIPLPSTSYNANQSREESTMWECAECTLLNPSLAPICELCTAAKPKEREMKHKVWSCKFCTLENEVKLEKCEACGQWRYSYGAPLSTGAPNVGT

SEQ ID NO: 80099 - DNA, 1749 bp, Arabidopsis thaliana
  misc_feature (1)..(1749): Ceres Seq. ID no. 12654473
  misc_feature: MA Experiment ID: 20001451 Result: Down-regulated in Transcription
  misc_feature: MA Experiment 20001451 PARAMETER Experiment Name: At_Far-red-induction_P Parameter: Age (day) Value: 7
  misc_feature: MA Experiment 20001451 PARAMETER Experiment Name: At_Far-red-induction_P Parameter: Light Value: Far-red vs. White
  misc_feature: MA Experiment 20001451 PARAMETER Experiment Name: At_Far-red-induction_P Parameter: Organism Value: A. thaliana
  misc_feature: MA Experiment 20001451 PARAMETER Experiment Name: At_Far-red-induction_P Parameter: Plant Line Value: Columbia
  misc_feature: MA Experiment 20001451 PARAMETER Experiment Name: At_Far-red-induction_P Parameter: Timepoint (hr) Value: 24
  misc_feature: MA Experiment 20001451 PARAMETER Experiment Name: At_Far-red-induction_P Parameter: Tissue Value: Whole Plant
atgggtttggattctaaagaagctgatttggaggtaataagagatgagaaatctgaagcaaacactgtgtgtttacatgcgttttcagatttaacctatgtgtctcctgttgtgttcttatacctactcaaagaatgctataaacatggtagcttgaaggcaacaaaaaagttccaagctttacagtatcaagttcatcgagttctagctaataaacctcaaccaggacctgctactttcattattaattgtctcactttacttcctttatttggggtatatggtgaaggctttagtcatttagttatatcagctcttcgccgcttctttaaaacagtatctgaaccaactagtgaagaagatatttgtttggcgagaaagctagctgctcagttcttccttgctactgttggtggatctttaacttatgatgagaaggttatggtgcatactcttagagtgtttgatgtgaggttaactagtatcgatgaagccttgtctatctcggaagtttggcagagatatgggtttgcttgtggaaatgcgtttctggaacaatacatttctgacttgatcaagtcgaaatctttcatgacggctgtgactctgttagagcatttctctttccgtttccctggagaaacttttcttcaacaaatggttgaggataaaaatttccaagctgcagagagatgggctaccttcatgggaaggccaagtttatgcattcttgttcaagagtatggctcaaggaatatgctaaagcaggcctataatatcataaataagaactatctacagcatgactttcccgaattgtatcacaagtgtaaagaaagtgctctgaaggttctagcagaaaaagcatgttgggatgttgctgaaattaagacaaaaggtgatagacagcttctgaagtatctggtatacttggcagtggaagctggatacttggagaaggttgatgaactgtgcgatcgatattcacttcaagggctgccaaaagcacgagaggctgaggttgcttttgttgaaaaaagctttctgcgtctcaacgatctagctgtagaagatgtagtttgggttgatgaagtcaacgagttgagaaaagcaacttcttttcttgaaggatgtagagttgtgggtattgactgtgaatggaaacctaattatattaaaggcagtaaacagaacaaggtttcaatcatgcaaattggatctgataccaaaattttcatattggacttgataaagctttacaatgacgcctctgaaattctggacaactgccttagtcacattttgcaatcgaagagtacattaaagctcgtctctctgactgaggattaccctgatcataaattatcctcaggttacaattttcaatgtgacatcaagcagttggcgctttcatatggggatttgaaatgtttcgagcgatacgacatgttgctagacattcaaaatgtttttaatgaaccatttggtggtttagcaggactaacgaagaaaatattgggagtgtctttgaacaaaacaagacgcaatagcgactgggaacaaaggcctttgagccagaatcagcttgagtatgctgctcttgatgctgcagtgttgattcacatatttcgccatgttcgcgatcatcctccacatgacagtagttcagagacaacccagtggaaatctcacattgtaagtacctcttataaaagcccttatctttcatctgataattcaagacgataa

SEQ ID NO: 80100 - protein, 582 aa, Arabidopsis thaliana
  peptide (1)..(582): Ceres Seq. ID no. 12654474
  misc_feature (1)..(582): Homolog of NCBI NO: 15223514 NR Description: 3'-5' exonuclease, putative; protein id:
  misc_feature (327)..(557): Homolog of NCBI NO: 22759879 NR Description: HBE269 [Homo sapiens]
  misc_feature (327)..(557): Homolog of NCBI NO: 16549645 NR Description: unnamed protein product [Homo sapiens]
  misc_feature (381)..(546): Homolog of NCBI NO: 39590812 NR Description: Hypothetical protein CBG10058 [Caenorhabditis
  misc_feature (324)..(546): Homolog of NCBI NO: 39590814 NR Description: Hypothetical protein CBG10060 [Caenorhabditis
  misc_feature (381)..(546): Homolog of NCBI NO: 17554336 NR Description: MUTator MUT-7, 3'-5' exonuclease family member [Caenorhabditis elegans] >gi|466063|sp|P34607|YO68_CAEEL protein ZK1098.8 in chromosome III >gi|482167|pir||S40930
MGLDSKEADLEVIRDEKSEANTVCLHAFSDLTYVSPVVFLYLLKECYKHGSLKATKKFQALQYQVHRVLANKPQPGPATFIINCLTLLPLFGVYGEGFSHLVISALRRFFKTVSEPTSEEDICLARKLAAQFFLATVGGSLTYDEKVMVHTLRVFDVRLTSIDEALSISEVWQRYGFACGNAFLEQYISDLIKSKSFMTAVTLLEHFSFRFPGETFLQQMVEDKNFQAAERWATFMGRPSLCILVQEYGSRNMLKQAYNIINKNYLQHDFPELYHKCKESALKVLAEKACWDVAEIKTKGDRQLLKYLVYLAVEAGYLEKVDELCDRYSLQGLPKAREAEVAFVEKSFLRLNDLAVEDVVWVDEVNELRKATSFLEGCRVVGIDCEWKPNYIKGSKQNKVSIMQIGSDTKIFILDLIKLYNDASEILDNCLSHILQSKSTLKLVSLTEDYPDHKLSSGYNFQCDIKQLALSYGDLKCFERYDMLLDIQNVFNEPFGGLAGLTKKILGVSLNKTRRNSDWEQRPLSQNQLEYAALDAAVLIHIFRHVRDHPPHDSSSETTQWKSHIVSTSYKSPYLSSDNSRR

SEQ ID NO: 80101 - protein, 435 aa, Arabidopsis thaliana
  peptide (1)..(435): Ceres Seq. ID no. 12654475
  misc_feature (1)..(435): Homolog of NCBI NO: 15223514 NR Description: 3'-5' exonuclease, putative; protein id:
  misc_feature (180)..(410): Homolog of NCBI NO: 22759879 NR Description: HBE269 [Homo sapiens]
  misc_feature (180)..(410): Homolog of NCBI NO: 16549645 NR Description: unnamed protein product [Homo sapiens]
  misc_feature (234)..(399): Homolog of NCBI NO: 39590812 NR Description: Hypothetical protein CBG10058 [Caenorhabditis
  misc_feature (177)..(399): Homolog of NCBI NO: 39590814 NR Description: Hypothetical protein CBG10060 [Caenorhabditis
  misc_feature (234)..(399): Homolog of NCBI NO: 17554336 NR Description: MUTator MUT-7, 3'-5' exonuclease family member [Caenorhabditis elegans] >gi|466063|sp|P34607|YO68_CAEEL protein ZK1098.8 in chromosome III >gi|482167|pir||S40930
MVHTLRVFDVRLTSIDEALSISEVWQRYGFACGNAFLEQYISDLIKSKSFMTAVTLLEHFSFRFPGETFLQQMVEDKNFQAAERWATFMGRPSLCILVQEYGSRNMLKQAYNIINKNYLQHDFPELYHKCKESALKVLAEKACWDVAEIKTKGDRQLLKYLVYLAVEAGYLEKVDELCDRYSLQGLPKAREAEVAFVEKSFLRLNDLAVEDVVWVDEVNELRKATSFLEGCRVVGIDCEWKPNYIKGSKQNKVSIMQIGSDTKIFILDLIKLYNDASEILDNCLSHILQSKSTLKLVSLTEDYPDHKLSSGYNFQCDIKQLALSYGDLKCFERYDMLLDIQNVFNEPFGGLAGLTKKILGVSLNKTRRNSDWEQRPLSQNQLEYAALDAAVLIHIFRHVRDHPPHDSSSETTQWKSHIVSTSYKSPYLSSDNSRR

SEQ ID NO: 80102 - protein, 385 aa, Arabidopsis thaliana
  peptide (1)..(385): Ceres Seq. ID no. 12654476
  misc_feature (1)..(385): Homolog of NCBI NO: 15223514 NR Description: 3'-5' exonuclease, putative; protein id:
  misc_feature (130)..(360): Homolog of NCBI NO: 22759879 NR Description: HBE269 [Homo sapiens]
  misc_feature (130)..(360): Homolog of NCBI NO: 16549645 NR Description: unnamed protein product [Homo sapiens]
  misc_feature (184)..(349): Homolog of NCBI NO: 39590812 NR Description: Hypothetical protein CBG10058 [Caenorhabditis
  misc_feature (127)..(349): Homolog of NCBI NO: 39590814 NR Description: Hypothetical protein CBG10060 [Caenorhabditis
  misc_feature (184)..(349): Homolog of NCBI NO: 17554336 NR Description: MUTator MUT-7, 3'-5' exonuclease family member [Caenorhabditis elegans] >gi|466063|sp|P34607|YO68_CAEEL protein ZK1098.8 in chromosome III >gi|482167|pir||S40930
MTAVTLLEHFSFRFPGETFLQQMVEDKNFQAAERWATFMGRPSLCILVQEYGSRNMLKQAYNIINKNYLQHDFPELYHKCKESALKVLAEKACWDVAEIKTKGDRQLLKYLVYLAVEAGYLEKVDELCDRYSLQGLPKAREAEVAFVEKSFLRLNDLAVEDVVWVDEVNELRKATSFLEGCRVVGIDCEWKPNYIKGSKQNKVSIMQIGSDTKIFILDLIKLYNDASEILDNCLSHILQSKSTLKLVSLTEDYPDHKLSSGYNFQCDIKQLALSYGDLKCFERYDMLLDIQNVFNEPFGGLAGLTKKILGVSLNKTRRNSDWEQRPLSQNQLEYAALDAAVLIHIFRHVRDHPPHDSSSETTQWKSHIVSTSYKSPYLSSDNSRR

SEQ ID NO: 80103 - DNA, 1401 bp, Arabidopsis thaliana
  misc_feature (1)..(1401): Ceres Seq. ID no. 12654487
  misc_feature: MA Experiment ID: 20000440 Result: Up-regulated in Transcription
  misc_feature: MA Experiment 20000440 PARAMETER Experiment Name: At_Closed-Flower__Sub_P Parameter: Tissue Value: Closed Flower vs. Whole Plant
atgaagaatctggtcatatttgccttcttgttcttaagcatcactactgtaatcaatggtggaataacaagtaaatttgtccgccaagctttaccatcgatcgaaatgtctctcgacactttcccttctcctggtggctacaacactcctgaacaggttcatctgactcaaggagaccatgatggacgtggcatgattgtctcgtgggtcacaccgttgaatctcgctggttctaacgttgttacctactggatcgctactaatggtagtgacgtaaagccagcgaaaaagagagctcatgcctccactaaatcttacagattctatgactatagttcaggatttctccatcacgccacaattaagggactcgagtacgataccaagtacatctatgaggttggtaccgataaatccgttagacaattctccttcactactcctccaaagatcggacccgatgttccatacacattcggcatcattggtgatcttggacagacttatgcttctaatgagacattgtatcattacatgtcaaaccctaaaggccaagctgttctctttgctggagacttgtcatatgcagacgaccacccgaatcatgaccagagaaagtgggatacttggggaagatttatggagccttgtgctgcttaccagcccttcatctttgctgccgggaatcatgaaattgattttgttccaaacattggtgagcctcacgcattcaagccctacactcaccgttaccctaacgcctacaaagcttcacaaagcacttctcctctttggtactcagtgagacgtgcttctgctcacatcatcgtcctctcttcttactcggcctacggaaaatacacgcctcaatacatttggcttgagcaagagctaaagaatgtgaacagagaagagactccatggttgattgtcattgttcactctccgtggtacaacagtaataactatcattacatggaaggtgagagcatgagagttatgtttgagtcgtggctcgttaacagcaaggttgatttggttttgtctggtcatgtccatgcctatgagagatctgaacgtatctccaatattaagtacaacatcaccaatggcttgagctctcctgtgaaagatcctaatgctcctatttacattactatcggagatggaggaaacattgaaggaattgcaaacagtttcgtggatccacaaccgagttactcagcatatagagaggcgagttttggccatgcggttttagagattatgaataggactcacgcgcagtacacatggcataggaaccaagacaacgagcctgtcgccgctgactctattatgttgcataacagacacttctttccggtggaggaaatagtttccagcaacattagggcctaa

SEQ ID NO: 80104 - protein, 466 aa, Arabidopsis thaliana
  peptide (1)..(466): Ceres Seq. ID no. 12654488
  misc_feature (157)..(355): Pfam Name: Calcineurin-like phosphoesterase Pfam Description: Calcineurin-like phosphoesterase
  misc_feature (1)..(466): Homolog of NCBI NO: 15223530 NR Description: purple acid phosphatase, putative; protein id: [Arabidopsis thaliana] >gi|25752265|pir||F96605 acid phosphatase
  misc_feature (3)..(466): Homolog of NCBI NO: 15234369 NR Description: purple acid phosphatase like protein; protein id: [Arabidopsis thaliana] >gi|7435104|pir||T04599 acid phosphatase
  misc_feature (164)..(458): Homolog of NCBI NO: 15224112 NR Description: putative purple acid phosphatase precursor; id: At2g18130.1, supported by cDNA: gi_20257484 [Arabidopsis
  misc_feature (4)..(127): Homolog of NCBI NO: 15224112 NR Description: putative purple acid phosphatase precursor; id: At2g18130.1, supported by cDNA: gi_20257484 [Arabidopsis
  misc_feature (4)..(458): Homolog of NCBI NO: 27597229 NR Description: purple acid phosphatase [Nicotiana tabacum]
MKNLVIFAFLFLSITTVINGGITSKFVRQALPSIEMSLDTFPSPGGYNTPEQVHLTQGDHDGRGMIVSWVTPLNLAGSNVVTYWIATNGSDVKPAKKRAHASTKSYRFYDYSSGFLHHATIKGLEYDTKYIYEVGTDKSVRQFSFTTPPKIGPDVPYTFGIIGDLGQTYASNETLYHYMSNPKGQAVLFAGDLSYADDHPNHDQRKWDTWGRFMEPCAAYQPFIFAAGNHEIDFVPNIGEPHAFKPYTHRYPNAYKASQSTSPLWYSVRRASAHIIVLSSYSAYGKYTPQYIWLEQELKNVNREETPWLIVIVHSPWYNSNNYHYMEGESMRVMFESWLVNSKVDLVLSGHVHAYERSERISNIKYNITNGLSSPVKDPNAPIYITIGDGGNIEGIANSFVDPQPSYSAYREASFGHAVLEIMNRTHAQYTWHRNQDNEPVAADSIMLHNRHFFPVEEIVSSNIRA

SEQ ID NO: 80105 - protein, 431 aa, Arabidopsis thaliana
  peptide (1)..(431): Ceres Seq. ID no. 12654489
  misc_feature (122)..(320): Pfam Name: Calcineurin-like phosphoesterase Pfam Description: Calcineurin-like phosphoesterase
  misc_feature (1)..(431): Homolog of NCBI NO: 15223530 NR Description: purple acid phosphatase, putative; protein id: [Arabidopsis thaliana] >gi|25752265|pir||F96605 acid phosphatase
  misc_feature (1)..(431): Homolog of NCBI NO: 15234369 NR Description: purple acid phosphatase like protein; protein id: [Arabidopsis thaliana] >gi|7435104|pir||T04599 acid phosphatase
  misc_feature (129)..(423): Homolog of NCBI NO: 15224112 NR Description: putative purple acid phosphatase precursor; id: At2g18130.1, supported by cDNA: gi_20257484 [Arabidopsis
  misc_feature (1)..(92): Homolog of NCBI NO: 15224112 NR Description: putative purple acid phosphatase precursor; id: At2g18130.1, supported by cDNA: gi_20257484 [Arabidopsis
  misc_feature (1)..(423): Homolog of NCBI NO: 27597229 NR Description: purple acid phosphatase [Nicotiana tabacum]
MSLDTFPSPGGYNTPEQVHLTQGDHDGRGMIVSWVTPLNLAGSNVVTYWIATNGSDVKPAKKRAHASTKSYRFYDYSSGFLHHATIKGLEYDTKYIYEVGTDKSVRQFSFTTPPKIGPDVPYTFGIIGDLGQTYASNETLYHYMSNPKGQAVLFAGDLSYADDHPNHDQRKWDTWGRFMEPCAAYQPFIFAAGNHEIDFVPNIGEPHAFKPYTHRYPNAYKASQSTSPLWYSVRRASAHIIVLSSYSAYGKYTPQYIWLEQELKNVNREETPWLIVIVHSPWYNSNNYHYMEGESMRVMFESWLVNSKVDLVLSGHVHAYERSERISNIKYNITNGLSSPVKDPNAPIYITIGDGGNIEGIANSFVDPQPSYSAYREASFGHAVLEIMNRTHAQYTWHRNQDNEPVAADSIMLHNRHFFPVEEIVSSNIRA

SEQ ID NO: 80106 - protein, 402 aa, Arabidopsis thaliana
  peptide (1)..(402): Ceres Seq. ID no. 12654490
  misc_feature (93)..(291): Pfam Name: Calcineurin-like phosphoesterase Pfam Description: Calcineurin-like phosphoesterase
  misc_feature (1)..(402): Homolog of NCBI NO: 15223530 NR Description: purple acid phosphatase, putative; protein id: [Arabidopsis thaliana] >gi|25752265|pir||F96605 acid phosphatase
  misc_feature (1)..(402): Homolog of NCBI NO: 15234369 NR Description: purple acid phosphatase like protein; protein id: [Arabidopsis thaliana] >gi|7435104|pir||T04599 acid phosphatase
  misc_feature (100)..(394): Homolog of NCBI NO: 15224112 NR Description: putative purple acid phosphatase precursor; id: At2g18130.1, supported by cDNA: gi_20257484 [Arabidopsis
  misc_feature (1)..(63): Homolog of NCBI NO: 15224112 NR Description: putative purple acid phosphatase precursor; id: At2g18130.1, supported by cDNA: gi_20257484 [Arabidopsis
  misc_feature (1)..(394): Homolog of NCBI NO: 27597229 NR Description: purple acid phosphatase [Nicotiana tabacum]
MIVSWVTPLNLAGSNVVTYWIATNGSDVKPAKKRAHASTKSYRFYDYSSGFLHHATIKGLEYDTKYIYEVGTDKSVRQFSFTTPPKIGPDVPYTFGIIGDLGQTYASNETLYHYMSNPKGQAVLFAGDLSYADDHPNHDQRKWDTWGRFMEPCAAYQPFIFAAGNHEIDFVPNIGEPHAFKPYTHRYPNAYKASQSTSPLWYSVRRASAHIIVLSSYSAYGKYTPQYIWLEQELKNVNREETPWLIVIVHSPWYNSNNYHYMEGESMRVMFESWLVNSKVDLVLSGHVHAYERSERISNIKYNITNGLSSPVKDPNAPIYITIGDGGNIEGIANSFVDPQPSYSAYREASFGHAVLEIMNRTHAQYTWHRNQDNEPVAADSIMLHNRHFFPVEEIVSSNIRA

SEQ ID NO: 80107 - DNA, 1854 bp, Arabidopsis thaliana
  misc_feature (1)..(1854): Ceres Seq. ID no. 12654499
  misc_feature: MA Experiment ID: 20000314 Result: Down-regulated in Transcription
  misc_feature: MA Experiment 20000314 PARAMETER Experiment Name: At_14day_Shoots-Roots_Sub_P Parameter: Age (day) Value: 14
  misc_feature: MA Experiment 20000314 PARAMETER Experiment Name: At_14day_Shoots-Roots_Sub_P Parameter: Organism Value: A. thaliana
  misc_feature: MA Experiment 20000314 PARAMETER Experiment Name: At_14day_Shoots-Roots_Sub_P Parameter: Plant Line Value: WS
  misc_feature: MA Experiment 20000314 PARAMETER Experiment Name: At_14day_Shoots-Roots_Sub_P Parameter: Tissue Value: Roots vs. Whole Plant
  misc_feature: MA Experiment ID: 20000315 Result: Down-regulated in Transcription
  misc_feature: MA Experiment 20000315 PARAMETER Experiment Name: At_14day_Shoots-Roots_Sub_P Parameter: Age (day) Value: 14
  misc_feature: MA Experiment 20000315 PARAMETER Experiment Name: At_14day_Shoots-Roots_Sub_P Parameter: Organism Value: A. thaliana
  misc_feature: MA Experiment 20000315 PARAMETER Experiment Name: At_14day_Shoots-Roots_Sub_P Parameter: Plant Line Value: WS
  misc_feature: MA Experiment 20000315 PARAMETER Experiment Name: At_14day_Shoots-Roots_Sub_P Parameter: Tissue Value: Shoots vs. Whole Plant
  misc_feature: MA Experiment ID: 20000327 Result: Up-regulated in Transcription
  misc_feature: MA Experiment 20000327 PARAMETER Experiment Name: At_42deg_Heat_Sub_P Parameter: Age (day) Value: 14
  misc_feature: MA Experiment 20000327 PARAMETER Experiment Name: At_42deg_Heat_Sub_P Parameter: Organism Value: A. thaliana
  misc_feature: MA Experiment 20000327 PARAMETER Experiment Name: At_42deg_Heat_Sub_P Parameter: Plant Line Value: WS
  misc_feature: MA Experiment 20000327 PARAMETER Experiment Name: At_42deg_Heat_Sub_P Parameter: Temperature (deg C) Value: 42 vs. 22
  misc_feature: MA Experiment 20000327 PARAMETER Experiment Name: At_42deg_Heat_Sub_P Parameter: Timepoint (hr) Value: 1
  misc_feature: MA Experiment 20000327 PARAMETER Experiment Name: At_42deg_Heat_Sub_P Parameter: Tissue Value: Aerial
  misc_feature: MA Experiment ID: 20000347 Result: Up-regulated in Transcription
  misc_feature: MA Experiment 20000347 PARAMETER Experiment Name: At_2mM_SA_Sub_P Parameter: Age (day) Value: 14
  misc_feature: MA Experiment 20000347 PARAMETER Experiment Name: At_2mM_SA_Sub_P Parameter: Organism Value: A. thaliana
  misc_feature: MA Experiment 20000347 PARAMETER Experiment Name: At_2mM_SA_Sub_P Parameter: Plant Line Value: WS
  misc_feature: MA Experiment 20000347 PARAMETER Experiment Name: At_2mM_SA_Sub_P Parameter: Timepoint (hr) Value: 6
  misc_feature: MA Experiment 20000347 PARAMETER Experiment Name: At_2mM_SA_Sub_P Parameter: Tissue Value: Aerial
  misc_feature: MA Experiment 20000347 PARAMETER Experiment Name: At_2mM_SA_Sub_P Parameter: Treatment Value: 2mM SA vs. No Treatment
  misc_feature: MA Experiment ID: 20000355 Result: Up-regulated in Transcription
  misc_feature: MA Experiment 20000355 PARAMETER Experiment Name: At_Siliques_Sub_P Parameter: Age (day) Value: 21
  misc_feature: MA Experiment 20000355 PARAMETER Experiment Name: At_Siliques_Sub_P Parameter: Organism Value: A. thaliana
  misc_feature: MA Experiment 20000355 PARAMETER Experiment Name: At_Siliques_Sub_P Parameter: Plant Line Value: WS
  misc_feature: MA Experiment 20000355 PARAMETER Experiment Name: At_Siliques_Sub_P Parameter: Tissue Value: Less Than 5mm Siliques vs. Whole Plant
atggctggtaagggagaaggtccagcgatcggaatcgatcttggtactacgtactcttgtgttggagtatggcaacacgaccgtgttgagatcattgctaatgatcaaggtaacagaaccacaccttcgtacgttgctttcaccgactctgagcggttgatcggtgatgctgctaagaatcaagttgccatgaaccctgttaacaccgttttcgacgcaaagaggttgattggtcgtagattcagtgatgcatctgtccaaagcgacatgaagttttggcccttcaaggtaacccctggacaagcagacaaaccaatgattttcgtaaactacaaaggagaagagaaacaattcgctgcggaagaaatctcttcaatggttctcattaagatgcgtgagatcgctgaagcttaccttggttcttcgatcaagaacgctgtggtcactgttcctgcatacttcaatgattctcaacgtcaggctacaaaggacgctggtgtgattgctggtttgaatgttttgcgtatcatcaatgagccgacggctgctgctattgcttatggtcttgacaagaaggcaacaagtgttggaatcaagaacgtgttgatctttgatcttggtggtggtacttttgatgtttctcttcttaccattgaagaaggtatcttcgaggtcaaggcaactgctggtgacactcatcttggtggcgaagatttcgacaacagaatggttaaccattttgttcaagagtttaagaggaagaacaagaaggatatcagcggtgacgcaagagctctaaggagattgagaactgcctgcgagagagcaaagagaactctttcttcaaccgcgcaaacgactgttgaggttgactctttgtttgagggaattgatttctattctccaatcactcgtgcaaaatttgaagagatgaacatggatctctttaggaagtgtatggagcctgttatgaagtgtcttcgtgacagtaagatggacaaaagcatggtccatgatgttgtccttgtcggtggttctacccgtatccccaaagttcaacagcttttacaagatttcttcaatggtaaagagctatgcaagtctattaaccctgacgaggccgttgcatacggtgcagctgttcaggctgcgattctaagcggtgaagggaacgaaaaggttcaagatcttctcttgcttgatgtcacacctctctcccttggtattgaaaccattggtggtgtcatgaccactttgatccaaagaaacacaacaatcccagctaagaaggaacaggagttcaccactactgtagacaaccagcccgacgtgttgatccaagtctacgaaggtgagagagctagaaccatagacaacaacatccttggtcaattcgtgctttctggaatccctcctgctccacgaggtatccctcagtttactgtctgctttgacattgactccaatggtatcctcaatgtctctgctgaggacaaggccactggaaaaaagaacaagatcacaataactaatgacaaaggtcgtctgtccaaagacgatattgagaagatggtgcaagaagctgagaagtacaagtctgaggatgaggaacacaagaagaaggtggaagccaagaatggtcttgagaactacgcttacaacgtggggaacacactccgtgacatgggtgagaagcttccagctgcagacaagaagaagtttgaagactctattgaggaggtaatccaatggcttgacgataaccaattggctgaggctgacgagtttgaacacaagatgaaggagttggagagtgtctggagtaccatcatcactaagatgtatcaaggatga

SEQ ID NO: 80108 - protein, 617 aa, Arabidopsis thaliana
  peptide (1)..(617): Ceres Seq. ID no. 12654500
  misc_feature (1)..(617): Homolog of NCBI NO: 15241849 NR Description: dnaK-type molecular chaperone hsc70.1; protein At5g02500.1, supported by cDNA: gi_15982748 [Arabidopsis >gi|12643273|sp|P22953|HS71_ARATH Heat shock cognate 70 kDa
  misc_feature (1)..(617): Homolog of NCBI NO: 15241847 NR Description: dnaK-type molecular chaperone hsc70.1 - like; id: At5g02490.1, supported by cDNA: gi_20260505 [Arabidopsis
  misc_feature (1)..(617): Homolog of NCBI NO: 1072473 NR Description: dnaK-type molecular chaperone hsc70.1 - thaliana >gi|397482|emb|CAA52684.1| heat shock protein 70 cognate
  misc_feature (1)..(617): Homolog of NCBI NO: 2655420 NR Description: heat shock cognate protein HSC70 [Brassica napus]
MAGKGEGPAIGIDLGTTYSCVGVWQHDRVEIIANDQGNRTTPSYVAFTDSERLIGDAAKNQVAMNPVNTVFDAKRLIGRRFSDASVQSDMKFWPFKVTPGQADKPMIFVNYKGEEKQFAAEEISSMVLIKMREIAEAYLGSSIKNAVVTVPAYFNDSQRQATKDAGVIAGLNVLRIINEPTAAAIAYGLDKKATSVGIKNVLIFDLGGGTFDVSLLTIEEGIFEVKATAGDTHLGGEDFDNRMVNHFVQEFKRKNKKDISGDARALRRLRTACERAKRTLSSTAQTTVEVDSLFEGIDFYSPITRAKFEEMNMDLFRKCMEPVMKCLRDSKMDKSMVHDVVLVGGSTRIPKVQQLLQDFFNGKELCKSINPDEAVAYGAAVQAAILSGEGNEKVQDLLLLDVTPLSLGIETIGGVMTTLIQRNTTIPAKKEQEFTTTVDNQPDVLIQVYEGERARTIDNNILGQFVLSGIPPAPRGIPQFTVCFDIDSNGILNVSAEDKATGKKNKITITNDKGRLSKDDIEKMVQEAEKYKSEDEEHKKKVEAKNGLENYAYNVGNTLRDMGEKLPAADKKKFEDSIEEVIQWLDDNQLAEADEFEHKMKELESVWSTIITKMYQG

SEQ ID NO: 80109 - protein, 554 aa, Arabidopsis thaliana
  peptide (1)..(554): Ceres Seq. ID no. 12654501
  misc_feature (1)..(554): Homolog of NCBI NO: 15241849 NR Description: dnaK-type molecular chaperone hsc70.1; protein At5g02500.1, supported by cDNA: gi_15982748 [Arabidopsis >gi|12643273|sp|P22953|HS71_ARATH Heat shock cognate 70 kDa
  misc_feature (1)..(554): Homolog of NCBI NO: 15241847 NR Description: dnaK-type molecular chaperone hsc70.1 - like; id: At5g02490.1, supported by cDNA: gi_20260505 [Arabidopsis
  misc_feature (1)..(554): Homolog of NCBI NO: 1072473 NR Description: dnaK-type molecular chaperone hsc70.1 - thaliana >gi|397482|emb|CAA52684.1| heat shock protein 70 cognate
  misc_feature (1)..(554): Homolog of NCBI NO: 2655420 NR Description: heat shock cognate protein HSC70 [Brassica napus]
MNPVNTVFDAKRLIGRRFSDASVQSDMKFWPFKVTPGQADKPMIFVNYKGEEKQFAAEEISSMVLIKMREIAEAYLGSSIKNAVVTVPAYFNDSQRQATKDAGVIAGLNVLRIINEPTAAAIAYGLDKKATSVGIKNVLIFDLGGGTFDVSLLTIEEGIFEVKATAGDTHLGGEDFDNRMVNHFVQEFKRKNKKDISGDARALRRLRTACERAKRTLSSTAQTTVEVDSLFEGIDFYSPITRAKFEEMNMDLFRKCMEPVMKCLRDSKMDKSMVHDVVLVGGSTRIPKVQQLLQDFFNGKELCKSINPDEAVAYGAAVQAAILSGEGNEKVQDLLLLDVTPLSLGIETIGGVMTTLIQRNTTIPAKKEQEFTTTVDNQPDVLIQVYEGERARTIDNNILGQFVLSGIPPAPRGIPQFTVCFDIDSNGILNVSAEDKATGKKNKITITNDKGRLSKDDIEKMVQEAEKYKSEDEEHKKKVEAKNGLENYAYNVGNTLRDMGEKLPAADKKKFEDSIEEVIQWLDDNQLAEADEFEHKMKELESVWSTIITKMYQG

SEQ ID NO: 80110 - protein, 528 aa, Arabidopsis thaliana
  peptide (1)..(528): Ceres Seq. ID no. 12654502
  misc_feature (1)..(528): Homolog of NCBI NO: 15241849 NR Description: dnaK-type molecular chaperone hsc70.1; protein At5g02500.1, supported by cDNA: gi_15982748 [Arabidopsis >gi|12643273|sp|P22953|HS71_ARATH Heat shock cognate 70 kDa
  misc_feature (1)..(528): Homolog of NCBI NO: 15241847 NR Description: dnaK-type molecular chaperone hsc70.1 - like; id: At5g02490.1, supported by cDNA: gi_20260505 [Arabidopsis
  misc_feature (1)..(528): Homolog of NCBI NO: 1072473 NR Description: dnaK-type molecular chaperone hsc70.1 - thaliana >gi|397482|emb|CAA52684.1| heat shock protein 70 cognate
  misc_feature (1)..(528): Homolog of NCBI NO: 2655420 NR Description: heat shock cognate protein HSC70 [Brassica napus]
MKFWPFKVTPGQADKPMIFVNYKGEEKQFAAEEISSMVLIKMREIAEAYLGSSIKNAVVTVPAYFNDSQRQATKDAGVIAGLNVLRIINEPTAAAIAYGLDKKATSVGIKNVLIFDLGGGTFDVSLLTIEEGIFEVKATAGDTHLGGEDFDNRMVNHFVQEFKRKNKKDISGDARALRRLRTACERAKRTLSSTAQTTVEVDSLFEGIDFYSPITRAKFEEMNMDLFRKCMEPVMKCLRDSKMDKSMVHDVVLVGGSTRIPKVQQLLQDFFNGKELCKSINPDEAVAYGAAVQAAILSGEGNEKVQDLLLLDVTPLSLGIETIGGVMTTLIQRNTTIPAKKEQEFTTTVDNQPDVLIQVYEGERARTIDNNILGQFVLSGIPPAPRGIPQFTVCFDIDSNGILNVSAEDKATGKKNKITITNDKGRLSKDDIEKMVQEAEKYKSEDEEHKKKVEAKNGLENYAYNVGNTLRDMGEKLPAADKKKFEDSIEEVIQWLDDNQLAEADEFEHKMKELESVWSTIITKMYQG

SEQ ID NO: 80111 - DNA, 552 bp, Arabidopsis thaliana
  misc_feature (1)..(552): Ceres Seq. ID no. 12654503
  misc_feature: MA Experiment ID: 20000184 Result: Down-regulated in Transcription
  misc_feature: MA Experiment 20000184 PARAMETER Experiment Name: At_Shoots__P Parameter: Age (day) Value: 7
  misc_feature: MA Experiment 20000184 PARAMETER Experiment Name: At_Shoots__P Parameter: Tissue Value: Shoots vs. Whole Plant
atgtcgtcttcttcagtaattaaaccagaagacgttcttgaacatcttatgaacgatggtactatcgatgctctccgattaaggatcatcaatcagctcaaagccaatgaagagttaaagagcacaacgattaaaatggcggaagagagtaaagttctgaacacacctggtgctgagaaacagactaaaagagaactctttgatgctcttcgccaagaactcgaaggtccagtgctagagaaggcatcaaaatcagtttgggatttgattattgagaaagatgggttaggaaaagagataaacgaaacagtagaacgtgtcttttgtcatctaagtgggcaagaaccacctttttattcttcatcaaacgtggagaaaactccgatggagatagataaggagacggaggtgaaggatagctcaaagacgaaaccaaagaaaagaagtcttagtgaggtaaattcctctgaaggtatcgatgaagttgcaacgacgaagaagaagcaaggtgattcctcaactgtaactttagaatctaggaaaacgccttga

SEQ ID NO: 80112 - protein, 183 aa, Arabidopsis thaliana
  peptide (1)..(183): Ceres Seq. ID no. 12654504
  misc_feature (1)..(183): Homolog of NCBI NO: 15223534 NR Description: unknown protein; protein id: At1g56420.1
  misc_feature (1)..(166): Homolog of NCBI NO: 15222011 NR Description: hypothetical protein; protein id: At1g12530.1
  misc_feature (24)..(166): Homolog of NCBI NO: 9502392 NR Description: T12C24.7 [Arabidopsis thaliana]
  misc_feature (7)..(36): Homolog of NCBI NO: 9502392 NR Description: T12C24.7 [Arabidopsis thaliana]
MSSSSVIKPEDVLEHLMNDGTIDALRLRIINQLKANEELKSTTIKMAEESKVLNTPGAEKQTKRELFDALRQELEGPVLEKASKSVWDLIIEKDGLGKEINETVERVFCHLSGQEPPFYSSSNVEKTPMEIDKETEVKDSSKTKPKKRSLSEVNSSEGIDEVATTKKKQGDSSTVTLESRKTP

SEQ ID NO: 80113 - protein, 167 aa, Arabidopsis thaliana
  peptide (1)..(167): Ceres Seq. ID no. 12654505
  misc_feature (1)..(167): Homolog of NCBI NO: 15223534 NR Description: unknown protein; protein id: At1g56420.1
  misc_feature (1)..(150): Homolog of NCBI NO: 15222011 NR Description: hypothetical protein; protein id: At1g12530.1
  misc_feature (8)..(150): Homolog of NCBI NO: 9502392 NR Description: T12C24.7 [Arabidopsis thaliana]
  misc_feature (1)..(20): Homolog of NCBI NO: 9502392 NR Description: T12C24.7 [Arabidopsis thaliana]
MNDGTIDALRLRIINQLKANEELKSTTIKMAEESKVLNTPGAEKQTKRELFDALRQELEGPVLEKASKSVWDLIIEKDGLGKEINETVERVFCHLSGQEPPFYSSSNVEKTPMEIDKETEVKDSSKTKPKKRSLSEVNSSEGIDEVATTKKKQGDSSTVTLESRKTP

SEQ ID NO: 80114 - protein, 138 aa, Arabidopsis thaliana
  peptide (1)..(138): Ceres Seq. ID no. 12654506
  misc_feature (1)..(138): Homolog of NCBI NO: 15223534 NR Description: unknown protein; protein id: At1g56420.1
  misc_feature (1)..(121): Homolog of NCBI NO: 15222011 NR Description: hypothetical protein; protein id: At1g12530.1
  misc_feature (1)..(121): Homolog of NCBI NO: 9502392 NR Description: T12C24.7 [Arabidopsis thaliana]
MAEESKVLNTPGAEKQTKRELFDALRQELEGPVLEKASKSVWDLIIEKDGLGKEINETVERVFCHLSGQEPPFYSSSNVEKTPMEIDKETEVKDSSKTKPKKRSLSEVNSSEGIDEVATTKKKQGDSSTVTLESRKTP

SEQ ID NO: 80115 - DNA, 1144 bp, Arabidopsis thaliana
  misc_feature (1)..(1144): Ceres Seq. ID no. 12654507
  misc_feature: MA Experiment ID: 20000169 Result: Down-regulated in Transcription
  misc_feature: MA Experiment 20000169 PARAMETER Experiment Name: At_100uM_ABA_P Parameter: Age (day) Value: 14
  misc_feature: MA Experiment 20000169 PARAMETER Experiment Name: At_100uM_ABA_P Parameter: Organism Value: A. thaliana
  misc_feature: MA Experiment 20000169 PARAMETER Experiment Name: At_100uM_ABA_P Parameter: Plant Line Value: WS
  misc_feature: MA Experiment 20000169 PARAMETER Experiment Name: At_100uM_ABA_P Parameter: Timepoint (hr) Value: 6
  misc_feature: MA Experiment 20000169 PARAMETER Experiment Name: At_100uM_ABA_P Parameter: Tissue Value: Aerial
  misc_feature: MA Experiment 20000169 PARAMETER Experiment Name: At_100uM_ABA_P Parameter: Treatment Value: 100uM ABA vs. No Treatment
  misc_feature: MA Experiment ID: 20000171 Result: Down-regulated in Transcription
  misc_feature: MA Experiment 20000171 PARAMETER Experiment Name: At_42deg_Heat_P Parameter: Age (day) Value: 14
  misc_feature: MA Experiment 20000171 PARAMETER Experiment Name: At_42deg_Heat_P Parameter: Organism Value: A. thaliana
  misc_feature: MA Experiment 20000171 PARAMETER Experiment Name: At_42deg_Heat_P Parameter: Plant Line Value: WS
  misc_feature: MA Experiment 20000171 PARAMETER Experiment Name: At_42deg_Heat_P Parameter: Temperature (deg C) Value: 42 vs. 22
  misc_feature: MA Experiment 20000171 PARAMETER Experiment Name: At_42deg_Heat_P Parameter: Timepoint (hr) Value: 1
  misc_feature: MA Experiment 20000171 PARAMETER Experiment Name: At_42deg_Heat_P Parameter: Tissue Value: Aerial
  misc_feature: MA Experiment ID: 20000180 Result: Up-regulated in Transcription
  misc_feature: MA Experiment 20000180 PARAMETER Experiment Name: At_Germinating_Seeds_P Parameter: Age (hr) Value: 24 vs. 0
  misc_feature: MA Experiment 20000180 PARAMETER Experiment Name: At_Germinating_Seeds_P Parameter: Tissue Value: Germinating Seeds
  misc_feature: MA Experiment ID: 20000227 Result: Down-regulated in Transcription
  misc_feature: MA Experiment 20000227 PARAMETER Experiment Name: At_Root-Tips-vs-Tops_P Parameter: Tissue Value: Root Tips vs. Root Tops
  misc_feature: MA Experiment ID: 20000267 Result: Down-regulated in Transcription
  misc_feature: MA Experiment 20000267 PARAMETER Experiment Name: At_Drought_P Parameter: Age (day) Value: 7
  misc_feature: MA Experiment 20000267 PARAMETER Experiment Name: At_Drought_P Parameter: Organism Value: A. thaliana
  misc_feature: MA Experiment 20000267 PARAMETER Experiment Name: At_Drought_P Parameter: Plant Line Value: WS
  misc_feature: MA Experiment 20000267 PARAMETER Experiment Name: At_Drought_P Parameter: Timepoint (hr) Value: 6
  misc_feature: MA Experiment 20000267 PARAMETER Experiment Name: At_Drought_P Parameter: Tissue Value: Whole Plant
  misc_feature: MA Experiment 20000267 PARAMETER Experiment Name: At_Drought_P Parameter: Treatment Value: Drought vs. No Drought
  misc_feature: MA Experiment ID: 20000436 Result: Down-regulated in Transcription
  misc_feature: MA Experiment 20000436 PARAMETER Experiment Name: At_Drought_P Parameter: Age (day) Value: 7
  misc_feature: MA Experiment 20000436 PARAMETER Experiment Name: At_Drought_P Parameter: Organism Value: A. thaliana
  misc_feature: MA Experiment 20000436 PARAMETER Experiment Name: At_Drought_P Parameter: Plant Line Value: WS
  misc_feature: MA Experiment 20000436 PARAMETER Experiment Name: At_Drought_P Parameter: Timepoint (hr) Value: 12
  misc_feature: MA Experiment 20000436 PARAMETER Experiment Name: At_Drought_P Parameter: Tissue Value: Whole Plant
  misc_feature: MA Experiment 20000436 PARAMETER Experiment Name: At_Drought_P Parameter: Treatment Value: Drought vs. No Drought
  misc_feature: MA Experiment ID: 20000437 Result: Down-regulated in Transcription
  misc_feature: MA Experiment 20000437 PARAMETER Experiment Name: At_Drought_P Parameter: Age (day) Value: 8
  misc_feature: MA Experiment 20000437 PARAMETER Experiment Name: At_Drought_P Parameter: Organism Value: A. thaliana
  misc_feature: MA Experiment 20000437 PARAMETER Experiment Name: At_Drought_P Parameter: Plant Line Value: WS
  misc_feature: MA Experiment 20000437 PARAMETER Experiment Name: At_Drought_P Parameter: Timepoint (hr) Value: 24
  misc_feature: MA Experiment 20000437 PARAMETER Experiment Name: At_Drought_P Parameter: Tissue Value: Whole Plant
  misc_feature: MA Experiment 20000437 PARAMETER Experiment Name: At_Drought_P Parameter: Treatment Value: Drought vs. No Drought
  misc_feature: MA Experiment ID: 20000438 Result: Up-regulated in Transcription
  misc_feature: MA Experiment 20000438 PARAMETER Experiment Name: At_Shoots__P Parameter: Age (day) Value: 14
  misc_feature: MA Experiment 20000438 PARAMETER Experiment Name: At_Shoots__P Parameter: Tissue Value: Shoots vs. Whole Plant
  misc_feature: MA Experiment ID: 20000452 Result: Up-regulated in Transcription
  misc_feature: MA Experiment 20000452 PARAMETER Experiment Name: At_CS6879_Shoots-Roots_P Parameter: Age (day) Value: 14
  misc_feature: MA Experiment 20000452 PARAMETER Experiment Name: At_CS6879_Shoots-Roots_P Parameter: Organism Value: A. thaliana
  misc_feature: MA Experiment 20000452 PARAMETER Experiment Name: At_CS6879_Shoots-Roots_P Parameter: Plant Line Value: CS6879 vs. WS
  misc_feature: MA Experiment 20000452 PARAMETER Experiment Name: At_CS6879_Shoots-Roots_P Parameter: Tissue Value: Shoots
  misc_feature: MA Experiment ID: 20000456 Result: Up-regulated in Transcription
  misc_feature: MA Experiment 20000456 PARAMETER Experiment Name: At_100uM_BA_P Parameter: Age (day) Value: 14
  misc_feature: MA Experiment 20000456 PARAMETER Experiment Name: At_100uM_BA_P Parameter: Organism Value: A. thaliana
  misc_feature: MA Experiment 20000456 PARAMETER Experiment Name: At_100uM_BA_P Parameter: Plant Line Value: WS
  misc_feature: MA Experiment 20000456 PARAMETER Experiment Name: At_100uM_BA_P Parameter: Timepoint (hr) Value: 6
  misc_feature: MA Experiment 20000456 PARAMETER Experiment Name: At_100uM_BA_P Parameter: Tissue Value: Aerial
  misc_feature: MA Experiment 20000456 PARAMETER Experiment Name: At_100uM_BA_P Parameter: Treatment Value: 100uM BA vs. No Treatment
  misc_feature: MA Experiment ID: 20000460 Result: Up-regulated in Transcription
  misc_feature: MA Experiment 20000460 PARAMETER Experiment Name: At_10percent_PEG_P Parameter: Age (day) Value: 12
  misc_feature: MA Experiment 20000460 PARAMETER Experiment Name: At_10percent_PEG_P Parameter: Organism Value: A. thaliana
  misc_feature: MA Experiment 20000460 PARAMETER Experiment Name: At_10percent_PEG_P Parameter: Plant Line Value: WS
  misc_feature: MA Experiment 20000460 PARAMETER Experiment Name: At_10percent_PEG_P Parameter: Timepoint (day) Value: 12
  misc_feature: MA Experiment 20000460 PARAMETER Experiment Name: At_10percent_PEG_P Parameter: Tissue Value: Whole Plant
  misc_feature: MA Experiment 20000460 PARAMETER Experiment Name: At_10percent_PEG_P Parameter: Treatment Value: 10percent PEG vs. No Treatment
  misc_feature: MA Experiment ID: 20000527 Result: Up-regulated in Transcription
  misc_feature: MA Experiment 20000527 PARAMETER Experiment Name: At_10percent_PEG_P Parameter: Age (day) Value: 20
  misc_feature: MA Experiment 20000527 PARAMETER Experiment Name: At_10percent_PEG_P Parameter: Organism Value: A. thaliana
  misc_feature: MA Experiment 20000527 PARAMETER Experiment Name: At_10percent_PEG_P Parameter: Plant Line Value: WS
  misc_feature: MA Experiment 20000527 PARAMETER Experiment Name: At_10percent_PEG_P Parameter: Timepoint (day) Value: 20
  misc_feature: MA Experiment 20000527 PARAMETER Experiment Name: At_10percent_PEG_P Parameter: Tissue Value: Whole Plant
  misc_feature: MA Experiment 20000527 PARAMETER Experiment Name: At_10percent_PEG_P Parameter: Treatment Value: 10percent PEG vs. No Treatment
  misc_feature: MA Experiment ID: 20001247 Result: Down-regulated in Transcription
  misc_feature: MA Experiment 20001247 PARAMETER Experiment Name: At_Far-red-induction_P Parameter: Age (day) Value: 7
  misc_feature: MA Experiment 20001247 PARAMETER Experiment Name: At_Far-red-induction_P Parameter: Light Value: Far-red vs. White
  misc_feature: MA Experiment 20001247 PARAMETER Experiment Name: At_Far-red-induction_P Parameter: Organism Value: A. thaliana
  misc_feature: MA Experiment 20001247 PARAMETER Experiment Name: At_Far-red-induction_P Parameter: Plant Line Value: Columbia
  misc_feature: MA Experiment 20001247 PARAMETER Experiment Name: At_Far-red-induction_P Parameter: Timepoint (hr) Value: 1
  misc_feature: MA Experiment 20001247 PARAMETER Experiment Name: At_Far-red-induction_P Parameter: Tissue Value: Whole Plant
  misc_feature: MA Experiment ID: 20001248 Result: Down-regulated in Transcription
  misc_feature: MA Experiment 20001248 PARAMETER Experiment Name: At_Far-red-induction_P Parameter: Age (day) Value: 7
  misc_feature: MA Experiment 20001248 PARAMETER Experiment Name: At_Far-red-induction_P Parameter: Light Value: Far-red vs. White
  misc_feature: MA Experiment 20001248 PARAMETER Experiment Name: At_Far-red-induction_P Parameter: Organism Value: A. thaliana
  misc_feature: MA Experiment 20001248 PARAMETER Experiment Name: At_Far-red-induction_P Parameter: Plant Line Value: Columbia
  misc_feature: MA Experiment 20001248 PARAMETER Experiment Name: At_Far-red-induction_P Parameter: Timepoint (hr) Value: 4
  misc_feature: MA Experiment 20001248 PARAMETER Experiment Name: At_Far-red-induction_P Parameter: Tissue Value: Whole Plant
  misc_feature: MA Experiment ID: 20001450 Result: Down-regulated in Transcription
  misc_feature: MA Experiment 20001450 PARAMETER Experiment Name: At_Far-red-induction_P Parameter: Age (day) Value: 7
  misc_feature: MA Experiment 20001450 PARAMETER Experiment Name: At_Far-red-induction_P Parameter: Light Value: Far-red vs. White
  misc_feature: MA Experiment 20001450 PARAMETER Experiment Name: At_Far-red-induction_P Parameter: Organism Value: A. thaliana
  misc_feature: MA Experiment 20001450 PARAMETER Experiment Name: At_Far-red-induction_P Parameter: Plant Line Value: Columbia
  misc_feature: MA Experiment 20001450 PARAMETER Experiment Name: At_Far-red-induction_P Parameter: Timepoint (hr) Value: 8
  misc_feature: MA Experiment 20001450 PARAMETER Experiment Name: At_Far-red-induction_P Parameter: Tissue Value: Whole Plant
  misc_feature: MA Experiment ID: 20001451 Result: Down-regulated in Transcription
  misc_feature: MA Experiment 20001451 PARAMETER Experiment Name: At_Far-red-induction_P Parameter: Age (day) Value: 7
  misc_feature: MA Experiment 20001451 PARAMETER Experiment Name: At_Far-red-induction_P Parameter: Light Value: Far-red vs. White
  misc_feature: MA Experiment 20001451 PARAMETER Experiment Name: At_Far-red-induction_P Parameter: Organism Value: A. thaliana
  misc_feature: MA Experiment 20001451 PARAMETER Experiment Name: At_Far-red-induction_P Parameter: Plant Line Value: Columbia
  misc_feature: MA Experiment 20001451 PARAMETER Experiment Name: At_Far-red-induction_P Parameter: Timepoint (hr) Value: 24
  misc_feature: MA Experiment 20001451 PARAMETER Experiment Name: At_Far-red-induction_P Parameter: Tissue Value: Whole Plant
  misc_feature: MA Experiment ID: 20001554 Result: Down-regulated in Transcription
  misc_feature: MA Experiment 20001554 PARAMETER Experiment Name: At_Drought_Soil_Dry_P Parameter: Age (day) Value: 21
  misc_feature: MA Experiment 20001554 PARAMETER Experiment Name: At_Drought_Soil_Dry_P Parameter: Organism Value: A. thaliana
  misc_feature: MA Experiment 20001554 PARAMETER Experiment Name: At_Drought_Soil_Dry_P Parameter: Plant Line Value: WS
  misc_feature: MA Experiment 20001554 PARAMETER Experiment Name: At_Drought_Soil_Dry_P Parameter: Post Timepoint (hr) Value: None
  misc_feature: MA Experiment 20001554 PARAMETER Experiment Name: At_Drought_Soil_Dry_P Parameter: Post-Treatment Value: None
  misc_feature: MA Experiment 20001554 PARAMETER Experiment Name: At_Drought_Soil_Dry_P Parameter: Timepoint (day) Value: 7
  misc_feature: MA Experiment 20001554 PARAMETER Experiment Name: At_Drought_Soil_Dry_P Parameter: Treatment Value: Drought vs. No Drought
  misc_feature: MA Experiment ID: 20001555 Result: Down-regulated in Transcription
  misc_feature: MA Experiment 20001555 PARAMETER Experiment Name: At_Drought_Soil_Dry_P Parameter: Age (day) Value: 24
  misc_feature: MA Experiment 20001555 PARAMETER Experiment Name: At_Drought_Soil_Dry_P Parameter: Organism Value: A. thaliana
  misc_feature: MA Experiment 20001555 PARAMETER Experiment Name: At_Drought_Soil_Dry_P Parameter: Plant Line Value: WS
  misc_feature: MA Experiment 20001555 PARAMETER Experiment Name: At_Drought_Soil_Dry_P Parameter: Post Timepoint (hr) Value: None
  misc_feature: MA Experiment 20001555 PARAMETER Experiment Name: At_Drought_Soil_Dry_P Parameter: Post-Treatment Value: None
  misc_feature: MA Experiment 20001555 PARAMETER Experiment Name: At_Drought_Soil_Dry_P Parameter: Timepoint (day) Value: 10
  misc_feature: MA Experiment 20001555 PARAMETER Experiment Name: At_Drought_Soil_Dry_P Parameter: Treatment Value: Drought vs. No Drought
  misc_feature: MA Experiment ID: 20001755 Result: Up-regulated in Transcription
  misc_feature: MA Experiment 20001755 PARAMETER Experiment Name: At_50mM_NH4NO3_L-to-H_P Parameter: Timepoint (hr) Value: 2
  misc_feature: MA Experiment 20001755 PARAMETER Experiment Name: At_50mM_NH4NO3_L-to-H_P Parameter: Tissue Value: Leaf
  misc_feature: MA Experiment 20001755 PARAMETER Experiment Name: At_50mM_NH4NO3_L-to-H_P Parameter: Treatment Value: 50mM NH4NO3 vs 100mM Mannitol
  misc_feature: MA Experiment ID: 20001757 Result: Up-regulated in Transcription
  misc_feature: MA Experiment 20001757 PARAMETER Experiment Name: At_50mM_NH4NO3_L-to-H_P Parameter: Timepoint (hr) Value: 6
  misc_feature: MA Experiment 20001757 PARAMETER Experiment Name: At_50mM_NH4NO3_L-to-H_P Parameter: Tissue Value: Leaf
  misc_feature: MA Experiment 20001757 PARAMETER Experiment Name: At_50mM_NH4NO3_L-to-H_P Parameter: Treatment Value: 50mM NH4NO3 vs 100mM Mannitol
  misc_feature: MA Experiment ID: 20001904 Result: Down-regulated in Transcription
  misc_feature: MA Experiment 20001904 PARAMETER Experiment Name: At_Drought_Reproduction_P Parameter: Age (day) Value: 37
  misc_feature: MA Experiment 20001904 PARAMETER Experiment Name: At_Drought_Reproduction_P Parameter: Organism Value: A. thaliana
  misc_feature: MA Experiment 20001904 PARAMETER Experiment Name: At_Drought_Reproduction_P Parameter: Plant Line Value: WS
  misc_feature: MA Experiment 20001904 PARAMETER Experiment Name: At_Drought_Reproduction_P Parameter: Timepoint (day) Value: 7
  misc_feature: MA Experiment 20001904 PARAMETER Experiment Name: At_Drought_Reproduction_P Parameter: Tissue Value: Rosettes
  misc_feature: MA Experiment 20001904 PARAMETER Experiment Name: At_Drought_Reproduction_P Parameter: Treatment Value: Drought vs. No Drought
acctgaaaaacataactcttaagaaagaaaaaaagttcacttttcattttcttttctcgtaaaacctcatagtgtcgacatgggttattgccaagacgaccaactcgtaaacaagatctgcgatctttacgaaaagatctcgaagcttgagaccctaaagccttgtgaagatgtcgacactctcttcaagcagctcgtgtccacatgcataccaccaaaccctaacatcgacgtcaccaagatgtctgaaaacatccaagagatgagatcaaacctcatcaaaatctgtggtgaggctgaaggttacttagagcatcacttctcttcaatcttaacctcttttgaagataacccccttcatcatttgaatctttttccttactacaacaactacctcaaactaagcaagctcgagtttgatctcctcgaacagaacctaaacggttttgttccaaggactgtagctttcattggctctggtcctctccctcttacttccgtcgttcttgcctcttcccatctcaaagactcgatctttcataactttgacatcgacccatcagcgaatatggtagcagctcgtttggtttcgtctgatcctgatctttctcaacgtatgtttttccatactgttgatataatggatgtaaccgagagcttgaagggcttcgacgttgtgttcttggctgctcttgtagggatggataaaaaggagaaggttaaggtggtcgagcatcttgagaaacacatgtctcctggtgctttgctcatgctgagaagcgctcatggacctagagcttttctctatccaatcgttgagccttgtgatctcgaaggtttcgaagttttatcggtttatcaccctaccgatgaagttatcaactccattgtaatctcaaggaagctaggtgaagatgctaatggtgttgttcatgatcatatagatcaagcttcggatctcgcgtgtaactgttccaagatccacgtgattatgaacaagaagaagagcattatcgaggagttcgcaggtgctaatgaagaacaacttacctagaaaaatgctgtgttcttgatcaatctatgatgtctttttttttttaattacgaaaatgttggctgtttttgctacagtcttgttcttgtc

SEQ ID NO: 80116 - protein, 324 aa, Arabidopsis thaliana
  peptide (1)..(324): Ceres Seq. ID no. 12654508
  misc_feature (4)..(281): Pfam Name: Nicotianamine synthase protein Pfam Description: Nicotianamine synthase protein
  misc_feature (1)..(324): Homolog of NCBI NO: 15223535 NR Description: nicotianamine synthase, putative; protein id: supported by cDNA: gi_20466583 [Arabidopsis thaliana] Probable nicotianamine synthase 4 thaliana
  misc_feature (1)..(324): Homolog of NCBI NO: 40782199 NR Description: putative nicotianamine synthase [Arabidopsis
  misc_feature (1)..(324): Homolog of NCBI NO: 15217462 NR Description: nicotianamine synthase, putative; protein id:
  misc_feature (1)..(324): Homolog of NCBI NO: 27528464 NR Description: nicotianamine synthase [Thlaspi caerulescens]
  misc_feature (4)..(316): Homolog of NCBI NO: 4220614 NR Description: nicotianamine synathase [Arabidopsis thaliana]
  misc_feature (4)..(316): Homolog of NCBI NO: 15241120 NR Description: nicotianamine synthase, putative; protein id: [Arabidopsis thaliana] >gi|27151632|sp|Q9FKT9|NAS2_ARATH
  misc_feature (4)..(316): Homolog of NCBI NO: 15238376 NR Description: nicotianamine synthase, putative; protein id:
  misc_feature (4)..(316): Homolog of NCBI NO: 4220612 NR Description: nicotianamine synthase [Arabidopsis thaliana]
  misc_feature (9)..(316): Homolog of NCBI NO: 27151627 NR Description: Nicotianamine synthase
  misc_feature (9)..(320): Homolog of NCBI NO: 19911064 NR Description: ZmNAS2 [Zea mays]
MGYCQDDQLVNKICDLYEKISKLETLKPCEDVDTLFKQLVSTCIPPNPNIDVTKMSENIQEMRSNLIKICGEAEGYLEHHFSSILTSFEDNPLHHLNLFPYYNNYLKLSKLEFDLLEQNLNGFVPRTVAFIGSGPLPLTSVVLASSHLKDSIFHNFDIDPSANMVAARLVSSDPDLSQRMFFHTVDIMDVTESLKGFDVVFLAALVGMDKKEKVKVVEHLEKHMSPGALLMLRSAHGPRAFLYPIVEPCDLEGFEVLSVYHPTDEVINSIVISRKLGEDANGVVHDHIDQASDLACNCSKIHVIMNKKKSIIEEFAGANEEQLT

SEQ ID NO: 80117 - protein, 270 aa, Arabidopsis thaliana
  peptide (1)..(270): Ceres Seq. ID no. 12654509
  misc_feature (1)..(227): Pfam Name: Nicotianamine synthase protein Pfam Description: Nicotianamine synthase protein
  misc_feature (1)..(270): Homolog of NCBI NO: 15223535 NR Description: nicotianamine synthase, putative; protein id: supported by cDNA: gi_20466583 [Arabidopsis thaliana] Probable nicotianamine synthase 4 thaliana
  misc_feature (1)..(270): Homolog of NCBI NO: 40782199 NR Description: putative nicotianamine synthase [Arabidopsis
  misc_feature (1)..(270): Homolog of NCBI NO: 15217462 NR Description: nicotianamine synthase, putative; protein id:
  misc_feature (1)..(270): Homolog of NCBI NO: 27528464 NR Description: nicotianamine synthase [Thlaspi caerulescens]
  misc_feature (1)..(262): Homolog of NCBI NO: 4220614 NR Description: nicotianamine synathase [Arabidopsis thaliana]
  misc_feature (1)..(262): Homolog of NCBI NO: 15241120 NR Description: nicotianamine synthase, putative; protein id: [Arabidopsis thaliana] >gi|27151632|sp|Q9FKT9|NAS2_ARATH
  misc_feature (1)..(262): Homolog of NCBI NO: 15238376 NR Description: nicotianamine synthase, putative; protein id:
  misc_feature (1)..(262): Homolog of NCBI NO: 4220612 NR Description: nicotianamine synthase [Arabidopsis thaliana]
  misc_feature (1)..(262): Homolog of NCBI NO: 27151627 NR Description: Nicotianamine synthase
  misc_feature (1)..(266): Homolog of NCBI NO: 19911064 NR Description: ZmNAS2 [Zea mays]
MSENIQEMRSNLIKICGEAEGYLEHHFSSILTSFEDNPLHHLNLFPYYNNYLKLSKLEFDLLEQNLNGFVPRTVAFIGSGPLPLTSVVLASSHLKDSIFHNFDIDPSANMVAARLVSSDPDLSQRMFFHTVDIMDVTESLKGFDVVFLAALVGMDKKEKVKVVEHLEKHMSPGALLMLRSAHGPRAFLYPIVEPCDLEGFEVLSVYHPTDEVINSIVISRKLGEDANGVVHDHIDQASDLACNCSKIHVIMNKKKSIIEEFAGANEEQLT

SEQ ID NO: 80118 - protein, 263 aa, Arabidopsis thaliana
  peptide (1)..(263): Ceres Seq. ID no. 12654510
  misc_feature (1)..(220): Pfam Name: Nicotianamine synthase protein Pfam Description: Nicotianamine synthase protein
  misc_feature (1)..(263): Homolog of NCBI NO: 15223535 NR Description: nicotianamine synthase, putative; protein id: supported by cDNA: gi_20466583 [Arabidopsis thaliana] Probable nicotianamine synthase 4 thaliana
  misc_feature (1)..(263): Homolog of NCBI NO: 40782199 NR Description: putative nicotianamine synthase [Arabidopsis
  misc_feature (1)..(263): Homolog of NCBI NO: 15217462 NR Description: nicotianamine synthase, putative; protein id:
  misc_feature (1)..(263): Homolog of NCBI NO: 27528464 NR Description: nicotianamine synthase [Thlaspi caerulescens]
  misc_feature (1)..(255): Homolog of NCBI NO: 4220614 NR Description: nicotianamine synathase [Arabidopsis thaliana]
  misc_feature (1)..(255): Homolog of NCBI NO: 15241120 NR Description: nicotianamine synthase, putative; protein id: [Arabidopsis thaliana] >gi|27151632|sp|Q9FKT9|NAS2_ARATH
  misc_feature (1)..(255): Homolog of NCBI NO: 15238376 NR Description: nicotianamine synthase, putative; protein id:
  misc_feature (1)..(255): Homolog of NCBI NO: 4220612 NR Description: nicotianamine synthase [Arabidopsis thaliana]
  misc_feature (1)..(255): Homolog of NCBI NO: 27151627 NR Description: Nicotianamine synthase
  misc_feature (1)..(259): Homolog of NCBI NO: 19911064 NR Description: ZmNAS2 [Zea mays]
MRSNLIKICGEAEGYLEHHFSSILTSFEDNPLHHLNLFPYYNNYLKLSKLEFDLLEQNLNGFVPRTVAFIGSGPLPLTSVVLASSHLKDSIFHNFDIDPSANMVAARLVSSDPDLSQRMFFHTVDIMDVTESLKGFDVVFLAALVGMDKKEKVKVVEHLEKHMSPGALLMLRSAHGPRAFLYPIVEPCDLEGFEVLSVYHPTDEVINSIVISRKLGEDANGVVHDHIDQASDLACNCSKIHVIMNKKKSIIEEFAGANEEQLT

SEQ ID NO: 80119 - DNA, 1491 bp, Arabidopsis thaliana
  misc_feature (1)..(1491): Ceres Seq. ID no. 12654534
  misc_feature: MA Experiment ID: 20001451 Result: Down-regulated in Transcription
  misc_feature: MA Experiment 20001451 PARAMETER Experiment Name: At_Far-red-induction_P Parameter: Age (day) Value: 7
  misc_feature: MA Experiment 20001451 PARAMETER Experiment Name: At_Far-red-induction_P Parameter: Light Value: Far-red vs. White
  misc_feature: MA Experiment 20001451 PARAMETER Experiment Name: At_Far-red-induction_P Parameter: Organism Value: A. thaliana
  misc_feature: MA Experiment 20001451 PARAMETER Experiment Name: At_Far-red-induction_P Parameter: Plant Line Value: Columbia
  misc_feature: MA Experiment 20001451 PARAMETER Experiment Name: At_Far-red-induction_P Parameter: Timepoint (hr) Value: 24
  misc_feature: MA Experiment 20001451 PARAMETER Experiment Name: At_Far-red-induction_P Parameter: Tissue Value: Whole Plant
  misc_feature: MA Experiment ID: 20001911 Result: Down-regulated in Transcription
  misc_feature: MA Experiment 20001911 PARAMETER Experiment Name: At_Drought_Reproduction_P Parameter: Age (day) Value: 40
  misc_feature: MA Experiment 20001911 PARAMETER Experiment Name: At_Drought_Reproduction_P Parameter: Organism Value: A. thaliana
  misc_feature: MA Experiment 20001911 PARAMETER Experiment Name: At_Drought_Reproduction_P Parameter: Plant Line Value: WS
  misc_feature: MA Experiment 20001911 PARAMETER Experiment Name: At_Drought_Reproduction_P Parameter: Timepoint (day) Value: 10
  misc_feature: MA Experiment 20001911 PARAMETER Experiment Name: At_Drought_Reproduction_P Parameter: Tissue Value: Flowers
  misc_feature: MA Experiment 20001911 PARAMETER Experiment Name: At_Drought_Reproduction_P Parameter: Treatment Value: Drought vs. No Drought
gcagattcacgcatcgaggttagagatgcttcaatgtatctttctcatctccgattctggagaggtaatgctagagaagcagcttactggtcatcgcgttgatagatccatatgtgcttggttctgggatcaatatatttctcaaggcgattcctttaaggcacttccagtgattgcttcaccaacacattatctatttcaaattgttcgtgacggaattacgttcttagcttgtagtcaagttgaaatgccaccgttgatggcaatcgagagttgctgatgttttgtctgagtaccttggtgggctaaatgaagatctcattaaggataatttcatcattgtctatgagcttttggatgagatgatcgataatggtttccctctcacaacagaacctagtatcctgaaggaaatgatagctccaccgaatctagtcagcaaaatgttgagtgttgtaacgggaaatgcttcgaatgttagtgacacgcttccgagtggggcgggctcttgtgttccttggcgaccgacagatccaaagtactctagcaacgaagtttatgtcgaccttgttgaagagatggatgcaattgtaaacagggatggagaattggtaaaatgcgagatttatggcgaagtccaaatgaattctcagctcactggttttccagatttgacattgtcgtttgcgaatccatcaatcctagaagacatgaggtttcacccgtgtgtccgctacagaccatgggaatctcatcaagttctctcctttgtccctccagatggagagttcaagcttatgagttacagggtgaagaagctaaagaacacacctgtatatgtaaaacctcaaataacatcagattcgggtacatgtcgaattagcgtgctagtgggaatccgaagcgatccagggaaaacaattgagtcgataaccttgagtttccagcttcctcactgtgtatcatctgcagatctctcatcaaatcatggaactgtaacaatcctctctaacaagacatgtacatggacaatcgggcgaatcccaaaggacaaaactccgtgtttgtcgggaacactagcgctggaaccagggttagaacggcttcacgtgtttccgacattcaaactcgggtttaagataatgggcattgctctttctggcctaagaatcgagaaacttgatcttcaaactatccctcctcgtttgtacaaagggtttcgtgctcagacacgcgctggtgagttcgatgtcaggttgtagctttctaatacggtcatgccatgccggtcaaaagtcttgactttgggctcctgtgaattgtttgtgccaaatggttttatacatccaatggtttttgtgatctaagttatgatattataagggctctcatcgctaacaatccaaacttgatgtaactatgaattctcattccatttttttttatcgaatatttcgattctccgtggcaatgaaagattctgccgatgtt

SEQ ID NO: 80120 - protein, 299 aa, Arabidopsis thaliana
  peptide (1)..(299): Ceres Seq. ID no. 12654535
  misc_feature (1)..(299): Pfam Name: Adaptor complexes medium subunit family Pfam Description: Adaptor complexes medium subunit family
  misc_feature (1)..(299): Homolog of NCBI NO: 25404135 NR Description: probable clathrin-associated adaptor protein
  misc_feature (1)..(299): Homolog of NCBI NO: 22330286 NR Description: clathrin-associated protein, putative; protein At1g56590.1, supported by cDNA: gi_20466507 [Arabidopsis
  misc_feature (1)..(298): Homolog of NCBI NO: 18959246 NR Description: adaptor-related protein complex 3, mu 2 subunit
  misc_feature (1)..(298): Homolog of NCBI NO: 5803000 NR Description: adaptor-related protein complex 3, mu 2 subunit; associated protein AP47 homolog 2; clathrin coat assembly protein
  misc_feature (1)..(298): Homolog of NCBI NO: 17505212 NR Description: adaptor-related protein complex 3, mu 2 subunit
  misc_feature (1)..(298): Homolog of NCBI NO: 20073160 NR Description: adaptor-related protein complex 3, mu 2 subunit
  misc_feature (1)..(298): Homolog of NCBI NO: 6912240 NR Description: adaptor-related protein complex 3, mu 1 subunit;
  misc_feature (1)..(298): Homolog of NCBI NO: 34596214 NR Description: adaptor protein complex 3 Mu3A [Cricetulus
  misc_feature (1)..(298): Homolog of NCBI NO: 20531985 NR Description: Adapter-related protein complex 3 mu 1 subunit
  misc_feature (1)..(298): Homolog of NCBI NO: 20270043 NR Description: adaptor-related protein complex AP-3, mu 1 clathrin adaptor protein mu3A; EST C78982 [Mus musculus]
MIDNGFPLTTEPSILKEMIAPPNLVSKMLSVVTGNASNVSDTLPSGAGSCVPWRPTDPKYSSNEVYVDLVEEMDAIVNRDGELVKCEIYGEVQMNSQLTGFPDLTLSFANPSILEDMRFHPCVRYRPWESHQVLSFVPPDGEFKLMSYRVKKLKNTPVYVKPQITSDSGTCRISVLVGIRSDPGKTIESITLSFQLPHCVSSADLSSNHGTVTILSNKTCTWTIGRIPKDKTPCLSGTLALEPGLERLHVFPTFKLGFKIMGIALSGLRIEKLDLQTIPPRLYKGFRAQTRAGEFDVRL

SEQ ID NO: 80121 - protein, 282 aa, Arabidopsis thaliana
  peptide (1)..(282): Ceres Seq. ID no. 12654536
  misc_feature (1)..(282): Pfam Name: Adaptor complexes medium subunit family Pfam Description: Adaptor complexes medium subunit family
  misc_feature (1)..(282): Homolog of NCBI NO: 25404135 NR Description: probable clathrin-associated adaptor protein
  misc_feature (1)..(282): Homolog of NCBI NO: 22330286 NR Description: clathrin-associated protein, putative; protein At1g56590.1, supported by cDNA: gi_20466507 [Arabidopsis
  misc_feature (1)..(281): Homolog of NCBI NO: 18959246 NR Description: adaptor-related protein complex 3, mu 2 subunit
  misc_feature (1)..(281): Homolog of NCBI NO: 5803000 NR Description: adaptor-related protein complex 3, mu 2 subunit; associated protein AP47 homolog 2; clathrin coat assembly protein
  misc_feature (1)..(281): Homolog of NCBI NO: 17505212 NR Description: adaptor-related protein complex 3, mu 2 subunit
  misc_feature (1)..(281): Homolog of NCBI NO: 20073160 NR Description: adaptor-related protein complex 3, mu 2 subunit
  misc_feature (1)..(281): Homolog of NCBI NO: 6912240 NR Description: adaptor-related protein complex 3, mu 1 subunit;
  misc_feature (1)..(281): Homolog of NCBI NO: 34596214 NR Description: adaptor protein complex 3 Mu3A [Cricetulus
  misc_feature (1)..(281): Homolog of NCBI NO: 20531985 NR Description: Adapter-related protein complex 3 mu 1 subunit
  misc_feature (1)..(281): Homolog of NCBI NO: 20270043 NR Description: adaptor-related protein complex AP-3, mu 1 clathrin adaptor protein mu3A; EST C78982 [Mus musculus]
MIAPPNLVSKMLSVVTGNASNVSDTLPSGAGSCVPWRPTDPKYSSNEVYVDLVEEMDAIVNRDGELVKCEIYGEVQMNSQLTGFPDLTLSFANPSILEDMRFHPCVRYRPWESHQVLSFVPPDGEFKLMSYRVKKLKNTPVYVKPQITSDSGTCRISVLVGIRSDPGKTIESITLSFQLPHCVSSADLSSNHGTVTILSNKTCTWTIGRIPKDKTPCLSGTLALEPGLERLHVFPTFKLGFKIMGIALSGLRIEKLDLQTIPPRLYKGFRAQTRAGEFDVRL

SEQ ID NO: 80122 - protein, 272 aa, Arabidopsis thaliana
  peptide (1)..(272): Ceres Seq. ID no. 12654537
  misc_feature (1)..(272): Pfam Name: Adaptor complexes medium subunit family Pfam Description: Adaptor complexes medium subunit family
  misc_feature (1)..(272): Homolog of NCBI NO: 25404135 NR Description: probable clathrin-associated adaptor protein
  misc_feature (1)..(272): Homolog of NCBI NO: 22330286 NR Description: clathrin-associated protein, putative; protein At1g56590.1, supported by cDNA: gi_20466507 [Arabidopsis
  misc_feature (1)..(271): Homolog of NCBI NO: 18959246 NR Description: adaptor-related protein complex 3, mu 2 subunit
  misc_feature (1)..(271): Homolog of NCBI NO: 5803000 NR Description: adaptor-related protein complex 3, mu 2 subunit; associated protein AP47 homolog 2; clathrin coat assembly protein
  misc_feature (1)..(271): Homolog of NCBI NO: 17505212 NR Description: adaptor-related protein complex 3, mu 2 subunit
  misc_feature (1)..(271): Homolog of NCBI NO: 20073160 NR Description: adaptor-related protein complex 3, mu 2 subunit
  misc_feature (1)..(271): Homolog of NCBI NO: 6912240 NR Description: adaptor-related protein complex 3, mu 1 subunit;
  misc_feature (1)..(271): Homolog of NCBI NO: 34596214 NR Description: adaptor protein complex 3 Mu3A [Cricetulus
  misc_feature (1)..(271): Homolog of NCBI NO: 20531985 NR Description: Adapter-related protein complex 3 mu 1 subunit
  misc_feature (1)..(271): Homolog of NCBI NO: 20270043 NR Description: adaptor-related protein complex AP-3, mu 1 clathrin adaptor protein mu3A; EST C78982 [Mus musculus]
MLSVVTGNASNVSDTLPSGAGSCVPWRPTDPKYSSNEVYVDLVEEMDAIVNRDGELVKCEIYGEVQMNSQLTGFPDLTLSFANPSILEDMRFHPCVRYRPWESHQVLSFVPPDGEFKLMSYRVKKLKNTPVYVKPQITSDSGTCRISVLVGIRSDPGKTIESITLSFQLPHCVSSADLSSNHGTVTILSNKTCTWTIGRIPKDKTPCLSGTLALEPGLERLHVFPTFKLGFKIMGIALSGLRIEKLDLQTIPPRLYKGFRAQTRAGEFDVRL

SEQ ID NO: 80123 - DNA, 1381 bp, Arabidopsis thaliana
  misc_feature (1)..(1381): Ceres Seq. ID no. 12654538
  misc_feature: MA Experiment ID: 20000314 Result: Down-regulated in Transcription
  misc_feature: MA Experiment 20000314 PARAMETER Experiment Name: At_14day_Shoots-Roots_Sub_P Parameter: Age (day) Value: 14
  misc_feature: MA Experiment 20000314 PARAMETER Experiment Name: At_14day_Shoots-Roots_Sub_P Parameter: Organism Value: A. thaliana
  misc_feature: MA Experiment 20000314 PARAMETER Experiment Name: At_14day_Shoots-Roots_Sub_P Parameter: Plant Line Value: WS
  misc_feature: MA Experiment 20000314 PARAMETER Experiment Name: At_14day_Shoots-Roots_Sub_P Parameter: Tissue Value: Roots vs. Whole Plant
  misc_feature: MA Experiment ID: 20000315 Result: Down-regulated in Transcription
  misc_feature: MA Experiment 20000315 PARAMETER Experiment Name: At_14day_Shoots-Roots_Sub_P Parameter: Age (day) Value: 14
  misc_feature: MA Experiment 20000315 PARAMETER Experiment Name: At_14day_Shoots-Roots_Sub_P Parameter: Organism Value: A. thaliana
  misc_feature: MA Experiment 20000315 PARAMETER Experiment Name: At_14day_Shoots-Roots_Sub_P Parameter: Plant Line Value: WS
  misc_feature: MA Experiment 20000315 PARAMETER Experiment Name: At_14day_Shoots-Roots_Sub_P Parameter: Tissue Value: Shoots vs. Whole Plant
  misc_feature: MA Experiment ID: 20000327 Result: Up-regulated in Transcription
  misc_feature: MA Experiment 20000327 PARAMETER Experiment Name: At_42deg_Heat_Sub_P Parameter: Age (day) Value: 14
  misc_feature: MA Experiment 20000327 PARAMETER Experiment Name: At_42deg_Heat_Sub_P Parameter: Organism Value: A. thaliana
  misc_feature: MA Experiment 20000327 PARAMETER Experiment Name: At_42deg_Heat_Sub_P Parameter: Plant Line Value: WS
  misc_feature: MA Experiment 20000327 PARAMETER Experiment Name: At_42deg_Heat_Sub_P Parameter: Temperature (deg C) Value: 42 vs. 22
  misc_feature: MA Experiment 20000327 PARAMETER Experiment Name: At_42deg_Heat_Sub_P Parameter: Timepoint (hr) Value: 1
  misc_feature: MA Experiment 20000327 PARAMETER Experiment Name: At_42deg_Heat_Sub_P Parameter: Tissue Value: Aerial
  misc_feature: MA Experiment ID: 20000328 Result: Up-regulated in Transcription
  misc_feature: MA Experiment 20000328 PARAMETER Experiment Name: At_42deg_Heat_Sub_P Parameter: Age (day) Value: 14
  misc_feature: MA Experiment 20000328 PARAMETER Experiment Name: At_42deg_Heat_Sub_P Parameter: Organism Value: A. thaliana
  misc_feature: MA Experiment 20000328 PARAMETER Experiment Name: At_42deg_Heat_Sub_P Parameter: Plant Line Value: WS
  misc_feature: MA Experiment 20000328 PARAMETER Experiment Name: At_42deg_Heat_Sub_P Parameter: Temperature (deg C) Value: 42 vs. 22
  misc_feature: MA Experiment 20000328 PARAMETER Experiment Name: At_42deg_Heat_Sub_P Parameter: Timepoint (hr) Value: 6
  misc_feature: MA Experiment 20000328 PARAMETER Experiment Name: At_42deg_Heat_Sub_P Parameter: Tissue Value: Aerial
  misc_feature: MA Experiment ID: 20000332 Result: Up-regulated in Transcription
  misc_feature: MA Experiment 20000332 PARAMETER Experiment Name: At_4deg_Cold_Sub_P Parameter: Age (day) Value: 14
  misc_feature: MA Experiment 20000332 PARAMETER Experiment Name: At_4deg_Cold_Sub_P Parameter: Organism Value: A. thaliana
  misc_feature: MA Experiment 20000332 PARAMETER Experiment Name: At_4deg_Cold_Sub_P Parameter: Plant Line Value: WS
  misc_feature: MA Experiment 20000332 PARAMETER Experiment Name: At_4deg_Cold_Sub_P Parameter: Temperature (deg C) Value: 4 vs. 22
  misc_feature: MA Experiment 20000332 PARAMETER Experiment Name: At_4deg_Cold_Sub_P Parameter: Timepoint (hr) Value: 2
  misc_feature: MA Experiment 20000332 PARAMETER Experiment Name: At_4deg_Cold_Sub_P Parameter: Tissue Value: Aerial
  misc_feature: MA Experiment ID: 20000347 Result: Up-regulated in Transcription
  misc_feature: MA Experiment 20000347 PARAMETER Experiment Name: At_2mM_SA_Sub_P Parameter: Age (day) Value: 14
  misc_feature: MA Experiment 20000347 PARAMETER Experiment Name: At_2mM_SA_Sub_P Parameter: Organism Value: A. thaliana
  misc_feature: MA Experiment 20000347 PARAMETER Experiment Name: At_2mM_SA_Sub_P Parameter: Plant Line Value: WS
  misc_feature: MA Experiment 20000347 PARAMETER Experiment Name: At_2mM_SA_Sub_P Parameter: Timepoint (hr) Value: 6
  misc_feature: MA Experiment 20000347 PARAMETER Experiment Name: At_2mM_SA_Sub_P Parameter: Tissue Value: Aerial
  misc_feature: MA Experiment 20000347 PARAMETER Experiment Name: At_2mM_SA_Sub_P Parameter: Treatment Value: 2mM SA vs. No Treatment
  misc_feature: MA Experiment ID: 20000348 Result: Up-regulated in Transcription
  misc_feature: MA Experiment 20000348 PARAMETER Experiment Name: At_100uM_ABA_Sub_P Parameter: Age (day) Value: 14
  misc_feature: MA Experiment 20000348 PARAMETER Experiment Name: At_100uM_ABA_Sub_P Parameter: Organism Value: A. thaliana
  misc_feature: MA Experiment 20000348 PARAMETER Experiment Name: At_100uM_ABA_Sub_P Parameter: Plant Line Value: WS
  misc_feature: MA Experiment 20000348 PARAMETER Experiment Name: At_100uM_ABA_Sub_P Parameter: Timepoint (hr) Value: 1
  misc_feature: MA Experiment 20000348 PARAMETER Experiment Name: At_100uM_ABA_Sub_P Parameter: Tissue Value: Aerial
  misc_feature: MA Experiment 20000348 PARAMETER Experiment Name: At_100uM_ABA_Sub_P Parameter: Treatment Value: 100uM ABA vs. No Treatment
  misc_feature: MA Experiment ID: 20000352 Result: Up-regulated in Transcription
  misc_feature: MA Experiment 20000352 PARAMETER Experiment Name: At_Drought_Sub_P Parameter: Age (day) Value: 7
  misc_feature: MA Experiment 20000352 PARAMETER Experiment Name: At_Drought_Sub_P Parameter: Organism Value: A. thaliana
  misc_feature: MA Experiment 20000352 PARAMETER Experiment Name: At_Drought_Sub_P Parameter: Plant Line Value: WS
  misc_feature: MA Experiment 20000352 PARAMETER Experiment Name: At_Drought_Sub_P Parameter: Timepoint (hr) Value: 6
  misc_feature: MA Experiment 20000352 PARAMETER Experiment Name: At_Drought_Sub_P Parameter: Tissue Value: Whole Plant
  misc_feature: MA Experiment 20000352 PARAMETER Experiment Name: At_Drought_Sub_P Parameter: Treatment Value: Drought vs. No Drought
  misc_feature: MA Experiment ID: 20000355 Result: Down-regulated in Transcription
  misc_feature: MA Experiment 20000355 PARAMETER Experiment Name: At_Siliques_Sub_P Parameter: Age (day) Value: 21
  misc_feature: MA Experiment 20000355 PARAMETER Experiment Name: At_Siliques_Sub_P Parameter: Organism Value: A. thaliana
  misc_feature: MA Experiment 20000355 PARAMETER Experiment Name: At_Siliques_Sub_P Parameter: Plant Line Value: WS
  misc_feature: MA Experiment 20000355 PARAMETER Experiment Name: At_Siliques_Sub_P Parameter: Tissue Value: Less Than 5mm Siliques vs. Whole Plant
  misc_feature: MA Experiment ID: 20000440 Result: Down-regulated in Transcription
  misc_feature: MA Experiment 20000440 PARAMETER Experiment Name: At_Closed-Flower__Sub_P Parameter: Tissue Value: Closed Flower vs. Whole Plant
actcagcacactacacacaaactaaacgaaacaaaaacaaacacaaacacaaacacagaagtattttctaaaagacaaagaagatggcacctgagatcaataccaaactcaccgtaccggtccactcagcaaccggcggagaaaagagggcgtacgtgactttccttgctggaactggagactacgtgaaaggggtggtgggtcttgctaaggggctaaggaaagctaagagcaagtacccactcgtggtggcggttttgccggatgtaccggaggatcaccggaaacagttggtggatcaaggctgtgttgttaaggagatagagccggtttatccaccggagaatcaaaccgagtttgctatggcttactatgtcattaactactctaagcttcgtatctgggagttcgtggagtacaacaagatgatatacttggacggtgacatacaagtgttcgacaacatagatcacttgtttgatcttccaaacggccaattctatgcagttatggactgtttttgcgagaagacatggagtcactcgccacagtacaagatcggttattgccaacagtgtccggacaaggtgacatggccagaggccaagcttggtcctaagccgcctttgtacttcaacgccggtatgttcgtttacgagcctaacctctccacttatcataacctcttggagacggtcaaaattgtgcctcccactctttttgctgaacaggattttttgaatatgtacttcaaggacatatacaagccaataccaccagtgtataacttggtcttggcaatgctttggaggcatccagagaatatagagcttgaccaagtcaaagttgttcactactgtgctgctggtgctaaaccttggagattcactggagaagaagagaacatggacagagaagacattaagatgctggtcaagaaatggtgggacatttacaatgacgagtctcttgattacaagaatgttgtcattggggacagccacaagaagcaacagacacttcagcagtttatcgaagctttgtctgaagccggtgcgcttcagtatgtcaaagctccatctgcagcttagccacaatataatcatcgagctcgttgctgcatacgcctcttcatgactataatattgcttattgctttagtttgaaacttgtttataggaccatatagttatacatatactatatgagattgtgttactattttaatttttatgggttttggaggattttttaaatttccacatccgtttttacttatcatatactagcttgttgattaggaacaatgctcccgacaatattgtaaagtatacttgtttaagttgttatccatgagaatacaaacgtatatagttcagtt

SEQ ID NO: 80124 - protein, 335 aa, Arabidopsis thaliana
  peptide (1)..(335): Ceres Seq. ID no. 12654539
  misc_feature (1)..(335): Homolog of NCBI NO: 15223567 NR Description: water stress-induced protein, putative; protein At1g56600.1, supported by cDNA: gi_15215761, supported by cDNA:
  misc_feature (1)..(335): Homolog of NCBI NO: 20340247 NR Description: galactinol synthase-like protein [Thellungiella
  misc_feature (1)..(335): Homolog of NCBI NO: 15217486 NR Description: putative galactinol synthase; protein id: supported by cDNA: gi_13899102, supported by cDNA: gi_17298126, by cDNA: gi_20148246 [Arabidopsis thaliana]
  misc_feature (9)..(335): Homolog of NCBI NO: 15226522 NR Description: putative galactinol synthase; protein id: supported by cDNA: 124236., supported by cDNA: gi_15810148,
  misc_feature (1)..(335): Homolog of NCBI NO: 4588376 NR Description: galactinol synthase [Brassica napus]
  misc_feature (16)..(335): Homolog of NCBI NO: 18874402 NR Description: galactinol synthase [Cucumis melo]
  misc_feature (16)..(335): Homolog of NCBI NO: 29569824 NR Description: galactinol synthase [Cucumis sativus]
  misc_feature (1)..(335): Homolog of NCBI NO: 5541885 NR Description: putative galactinol synthase [Pisum sativum]
  misc_feature (20)..(335): Homolog of NCBI NO: 34898096 NR Description: WSI76 protein induced by water stress [Oryza
  misc_feature (1)..(335): Homolog of NCBI NO: 15219093 NR Description: galactinol synthase, putative; protein id: [Arabidopsis thaliana] >gi|25404266|pir||H96629 hypothetical
MAPEINTKLTVPVHSATGGEKRAYVTFLAGTGDYVKGVVGLAKGLRKAKSKYPLVVAVLPDVPEDHRKQLVDQGCVVKEIEPVYPPENQTEFAMAYYVINYSKLRIWEFVEYNKMIYLDGDIQVFDNIDHLFDLPNGQFYAVMDCFCEKTWSHSPQYKIGYCQQCPDKVTWPEAKLGPKPPLYFNAGMFVYEPNLSTYHNLLETVKIVPPTLFAEQDFLNMYFKDIYKPIPPVYNLVLAMLWRHPENIELDQVKVVHYCAAGAKPWRFTGEEENMDREDIKMLVKKWWDIYNDESLDYKNVVIGDSHKKQQTLQQFIEALSEAGALQYVKAPSAA

SEQ ID NO: 80125 - protein, 242 aa, Arabidopsis thaliana
  peptide (1)..(242): Ceres Seq. ID no. 12654540
  misc_feature (1)..(242): Homolog of NCBI NO: 15223567 NR Description: water stress-induced protein, putative; protein At1g56600.1, supported by cDNA: gi_15215761, supported by cDNA:
  misc_feature (1)..(242): Homolog of NCBI NO: 20340247 NR Description: galactinol synthase-like protein [Thellungiella
  misc_feature (1)..(242): Homolog of NCBI NO: 15217486 NR Description: putative galactinol synthase; protein id: supported by cDNA: gi_13899102, supported by cDNA: gi_17298126, by cDNA: gi_20148246 [Arabidopsis thaliana]
  misc_feature (1)..(242): Homolog of NCBI NO: 15226522 NR Description: putative galactinol synthase; protein id: supported by cDNA: 124236., supported by cDNA: gi_15810148,
  misc_feature (1)..(242): Homolog of NCBI NO: 4588376 NR Description: galactinol synthase [Brassica napus]
  misc_feature (1)..(242): Homolog of NCBI NO: 18874402 NR Description: galactinol synthase [Cucumis melo]
  misc_feature (1)..(242): Homolog of NCBI NO: 29569824 NR Description: galactinol synthase [Cucumis sativus]
  misc_feature (1)..(242): Homolog of NCBI NO: 5541885 NR Description: putative galactinol synthase [Pisum sativum]
  misc_feature (1)..(242): Homolog of NCBI NO: 34898096 NR Description: WSI76 protein induced by water stress [Oryza
  misc_feature (1)..(242): Homolog of NCBI NO: 15219093 NR Description: galactinol synthase, putative; protein id: [Arabidopsis thaliana] >gi|25404266|pir||H96629 hypothetical
MAYYVINYSKLRIWEFVEYNKMIYLDGDIQVFDNIDHLFDLPNGQFYAVMDCFCEKTWSHSPQYKIGYCQQCPDKVTWPEAKLGPKPPLYFNAGMFVYEPNLSTYHNLLETVKIVPPTLFAEQDFLNMYFKDIYKPIPPVYNLVLAMLWRHPENIELDQVKVVHYCAAGAKPWRFTGEEENMDREDIKMLVKKWWDIYNDESLDYKNVVIGDSHKKQQTLQQFIEALSEAGALQYVKAPSAA

SEQ ID NO: 80126 - protein, 221 aa, Arabidopsis thaliana
  peptide (1)..(221): Ceres Seq. ID no. 12654541
  misc_feature (1)..(221): Homolog of NCBI NO: 15223567 NR Description: water stress-induced protein, putative; protein At1g56600.1, supported by cDNA: gi_15215761, supported by cDNA:
  misc_feature (1)..(221): Homolog of NCBI NO: 20340247 NR Description: galactinol synthase-like protein [Thellungiella
  misc_feature (1)..(221): Homolog of NCBI NO: 15217486 NR Description: putative galactinol synthase; protein id: supported by cDNA: gi_13899102, supported by cDNA: gi_17298126, by cDNA: gi_20148246 [Arabidopsis thaliana]
  misc_feature (1)..(221): Homolog of NCBI NO: 15226522 NR Description: putative galactinol synthase; protein id: supported by cDNA: 124236., supported by cDNA: gi_15810148,
  misc_feature (1)..(221): Homolog of NCBI NO: 4588376 NR Description: galactinol synthase [Brassica napus]
  misc_feature (1)..(221): Homolog of NCBI NO: 18874402 NR Description: galactinol synthase [Cucumis melo]
  misc_feature (1)..(221): Homolog of NCBI NO: 29569824 NR Description: galactinol synthase [Cucumis sativus]
  misc_feature (1)..(221): Homolog of NCBI NO: 5541885 NR Description: putative galactinol synthase [Pisum sativum]
  misc_feature (1)..(221): Homolog of NCBI NO: 34898096 NR Description: WSI76 protein induced by water stress [Oryza
  misc_feature (1)..(221): Homolog of NCBI NO: 15219093 NR Description: galactinol synthase, putative; protein id: [Arabidopsis thaliana] >gi|25404266|pir||H96629 hypothetical
MIYLDGDIQVFDNIDHLFDLPNGQFYAVMDCFCEKTWSHSPQYKIGYCQQCPDKVTWPEAKLGPKPPLYFNAGMFVYEPNLSTYHNLLETVKIVPPTLFAEQDFLNMYFKDIYKPIPPVYNLVLAMLWRHPENIELDQVKVVHYCAAGAKPWRFTGEEENMDREDIKMLVKKWWDIYNDESLDYKNVVIGDSHKKQQTLQQFIEALSEAGALQYVKAPSAA

SEQ ID NO: 80127 - DNA, 2115 bp, Arabidopsis thaliana
  misc_feature (1)..(2115): Ceres Seq. ID no. 12654552
  misc_feature: MA Experiment ID: 20000307 Result: Down-regulated in Transcription
  misc_feature: MA Experiment 20000307 PARAMETER Experiment Name: At_Germinating_Seeds_Sub_P Parameter: Age (hr) Value: 24 vs. 0
  misc_feature: MA Experiment 20000307 PARAMETER Experiment Name: At_Germinating_Seeds_Sub_P Parameter: Organism Value: A. thaliana
  misc_feature: MA Experiment 20000307 PARAMETER Experiment Name: At_Germinating_Seeds_Sub_P Parameter: Plant Line Value: WS
  misc_feature: MA Experiment 20000307 PARAMETER Experiment Name: At_Germinating_Seeds_Sub_P Parameter: Tissue Value: Germinating Seeds
  misc_feature: MA Experiment ID: 20000328 Result: Down-regulated in Transcription
  misc_feature: MA Experiment 20000328 PARAMETER Experiment Name: At_42deg_Heat_Sub_P Parameter: Age (day) Value: 14
  misc_feature: MA Experiment 20000328 PARAMETER Experiment Name: At_42deg_Heat_Sub_P Parameter: Organism Value: A. thaliana
  misc_feature: MA Experiment 20000328 PARAMETER Experiment Name: At_42deg_Heat_Sub_P Parameter: Plant Line Value: WS
  misc_feature: MA Experiment 20000328 PARAMETER Experiment Name: At_42deg_Heat_Sub_P Parameter: Temperature (deg C) Value: 42 vs. 22
  misc_feature: MA Experiment 20000328 PARAMETER Experiment Name: At_42deg_Heat_Sub_P Parameter: Timepoint (hr) Value: 6
  misc_feature: MA Experiment 20000328 PARAMETER Experiment Name: At_42deg_Heat_Sub_P Parameter: Tissue Value: Aerial
atgaagcgtttaaagctaatcttacgcagaacttacttgacaagcactggagtgaattgcagttttgagatctcacgtctctcacgaatcgggaaaatcaatgaagcacgaaagtttttcgattcgttacagtttaaagcaatcggttcatggaactcaattgtatctgggtatttctcaaacgggttaccgaaagaagcacgccaactgttcgacgaaatgtctgagagaaatgtagtttcctggaacgggttggtttcagggtatattaagaataggatgattgtagaagctaggaatgtgtttgagctaatgcctgagaggaatgttgtgtcgtggaccgcgatggttaaaggttacatgcaagaaggtatggttggtgaagcggagtcgctgttttggagaatgcctgagaggaatgaggtttcttggactgtgatgtttggtggtttgattgatgatggacgtattgataaagcaaggaagttgtatgatatgatgcctgttaaagatgttgtagcgagtactaatatgattggtgggttgtgtagagaaggaagagttgatgaggcaaggttgatttttgatgagatgagggagaggaatgttgttacttggactacgatgattactggatacaggcagaataatcgagtggatgttgctaggaagttgtttgaagtgatgccggagaagactgaagtttcgtggacttctatgcttttggggtatactttgagtgggagaattgaggatgctgaggagttttttgaggtgatgccgatgaagccggttattgcgtgtaatgctatgattgttgggtttggtgaggtaggagagatatcgaaagctaggagggtttttgatctaatggaggatagggataatgcgacttggcgaggaatgattaaagcttatgaaagaaaaggttttgaattggaggctcttgatttgtttgctcaaatgcagaaacaaggagttagaccgagttttccgtctttgatcagtattctttcggtttgtgccactttagcaagtctacaatatggtagacaggtccatgctcatttggtgagatgtcagtttgatgatgatgtctatgttgcctctgttttgatgaccatgtatgtcaaatgtggtgagcttgtaaaagcaaagctagtattcgacaggttttcctcaaaggacattatcatgtggaattcaatcatttctggctatgcgtcgcatggtctaggagaggaagctcttaagatttttcacgagatgccatcatctggtaccatgccaaacaaagtgaccttaattgcaattctgacagcatgtagctatgctggaaaactcgaggaagggcttgagatatttgaatcaatggaatcaaagttttgcgtgactccaacggttgagcattattcttgcacggtggatatgcttgggcgtgcaggacaggtagataaggcaatggagttgatcgaaagtatgactattaagccagatgctacagtttggggtgctctgttaggagcgtgtaaaactcactcacgattggatttagctgaagttgctgcaaagaaacttttcgagaatgaaccagataacgctggtacatacgttttgctatcgagcataaatgcatctcgatccaagtggggggatgttgcagtagtaagaaaaaacatgaggacaaacaatgtaagtaaattccctggttgtagttggattgaggtagggaagaaagtgcacatgttcactcgcggaggtatcaaaaaccatcccgagcaagcgatgatactaatgatgttggagaaaacagatggattattaagagaagctggttatagtcctgattgcagccatgtcttacacgatgtagacgaggaagagaaagttgatagtttaagccgtcacagtgaaagactcgcggtagcttatggactcttaaagctacccgaaggagtacctattcgagtcatgaagaaccttagagtctgtggagattgtcatgccgccattaaactcatttctaaagtcacagaaagagagatcattctaagagatgcaaacagattccatcatttcaacaatggagagtgttcttgtagagactactggtga

SEQ ID NO: 80128 - protein, 704 aa, Arabidopsis thaliana
  peptide (1)..(704): Ceres Seq. ID no. 12654553
  misc_feature (49)..(83): Pfam Name: PPR repeat Pfam Description: PPR repeat
  misc_feature (5)..(704): Homolog of NCBI NO: 15217508 NR Description: hypothetical protein; protein id: At1g09410.1
  misc_feature (24)..(704): Homolog of NCBI NO: 15235498 NR Description: hypothetical protein; protein id: At4g02750.1
  misc_feature (136)..(704): Homolog of NCBI NO: 22328738 NR Description: similar to putative selenium-binding protein;
  misc_feature (114)..(704): Homolog of NCBI NO: 27817913 NR Description: OJ1066_B03.8 [Oryza sativa (japonica
  misc_feature (66)..(704): Homolog of NCBI NO: 15237442 NR Description: putative protein; protein id: At5g46460.1 thaliana] >gi|10177583|dbj|BAB10814.1|
  misc_feature (171)..(704): Homolog of NCBI NO: 11994419 NR Description: selenium-binding protein-like [Arabidopsis
  misc_feature (3)..(172): Homolog of NCBI NO: 11994419 NR Description: selenium-binding protein-like [Arabidopsis
  misc_feature (171)..(703): Homolog of NCBI NO: 15230593 NR Description: unknown protein; protein id: At3g12770.1
  misc_feature (3)..(172): Homolog of NCBI NO: 15230593 NR Description: unknown protein; protein id: At3g12770.1
  misc_feature (172)..(704): Homolog of NCBI NO: 34897884 NR Description: Similar to Arabidopsis thaliana DNA chromosome 4,
MKRLKLILRRTYLTSTGVNCSFEISRLSRIGKINEARKFFDSLQFKAIGSWNSIVSGYFSNGLPKEARQLFDEMSERNVVSWNGLVSGYIKNRMIVEARNVFELMPERNVVSWTAMVKGYMQEGMVGEAESLFWRMPERNEVSWTVMFGGLIDDGRIDKARKLYDMMPVKDVVASTNMIGGLCREGRVDEARLIFDEMRERNVVTWTTMITGYRQNNRVDVARKLFEVMPEKTEVSWTSMLLGYTLSGRIEDAEEFFEVMPMKPVIACNAMIVGFGEVGEISKARRVFDLMEDRDNATWRGMIKAYERKGFELEALDLFAQMQKQGVRPSFPSLISILSVCATLASLQYGRQVHAHLVRCQFDDDVYVASVLMTMYVKCGELVKAKLVFDRFSSKDIIMWNSIISGYASHGLGEEALKIFHEMPSSGTMPNKVTLIAILTACSYAGKLEEGLEIFESMESKFCVTPTVEHYSCTVDMLGRAGQVDKAMELIESMTIKPDATVWGALLGACKTHSRLDLAEVAAKKLFENEPDNAGTYVLLSSINASRSKWGDVAVVRKNMRTNNVSKFPGCSWIEVGKKVHMFTRGGIKNHPEQAMILMMLEKTDGLLREAGYSPDCSHVLHDVDEEEKVDSLSRHSERLAVAYGLLKLPEGVPIRVMKNLRVCGDCHAAIKLISKVTEREIILRDANRFHHFNNGECSCRDYW

SEQ ID NO: 80129 - protein, 631 aa, Arabidopsis thaliana
  peptide (1)..(631): Ceres Seq. ID no. 12654554
  misc_feature (8)..(40): Pfam Name: PPR repeat Pfam Description: PPR repeat
  misc_feature (1)..(631): Homolog of NCBI NO: 15217508 NR Description: hypothetical protein; protein id: At1g09410.1
  misc_feature (1)..(631): Homolog of NCBI NO: 15235498 NR Description: hypothetical protein; protein id: At4g02750.1
  misc_feature (63)..(631): Homolog of NCBI NO: 22328738 NR Description: similar to putative selenium-binding protein;
  misc_feature (41)..(631): Homolog of NCBI NO: 27817913 NR Description: OJ1066_B03.8 [Oryza sativa (japonica
  misc_feature (1)..(631): Homolog of NCBI NO: 15237442 NR Description: putative protein; protein id: At5g46460.1 thaliana] >gi|10177583|dbj|BAB10814.1|
  misc_feature (98)..(631): Homolog of NCBI NO: 11994419 NR Description: selenium-binding protein-like [Arabidopsis
  misc_feature (1)..(99): Homolog of NCBI NO: 11994419 NR Description: selenium-binding protein-like [Arabidopsis
  misc_feature (98)..(630): Homolog of NCBI NO: 15230593 NR Description: unknown protein; protein id: At3g12770.1
  misc_feature (1)..(99): Homolog of NCBI NO: 15230593 NR Description: unknown protein; protein id: At3g12770.1
  misc_feature (99)..(631): Homolog of NCBI NO: 34897884 NR Description: Similar to Arabidopsis thaliana DNA chromosome 4,
MSERNVVSWNGLVSGYIKNRMIVEARNVFELMPERNVVSWTAMVKGYMQEGMVGEAESLFWRMPERNEVSWTVMFGGLIDDGRIDKARKLYDMMPVKDVVASTNMIGGLCREGRVDEARLIFDEMRERNVVTWTTMITGYRQNNRVDVARKLFEVMPEKTEVSWTSMLLGYTLSGRIEDAEEFFEVMPMKPVIACNAMIVGFGEVGEISKARRVFDLMEDRDNATWRGMIKAYERKGFELEALDLFAQMQKQGVRPSFPSLISILSVCATLASLQYGRQVHAHLVRCQFDDDVYVASVLMTMYVKCGELVKAKLVFDRFSSKDIIMWNSIISGYASHGLGEEALKIFHEMPSSGTMPNKVTLIAILTACSYAGKLEEGLEIFESMESKFCVTPTVEHYSCTVDMLGRAGQVDKAMELIESMTIKPDATVWGALLGACKTHSRLDLAEVAAKKLFENEPDNAGTYVLLSSINASRSKWGDVAVVRKNMRTNNVSKFPGCSWIEVGKKVHMFTRGGIKNHPEQAMILMMLEKTDGLLREAGYSPDCSHVLHDVDEEEKVDSLSRHSERLAVAYGLLKLPEGVPIRVMKNLRVCGDCHAAIKLISKVTEREIILRDANRFHHFNNGECSCRDYW

SEQ ID NO: 80130 - protein, 611 aa, Arabidopsis thaliana
  peptide (1)..(611): Ceres Seq. ID no. 12654555
  misc_feature (1)..(611): Homolog of NCBI NO: 15217508 NR Description: hypothetical protein; protein id: At1g09410.1
  misc_feature (1)..(611): Homolog of NCBI NO: 15235498 NR Description: hypothetical protein; protein id: At4g02750.1
  misc_feature (43)..(611): Homolog of NCBI NO: 22328738 NR Description: similar to putative selenium-binding protein;
  misc_feature (21)..(611): Homolog of NCBI NO: 27817913 NR Description: OJ1066_B03.8 [Oryza sativa (japonica
  misc_feature (1)..(611): Homolog of NCBI NO: 15237442 NR Description: putative protein; protein id: At5g46460.1 thaliana] >gi|10177583|dbj|BAB10814.1|
  misc_feature (78)..(611): Homolog of NCBI NO: 11994419 NR Description: selenium-binding protein-like [Arabidopsis
  misc_feature (1)..(79): Homolog of NCBI NO: 11994419 NR Description: selenium-binding protein-like [Arabidopsis
  misc_feature (78)..(610): Homolog of NCBI NO: 15230593 NR Description: unknown protein; protein id: At3g12770.1
  misc_feature (1)..(79): Homolog of NCBI NO: 15230593 NR Description: unknown protein; protein id: At3g12770.1
  misc_feature (79)..(611): Homolog of NCBI NO: 34897884 NR Description: Similar to Arabidopsis thaliana DNA chromosome 4,
MIVEARNVFELMPERNVVSWTAMVKGYMQEGMVGEAESLFWRMPERNEVSWTVMFGGLIDDGRIDKARKLYDMMPVKDVVASTNMIGGLCREGRVDEARLIFDEMRERNVVTWTTMITGYRQNNRVDVARKLFEVMPEKTEVSWTSMLLGYTLSGRIEDAEEFFEVMPMKPVIACNAMIVGFGEVGEISKARRVFDLMEDRDNATWRGMIKAYERKGFELEALDLFAQMQKQGVRPSFPSLISILSVCATLASLQYGRQVHAHLVRCQFDDDVYVASVLMTMYVKCGELVKAKLVFDRFSSKDIIMWNSIISGYASHGLGEEALKIFHEMPSSGTMPNKVTLIAILTACSYAGKLEEGLEIFESMESKFCVTPTVEHYSCTVDMLGRAGQVDKAMELIESMTIKPDATVWGALLGACKTHSRLDLAEVAAKKLFENEPDNAGTYVLLSSINASRSKWGDVAVVRKNMRTNNVSKFPGCSWIEVGKKVHMFTRGGIKNHPEQAMILMMLEKTDGLLREAGYSPDCSHVLHDVDEEEKVDSLSRHSERLAVAYGLLKLPEGVPIRVMKNLRVCGDCHAAIKLISKVTEREIILRDANRFHHFNNGECSCRDYW

SEQ ID NO: 80131 - DNA, 1437 bp, Arabidopsis thaliana
  misc_feature (1)..(1437): Ceres Seq. ID no. 12654583
  misc_feature: MA Experiment ID: 108434 Result: Down-regulated in Transcription
  misc_feature: MA Experiment 108434 PARAMETER Experiment Name: At_Root_Tips_cDNA_P Parameter: Tissue Value: Root Tips
  misc_feature: MA Experiment ID: 108574 Result: Down-regulated in Transcription
  misc_feature: MA Experiment 108574 PARAMETER Experiment Name: At_Wounding__cDNA_P Parameter: Timepoint (hr) Value: 1
  misc_feature: MA Experiment 108574 PARAMETER Experiment Name: At_Wounding__cDNA_P Parameter: Tissue Value: Aerial
  misc_feature: MA Experiment 108574 PARAMETER Experiment Name: At_Wounding__cDNA_P Parameter: Treatment Value: Wounding vs. No Wounding
  misc_feature: MA Experiment ID: 108579 Result: Down-regulated in Transcription
  misc_feature: MA Experiment 108579 PARAMETER Experiment Name: At_4deg_Cold_cDNA_P Parameter: Temperature (deg C) Value: 4 vs. 22
  misc_feature: MA Experiment 108579 PARAMETER Experiment Name: At_4deg_Cold_cDNA_P Parameter: Timepoint (hr) Value: 6
  misc_feature: MA Experiment 108579 PARAMETER Experiment Name: At_4deg_Cold_cDNA_P Parameter: Tissue Value: Aerial
  misc_feature: MA Experiment ID: 108585 Result: Up-regulated in Transcription
  misc_feature: MA Experiment 108585 PARAMETER Experiment Name: At_5mM_NaNP_cDNA_P Parameter: Timepoint (hr) Value: 6
  misc_feature: MA Experiment 108585 PARAMETER Experiment Name: At_5mM_NaNP_cDNA_P Parameter: Tissue Value: Aerial
  misc_feature: MA Experiment 108585 PARAMETER Experiment Name: At_5mM_NaNP_cDNA_P Parameter: Treatment Value: null
  misc_feature: MA Experiment ID: 108595 Result: Down-regulated in Transcription
  misc_feature: MA Experiment 108595 PARAMETER Experiment Name: At_Ler-pi_Ovule_cDNA_P Parameter: Plant Line Value: null
  misc_feature: MA Experiment ID: 20000072 Result: Down-regulated in Transcription
  misc_feature: MA Experiment 20000072 PARAMETER Experiment Name: At_100uM_ABA_Mutants_cDNA_P Parameter: Plant Line Value: CS8105
  misc_feature: MA Experiment 20000072 PARAMETER Experiment Name: At_100uM_ABA_Mutants_cDNA_P Parameter: Timepoint (hr) Value: 6
  misc_feature: MA Experiment 20000072 PARAMETER Experiment Name: At_100uM_ABA_Mutants_cDNA_P Parameter: Tissue Value: Aerial
  misc_feature: MA Experiment 20000072 PARAMETER Experiment Name: At_100uM_ABA_Mutants_cDNA_P Parameter: Treatment Value: 100uM ABA vs. No Treatment
  misc_feature: MA Experiment ID: 20000111 Result: Down-regulated in Transcription
  misc_feature: MA Experiment 20000111 PARAMETER Experiment Name: At_42deg_Heat_cDNA_P Parameter: Temperature (deg C) Value: 42 vs. 22
  misc_feature: MA Experiment 20000111 PARAMETER Experiment Name: At_42deg_Heat_cDNA_P Parameter: Timepoint (hr) Value: 6
  misc_feature: MA Experiment 20000111 PARAMETER Experiment Name: At_42deg_Heat_cDNA_P Parameter: Tissue Value: Aerial
atgaaggaggatcgtcgtcttcctcacaaacgcgacgccttccaattcttgaaaaccaaggctgcgtacgttatcgtcatagttctaacctacgcctttggttacttctccgcctaccactatcatcaaccgctgcagcagcagctgccaccgtctacgacagccgtggaaacgacaaaacctcaagtttgttcaatcgacaacttccgagttacgactccatgcggcaatcttgttccgccggaattgattcgccagactgttattgaccggatctttaacggaacttctccgtacatcgatttcccaccaccgcacgccaagaagtttctccggccaaaaagaatcaaaggttggggatcatacggggccgttttcgagaatctaatccgccgagtcaaacctaagacgatcgtcgaagtcgggagttttctcggcgcgtcggcgatacacatggcgaatctcacgcgccgacttgggctcgaggagactcagattctatgcgtcgacgacttccgtggctggcccggttttcgagaccggtttaaggacatggctttggttaacggtgacgttctgcttatgtaccagtttatgcaaaacgtggttatctcggatttttccggttcgatattgccggttcctttctcgaccggttcggctttggagaagctgtgtgagtggggagtgacggcggacctggtggagatagacgcgggtcacgattttaattcggcatgggcggatataaaccgggcggttcggatactccgacccggcggtgttatatttggtcacgattatttcacggcggcggataatagaggagtgaggagagccgtgaatctgttcgcagagattaaccggttaaaggtcaaaaccgatggtcaacattgggttattgattcggtcaaagtaattaataaagggacaagatttgcgatctcaaaaactgttgcgaagattaaagaggatgccaatcaatggttctttgctcaagttcttgagaatcaggatttggtgaatgagcaagctgttcacatttcggttaaggtgctgcgcgggtttttgagagatgaacacggtaaggtcctaattcatgctagaagatcttttgcatctgttcatagcaagcttgatgctacttttctttgttggcaatgggccatggagagtatgaaaagtctcagagttgataaaatcatctttgcctctgaagacaatgatctaattggagctgttacgcgactgccgtcttggccttcgtataaatttcagattcactttttgttgggagaattaataagaagctctaatcttggagctcatcttattgccaagagcgtgacaatggaggatcgccgccaatcgtatgtagcaaccgggtttcctttttggctgaaacatctttttgagaaagaaagaagtattgcttag

SEQ ID NO: 80132 - protein, 478 aa, Arabidopsis thaliana
  peptide (1)..(478): Ceres Seq. ID no. 12654584
  misc_feature (1)..(478): Homolog of NCBI NO: 15223338 NR Description: hypothetical protein; protein id: At1g01180.1
  misc_feature (310)..(475): Homolog of NCBI NO: 25403254 NR Description: protein F5A9.24 [imported] - Arabidopsis thaliana
  misc_feature (307)..(477): Homolog of NCBI NO: 9743345 NR Description: F21J9.30 [Arabidopsis thaliana]
  misc_feature (357)..(475): Homolog of NCBI NO: 25518314 NR Description: hypothetical protein F12K8.9 - Arabidopsis >gi|6587849|gb|AAF18538.1|AC006551_24 Very similar to
  misc_feature (309)..(338): Homolog of NCBI NO: 25518314 NR Description: hypothetical protein F12K8.9 - Arabidopsis >gi|6587849|gb|AAF18538.1|AC006551_24 Very similar to
  misc_feature (357)..(475): Homolog of NCBI NO: 15227278 NR Description: putative non-LTR retroelement reverse protein id: At2g16680.1 [Arabidopsis thaliana]
  misc_feature (357)..(475): Homolog of NCBI NO: 7488319 NR Description: RNA-directed DNA polymerase homolog T13L16.7 -
  misc_feature (357)..(475): Homolog of NCBI NO: 15227922 NR Description: putative non-LTR retroelement reverse protein id: At2g17910.1 [Arabidopsis thaliana]
  misc_feature (357)..(478): Homolog of NCBI NO: 15227392 NR Description: putative non-LTR retroelement reverse
  misc_feature (357)..(449): Homolog of NCBI NO: 15226541 NR Description: putative non-LTR retroelement reverse protein id: At2g15510.1 [Arabidopsis thaliana]
MKEDRRLPHKRDAFQFLKTKAAYVIVIVLTYAFGYFSAYHYHQPLQQQLPPSTTAVETTKPQVCSIDNFRVTTPCGNLVPPELIRQTVIDRIFNGTSPYIDFPPPHAKKFLRPKRIKGWGSYGAVFENLIRRVKPKTIVEVGSFLGASAIHMANLTRRLGLEETQILCVDDFRGWPGFRDRFKDMALVNGDVLLMYQFMQNVVISDFSGSILPVPFSTGSALEKLCEWGVTADLVEIDAGHDFNSAWADINRAVRILRPGGVIFGHDYFTAADNRGVRRAVNLFAEINRLKVKTDGQHWVIDSVKVINKGTRFAISKTVAKIKEDANQWFFAQVLENQDLVNEQAVHISVKVLRGFLRDEHGKVLIHARRSFASVHSKLDATFLCWQWAMESMKSLRVDKIIFASEDNDLIGAVTRLPSWPSYKFQIHFLLGELIRSSNLGAHLIAKSVTMEDRRQSYVATGFPFWLKHLFEKERSIA

SEQ ID NO: 80133 - protein, 327 aa, Arabidopsis thaliana
  peptide (1)..(327): Ceres Seq. ID no. 12654585
  misc_feature (1)..(327): Homolog of NCBI NO: 15223338 NR Description: hypothetical protein; protein id: At1g01180.1
  misc_feature (159)..(324): Homolog of NCBI NO: 25403254 NR Description: protein F5A9.24 [imported] - Arabidopsis thaliana
  misc_feature (156)..(326): Homolog of NCBI NO: 9743345 NR Description: F21J9.30 [Arabidopsis thaliana]
  misc_feature (206)..(324): Homolog of NCBI NO: 25518314 NR Description: hypothetical protein F12K8.9 - Arabidopsis >gi|6587849|gb|AAF18538.1|AC006551_24 Very similar to
  misc_feature (158)..(187): Homolog of NCBI NO: 25518314 NR Description: hypothetical protein F12K8.9 - Arabidopsis >gi|6587849|gb|AAF18538.1|AC006551_24 Very similar to
  misc_feature (206)..(324): Homolog of NCBI NO: 15227278 NR Description: putative non-LTR retroelement reverse protein id: At2g16680.1 [Arabidopsis thaliana]
  misc_feature (206)..(324): Homolog of NCBI NO: 7488319 NR Description: RNA-directed DNA polymerase homolog T13L16.7 -
  misc_feature (206)..(324): Homolog of NCBI NO: 15227922 NR Description: putative non-LTR retroelement reverse protein id: At2g17910.1 [Arabidopsis thaliana]
  misc_feature (206)..(327): Homolog of NCBI NO: 15227392 NR Description: putative non-LTR retroelement reverse
  misc_feature (206)..(298): Homolog of NCBI NO: 15226541 NR Description: putative non-LTR retroelement reverse protein id: At2g15510.1 [Arabidopsis thaliana]
MANLTRRLGLEETQILCVDDFRGWPGFRDRFKDMALVNGDVLLMYQFMQNVVISDFSGSILPVPFSTGSALEKLCEWGVTADLVEIDAGHDFNSAWADINRAVRILRPGGVIFGHDYFTAADNRGVRRAVNLFAEINRLKVKTDGQHWVIDSVKVINKGTRFAISKTVAKIKEDANQWFFAQVLENQDLVNEQAVHISVKVLRGFLRDEHGKVLIHARRSFASVHSKLDATFLCWQWAMESMKSLRVDKIIFASEDNDLIGAVTRLPSWPSYKFQIHFLLGELIRSSNLGAHLIAKSVTMEDRRQSYVATGFPFWLKHLFEKERSIA

SEQ ID NO: 80134 - protein, 294 aa, Arabidopsis thaliana
  peptide (1)..(294): Ceres Seq. ID no. 12654586
  misc_feature (1)..(294): Homolog of NCBI NO: 15223338 NR Description: hypothetical protein; protein id: At1g01180.1
  misc_feature (126)..(291): Homolog of NCBI NO: 25403254 NR Description: protein F5A9.24 [imported] - Arabidopsis thaliana
  misc_feature (123)..(293): Homolog of NCBI NO: 9743345 NR Description: F21J9.30 [Arabidopsis thaliana]
  misc_feature (173)..(291): Homolog of NCBI NO: 25518314 NR Description: hypothetical protein F12K8.9 - Arabidopsis >gi|6587849|gb|AAF18538.1|AC006551_24 Very similar to
  misc_feature (125)..(154): Homolog of NCBI NO: 25518314 NR Description: hypothetical protein F12K8.9 - Arabidopsis >gi|6587849|gb|AAF18538.1|AC006551_24 Very similar to
  misc_feature (173)..(291): Homolog of NCBI NO: 15227278 NR Description: putative non-LTR retroelement reverse protein id: At2g16680.1 [Arabidopsis thaliana]
  misc_feature (173)..(291): Homolog of NCBI NO: 7488319 NR Description: RNA-directed DNA polymerase homolog T13L16.7 -
  misc_feature (173)..(291): Homolog of NCBI NO: 15227922 NR Description: putative non-LTR retroelement reverse protein id: At2g17910.1 [Arabidopsis thaliana]
  misc_feature (173)..(294): Homolog of NCBI NO: 15227392 NR Description: putative non-LTR retroelement reverse
  misc_feature (173)..(265): Homolog of NCBI NO: 15226541 NR Description: putative non-LTR retroelement reverse protein id: At2g15510.1 [Arabidopsis thaliana]
MALVNGDVLLMYQFMQNVVISDFSGSILPVPFSTGSALEKLCEWGVTADLVEIDAGHDFNSAWADINRAVRILRPGGVIFGHDYFTAADNRGVRRAVNLFAEINRLKVKTDGQHWVIDSVKVINKGTRFAISKTVAKIKEDANQWFFAQVLENQDLVNEQAVHISVKVLRGFLRDEHGKVLIHARRSFASVHSKLDATFLCWQWAMESMKSLRVDKIIFASEDNDLIGAVTRLPSWPSYKFQIHFLLGELIRSSNLGAHLIAKSVTMEDRRQSYVATGFPFWLKHLFEKERSIA

SEQ ID NO: 80135 - DNA, 1608 bp, Arabidopsis thaliana
  misc_feature (1)..(1608): Ceres Seq. ID no. 12654587
  misc_feature: MA Experiment ID: 20000171 Result: Down-regulated in Transcription
  misc_feature: MA Experiment 20000171 PARAMETER Experiment Name: At_42deg_Heat_P Parameter: Age (day) Value: 14
  misc_feature: MA Experiment 20000171 PARAMETER Experiment Name: At_42deg_Heat_P Parameter: Organism Value: A. thaliana
  misc_feature: MA Experiment 20000171 PARAMETER Experiment Name: At_42deg_Heat_P Parameter: Plant Line Value: WS
  misc_feature: MA Experiment 20000171 PARAMETER Experiment Name: At_42deg_Heat_P Parameter: Temperature (deg C) Value: 42 vs. 22
  misc_feature: MA Experiment 20000171 PARAMETER Experiment Name: At_42deg_Heat_P Parameter: Timepoint (hr) Value: 1
  misc_feature: MA Experiment 20000171 PARAMETER Experiment Name: At_42deg_Heat_P Parameter: Tissue Value: Aerial
  misc_feature: MA Experiment ID: 20000184 Result: Up-regulated in Transcription
  misc_feature: MA Experiment 20000184 PARAMETER Experiment Name: At_Shoots__P Parameter: Age (day) Value: 7
  misc_feature: MA Experiment 20000184 PARAMETER Experiment Name: At_Shoots__P Parameter: Tissue Value: Shoots vs. Whole Plant
  misc_feature: MA Experiment ID: 20000185 Result: Up-regulated in Transcription
  misc_feature: MA Experiment 20000185 PARAMETER Experiment Name: At_Roots__P Parameter: Age (day) Value: 7 vs. 21
  misc_feature: MA Experiment 20000185 PARAMETER Experiment Name: At_Roots__P Parameter: Organism Value: A. thaliana
  misc_feature: MA Experiment 20000185 PARAMETER Experiment Name: At_Roots__P Parameter: Tissue Value: Roots vs. Whole Plant
  misc_feature: MA Experiment ID: 20000227 Result: Down-regulated in Transcription
  misc_feature: MA Experiment 20000227 PARAMETER Experiment Name: At_Root-Tips-vs-Tops_P Parameter: Tissue Value: Root Tips vs. Root Tops
  misc_feature: MA Experiment ID: 20000451 Result: Down-regulated in Transcription
  misc_feature: MA Experiment 20000451 PARAMETER Experiment Name: At_CS6879_Shoots-Roots_P Parameter: Age (day) Value: 14
  misc_feature: MA Experiment 20000451 PARAMETER Experiment Name: At_CS6879_Shoots-Roots_P Parameter: Organism Value: A. thaliana
  misc_feature: MA Experiment 20000451 PARAMETER Experiment Name: At_CS6879_Shoots-Roots_P Parameter: Plant Line Value: CS6879 vs. WS
  misc_feature: MA Experiment 20000451 PARAMETER Experiment Name: At_CS6879_Shoots-Roots_P Parameter: Tissue Value: Roots
  misc_feature: MA Experiment ID: 20000456 Result: Up-regulated in Transcription
  misc_feature: MA Experiment 20000456 PARAMETER Experiment Name: At_100uM_BA_P Parameter: Age (day) Value: 14
  misc_feature: MA Experiment 20000456 PARAMETER Experiment Name: At_100uM_BA_P Parameter: Organism Value: A. thaliana
  misc_feature: MA Experiment 20000456 PARAMETER Experiment Name: At_100uM_BA_P Parameter: Plant Line Value: WS
  misc_feature: MA Experiment 20000456 PARAMETER Experiment Name: At_100uM_BA_P Parameter: Timepoint (hr) Value: 6
  misc_feature: MA Experiment 20000456 PARAMETER Experiment Name: At_100uM_BA_P Parameter: Tissue Value: Aerial
  misc_feature: MA Experiment 20000456 PARAMETER Experiment Name: At_100uM_BA_P Parameter: Treatment Value: 100uM BA vs. No Treatment
  misc_feature: MA Experiment ID: 20000495 Result: Up-regulated in Transcription
  misc_feature: MA Experiment 20000495 PARAMETER Experiment Name: At_Guard_Cells_P Parameter: Harvest Date Value: 8/2/2002
  misc_feature: MA Experiment 20000495 PARAMETER Experiment Name: At_Guard_Cells_P Parameter: Organism Value: A. thaliana
  misc_feature: MA Experiment 20000495 PARAMETER Experiment Name: At_Guard_Cells_P Parameter: Tissue Value: Guard Cells vs. Leaves
  misc_feature: MA Experiment ID: 20000527 Result: Down-regulated in Transcription
  misc_feature: MA Experiment 20000527 PARAMETER Experiment Name: At_10percent_PEG_P Parameter: Age (day) Value: 20
  misc_feature: MA Experiment 20000527 PARAMETER Experiment Name: At_10percent_PEG_P Parameter: Organism Value: A. thaliana
  misc_feature: MA Experiment 20000527 PARAMETER Experiment Name: At_10percent_PEG_P Parameter: Plant Line Value: WS
  misc_feature: MA Experiment 20000527 PARAMETER Experiment Name: At_10percent_PEG_P Parameter: Timepoint (day) Value: 20
  misc_feature: MA Experiment 20000527 PARAMETER Experiment Name: At_10percent_PEG_P Parameter: Tissue Value: Whole Plant
  misc_feature: MA Experiment 20000527 PARAMETER Experiment Name: At_10percent_PEG_P Parameter: Treatment Value: 10percent PEG vs. No Treatment
  misc_feature: MA Experiment ID: 20001248 Result: Down-regulated in Transcription
  misc_feature: MA Experiment 20001248 PARAMETER Experiment Name: At_Far-red-induction_P Parameter: Age (day) Value: 7
  misc_feature: MA Experiment 20001248 PARAMETER Experiment Name: At_Far-red-induction_P Parameter: Light Value: Far-red vs. White
  misc_feature: MA Experiment 20001248 PARAMETER Experiment Name: At_Far-red-induction_P Parameter: Organism Value: A. thaliana
  misc_feature: MA Experiment 20001248 PARAMETER Experiment Name: At_Far-red-induction_P Parameter: Plant Line Value: Columbia
  misc_feature: MA Experiment 20001248 PARAMETER Experiment Name: At_Far-red-induction_P Parameter: Timepoint (hr) Value: 4
  misc_feature: MA Experiment 20001248 PARAMETER Experiment Name: At_Far-red-induction_P Parameter: Tissue Value: Whole Plant
  misc_feature: MA Experiment ID: 20001554 Result: Down-regulated in Transcription
  misc_feature: MA Experiment 20001554 PARAMETER Experiment Name: At_Drought_Soil_Dry_P Parameter: Age (day) Value: 21
  misc_feature: MA Experiment 20001554 PARAMETER Experiment Name: At_Drought_Soil_Dry_P Parameter: Organism Value: A. thaliana
  misc_feature: MA Experiment 20001554 PARAMETER Experiment Name: At_Drought_Soil_Dry_P Parameter: Plant Line Value: WS
  misc_feature: MA Experiment 20001554 PARAMETER Experiment Name: At_Drought_Soil_Dry_P Parameter: Post Timepoint (hr) Value: None
  misc_feature: MA Experiment 20001554 PARAMETER Experiment Name: At_Drought_Soil_Dry_P Parameter: Post-Treatment Value: None
  misc_feature: MA Experiment 20001554 PARAMETER Experiment Name: At_Drought_Soil_Dry_P Parameter: Timepoint (day) Value: 7
  misc_feature: MA Experiment 20001554 PARAMETER Experiment Name: At_Drought_Soil_Dry_P Parameter: Treatment Value: Drought vs. No Drought
atgagaaccgaaatagaaagtttgtgggtatttgctcttgcatcaaaattcaatatttacatgcaacaacattttgcttcccttctcgtcgccattgctatcacttggtttaccataaccatcgtattttggtctactccgggtggaccggcttggggaaaatacttcttcactcgccggtttatttctctcgattacaaccgaaaatacaagaatctcattcccggtcctagagggtttccacttgtgggaagcatgagccttaggtcaagccacgtggctcatcagcgcatagcgtctgtggctgagatgagtaacgccaagcggctcatggcgtttagcctcggtgatactaaggtggtggtgacgtgtcatcctgccgtggcaaaggagatactaaacagttcggtttttgctgaccgaccggttgacgaaaccgcttacggtttgatgtttaaccgagccatgggatttgctcccaatggtacttattggcgtacgctgcgtcggttaggctcgaaccatctttttaacccgaagcaaatcaaacaatcggaggatcagagacgggtgatagcgactcagatggtgaatgcgtttgcacgtaaccctaaatccgcgtgtgcagtgcgtgatttgctcaaaacagcgtcgttgtgtaacatgatgggtttggttttcgggagagagtatgaattggagtcaaataacaacttggaatctgaatgcttaaagggtttggttgaagaagggtacgatcttctaggtacgttaaattggaccgaccatcttccttggttagccggtttagatttccaacaaatccggtttaggtgctcgcagctcgtaccgaaagtaaatctgttattgagccgtatcatacatgaacaacgtgctgccacgggtaactttcttgacatgttactttctcttcaaggttcagaaaaattatcagaatccgacatggttgctgttctttgggaaatgatatttaggggaacggacactgttgcggttttggtcgagtgggtgctagcgaggattgtgatgcatcccaaagttcaattaacggtccacgatgagcttgaccgagtcgttggcagatcaagaaccgtggatgagtcagaccttccatcactcacgtatctaacggctatgatcaaagaagtgttgaggctgcatccaccaggtccactgctttcttgggcacgactgtctataacagacacttccgtagatggatatcacgtgccggctgggaccaccgcgatggtcaacatgtgggctatagcacgtgacccacacgtgtgggaggatcctttagagtttaagcctgagaggttcgtggctaaagagggtgaagctgagttctctgttttcgggtcggatctgaggttggcaccgttcgggtcgggtaagagggtttgccctggaaagaatttgggacttacaacggtgtcgttttgggttgcaacgctcttgcatgagtttgagtggcttcctagcgtcgaagctaaccctccagatctctcggaggttttgaggctctcgtgtgagatggcttgtccactcatcgttaacgtaagctcaaggcgtaagataatgtaa

SEQ ID NO: 80136 - protein, 535 aa, Arabidopsis thaliana
  peptide (1)..(535): Ceres Seq. ID no. 12654588
  misc_feature (1)..(535): Homolog of NCBI NO: 15223341 NR Description: cytochrome P450, putative; protein id:
  misc_feature (1)..(535): Homolog of NCBI NO: 6715638 NR Description: T25K16.18 [Arabidopsis thaliana]
  misc_feature (1)..(532): Homolog of NCBI NO: 15226422 NR Description: putative cytochrome P450; protein id: At2g46660.1
  misc_feature (1)..(532): Homolog of NCBI NO: 15228624 NR Description: cytochrome p450 (CYP78A9); protein id: supported by cDNA: 29661., supported by cDNA: gi_17065343, by cDNA: gi_6633988 [Arabidopsis thaliana]
  misc_feature (1)..(532): Homolog of NCBI NO: 21592543 NR Description: cytochrome p450 (CYP78A9) [Arabidopsis thaliana]
MRTEIESLWVFALASKFNIYMQQHFASLLVAIAITWFTITIVFWSTPGGPAWGKYFFTRRFISLDYNRKYKNLIPGPRGFPLVGSMSLRSSHVAHQRIASVAEMSNAKRLMAFSLGDTKVVVTCHPAVAKEILNSSVFADRPVDETAYGLMFNRAMGFAPNGTYWRTLRRLGSNHLFNPKQIKQSEDQRRVIATQMVNAFARNPKSACAVRDLLKTASLCNMMGLVFGREYELESNNNLESECLKGLVEEGYDLLGTLNWTDHLPWLAGLDFQQIRFRCSQLVPKVNLLLSRIIHEQRAATGNFLDMLLSLQGSEKLSESDMVAVLWEMIFRGTDTVAVLVEWVLARIVMHPKVQLTVHDELDRVVGRSRTVDESDLPSLTYLTAMIKEVLRLHPPGPLLSWARLSITDTSVDGYHVPAGTTAMVNMWAIARDPHVWEDPLEFKPERFVAKEGEAEFSVFGSDLRLAPFGSGKRVCPGKNLGLTTVSFWVATLLHEFEWLPSVEANPPDLSEVLRLSCEMACPLIVNVSSRRKIM

SEQ ID NO: 80137 - protein, 515 aa, Arabidopsis thaliana
  peptide (1)..(515): Ceres Seq. ID no. 12654589
  misc_feature (1)..(515): Homolog of NCBI NO: 15223341 NR Description: cytochrome P450, putative; protein id:
  misc_feature (1)..(515): Homolog of NCBI NO: 6715638 NR Description: T25K16.18 [Arabidopsis thaliana]
  misc_feature (1)..(512): Homolog of NCBI NO: 15226422 NR Description: putative cytochrome P450; protein id: At2g46660.1
  misc_feature (1)..(512): Homolog of NCBI NO: 15228624 NR Description: cytochrome p450 (CYP78A9); protein id: supported by cDNA: 29661., supported by cDNA: gi_17065343, by cDNA: gi_6633988 [Arabidopsis thaliana]
  misc_feature (1)..(512): Homolog of NCBI NO: 21592543 NR Description: cytochrome p450 (CYP78A9) [Arabidopsis thaliana]
MQQHFASLLVAIAITWFTITIVFWSTPGGPAWGKYFFTRRFISLDYNRKYKNLIPGPRGFPLVGSMSLRSSHVAHQRIASVAEMSNAKRLMAFSLGDTKVVVTCHPAVAKEILNSSVFADRPVDETAYGLMFNRAMGFAPNGTYWRTLRRLGSNHLFNPKQIKQSEDQRRVIATQMVNAFARNPKSACAVRDLLKTASLCNMMGLVFGREYELESNNNLESECLKGLVEEGYDLLGTLNWTDHLPWLAGLDFQQIRFRCSQLVPKVNLLLSRIIHEQRAATGNFLDMLLSLQGSEKLSESDMVAVLWEMIFRGTDTVAVLVEWVLARIVMHPKVQLTVHDELDRVVGRSRTVDESDLPSLTYLTAMIKEVLRLHPPGPLLSWARLSITDTSVDGYHVPAGTTAMVNMWAIARDPHVWEDPLEFKPERFVAKEGEAEFSVFGSDLRLAPFGSGKRVCPGKNLGLTTVSFWVATLLHEFEWLPSVEANPPDLSEVLRLSCEMACPLIVNVSSRRKIM

SEQ ID NO: 80138 - protein, 450 aa, Arabidopsis thaliana
  peptide (1)..(450): Ceres Seq. ID no. 12654590
  misc_feature (1)..(450): Homolog of NCBI NO: 15223341 NR Description: cytochrome P450, putative; protein id:
  misc_feature (1)..(450): Homolog of NCBI NO: 6715638 NR Description: T25K16.18 [Arabidopsis thaliana]
  misc_feature (1)..(447): Homolog of NCBI NO: 15226422 NR Description: putative cytochrome P450; protein id: At2g46660.1
  misc_feature (1)..(447): Homolog of NCBI NO: 15228624 NR Description: cytochrome p450 (CYP78A9); protein id: supported by cDNA: 29661., supported by cDNA: gi_17065343, by cDNA: gi_6633988 [Arabidopsis thaliana]
  misc_feature (1)..(447): Homolog of NCBI NO: 21592543 NR Description: cytochrome p450 (CYP78A9) [Arabidopsis thaliana]
MSLRSSHVAHQRIASVAEMSNAKRLMAFSLGDTKVVVTCHPAVAKEILNSSVFADRPVDETAYGLMFNRAMGFAPNGTYWRTLRRLGSNHLFNPKQIKQSEDQRRVIATQMVNAFARNPKSACAVRDLLKTASLCNMMGLVFGREYELESNNNLESECLKGLVEEGYDLLGTLNWTDHLPWLAGLDFQQIRFRCSQLVPKVNLLLSRIIHEQRAATGNFLDMLLSLQGSEKLSESDMVAVLWEMIFRGTDTVAVLVEWVLARIVMHPKVQLTVHDELDRVVGRSRTVDESDLPSLTYLTAMIKEVLRLHPPGPLLSWARLSITDTSVDGYHVPAGTTAMVNMWAIARDPHVWEDPLEFKPERFVAKEGEAEFSVFGSDLRLAPFGSGKRVCPGKNLGLTTVSFWVATLLHEFEWLPSVEANPPDLSEVLRLSCEMACPLIVNVSSRRKIM

SEQ ID NO: 80139 - DNA, 1533 bp, Arabidopsis thaliana
  misc_feature (1)..(1533): Ceres Seq. ID no. 12654597
  misc_feature: MA Experiment ID: 20000286 Result: Up-regulated in Transcription
  misc_feature: MA Experiment 20000286 PARAMETER Experiment Name: At_Open_Flower_P Parameter: Age (day) Value: 21
  misc_feature: MA Experiment 20000286 PARAMETER Experiment Name: At_Open_Flower_P Parameter: Plant Line Value: WS
  misc_feature: MA Experiment 20000286 PARAMETER Experiment Name: At_Open_Flower_P Parameter: Tissue Value: Half Open vs. Whole Plant
  misc_feature: MA Experiment ID: 20001910 Result: Down-regulated in Transcription
  misc_feature: MA Experiment 20001910 PARAMETER Experiment Name: At_Drought_Reproduction_P Parameter: Age (day) Value: 37
  misc_feature: MA Experiment 20001910 PARAMETER Experiment Name: At_Drought_Reproduction_P Parameter: Organism Value: A. thaliana
  misc_feature: MA Experiment 20001910 PARAMETER Experiment Name: At_Drought_Reproduction_P Parameter: Plant Line Value: WS
  misc_feature: MA Experiment 20001910 PARAMETER Experiment Name: At_Drought_Reproduction_P Parameter: Timepoint (day) Value: 7
  misc_feature: MA Experiment 20001910 PARAMETER Experiment Name: At_Drought_Reproduction_P Parameter: Tissue Value: Flowers
  misc_feature: MA Experiment 20001910 PARAMETER Experiment Name: At_Drought_Reproduction_P Parameter: Treatment Value: Drought vs. No Drought
atgattttggtgctagcctccctcttcgctgttctcattcttaatgttcttctatggagatggctcaaggcttcagcatgtaaagcccaaaggcttcctccaggtccaccaagattgcctattttgggtaaccttcttcaattggggcctttacctcatcgggacttggcttctctatgtgataagtacggcccacttgtctacctccggcttggaaatgtagatgctatcacaacgaacgatcccgataccatccgtgagattcttttgcggcaggacgatgttttttcatcgagacccaaaacactcgccgcagtccacctagcgtatggatgtggggacgttgcattagcgccaatgggcccgcattggaaaagaatgaggaggatatgcatggaacacctacttacaaccaaaaggcttgaatcttttacaacccaacgggctgaggaagctcggtatctaatacgagatgtcttcaaacggtccgaaaccggaaagccgataaatcttaaggaagtattgggtgctttctctatgaacaatgtgactaggatgctactagggaaacaattctttgggcctggatctctagttagcccaaaagaagcccaagagtttttgcacataactcacaaattgttttggctgttgggtgtaatttacctaggagattacttgccattttggagatgggtggatccgtccggatgcgagaaagaaatgagggacgtggagaagcgtgttgacgagtttcacactaagatcatcgacgagcacagaagggcaaaactggaagatgaagataaaaacggagacatggattttgttgacgttttgttgtctctacctggtgagaacgggaaggcacacatggaagacgttgaaattaaagctctaattcaggacatgatagctgctgcgacagatacgtcagcagtcacaaacgaatgggcaatggctgaagcgatcaagcaaccgcgagtgatgcgtaaaattcaagaagaactcgataatgtcgtaggatcaaatcgaatggtcgacgaatcggatctagtccatttaaactatctacgttgtgtggtacgagagacgttccgaatgcatccagccggaccattcttgatccctcacgaatccgtccgagcaacaacgatcaacggctactacatcccggcaaagacacgtgtcttcatcaatacacatggattgggccgaaacactaagatatgggacgacgtggaagacttcaggccagaacgacactggcccgttgaaggtagcggacgcgttgagataagtcatggaccggattttaagatattgccgtttagtgccggcaagaggaaatgtcccggagctccgttaggtgtgacgatggtgctaatggctttggctcggctcttccattgctttgaatggtcttcaccgggaaatattgatacggtggaagtttatggcatgactatgcctaaggctaaaccattacgggcaatcgctaagccacgattggcagctcatttgtacacataa

SEQ ID NO: 80140 - protein, 510 aa, Arabidopsis thaliana
  peptide (1)..(510): Ceres Seq. ID no. 12654598
  misc_feature (1)..(510): Homolog of NCBI NO: 15223365 NR Description: cytochrome p450 family; protein id: At1g01280.1
  misc_feature (12)..(509): Homolog of NCBI NO: 11249497 NR Description: cytochrome P450 CYP703A1 - garden petunia
  misc_feature (4)..(509): Homolog of NCBI NO: 18481718 NR Description: cytochrome P450 protein [Sorghum bicolor]
  misc_feature (1)..(505): Homolog of NCBI NO: 25282608 NR Description: cytochrome P-450LXXIA1 [similarity] - avocado
  misc_feature (1)..(478): Homolog of NCBI NO: 117188 NR Description: CYTOCHROME P450 71A1 (CYPLXXIA1) (ARP-2)
MILVLASLFAVLILNVLLWRWLKASACKAQRLPPGPPRLPILGNLLQLGPLPHRDLASLCDKYGPLVYLRLGNVDAITTNDPDTIREILLRQDDVFSSRPKTLAAVHLAYGCGDVALAPMGPHWKRMRRICMEHLLTTKRLESFTTQRAEEARYLIRDVFKRSETGKPINLKEVLGAFSMNNVTRMLLGKQFFGPGSLVSPKEAQEFLHITHKLFWLLGVIYLGDYLPFWRWVDPSGCEKEMRDVEKRVDEFHTKIIDEHRRAKLEDEDKNGDMDFVDVLLSLPGENGKAHMEDVEIKALIQDMIAAATDTSAVTNEWAMAEAIKQPRVMRKIQEELDNVVGSNRMVDESDLVHLNYLRCVVRETFRMHPAGPFLIPHESVRATTINGYYIPAKTRVFINTHGLGRNTKIWDDVEDFRPERHWPVEGSGRVEISHGPDFKILPFSAGKRKCPGAPLGVTMVLMALARLFHCFEWSSPGNIDTVEVYGMTMPKAKPLRAIAKPRLAAHLYT

SEQ ID NO: 80141 - protein, 391 aa, Arabidopsis thaliana
  peptide (1)..(391): Ceres Seq. ID no. 12654599
  misc_feature (1)..(391): Homolog of NCBI NO: 15223365 NR Description: cytochrome p450 family; protein id: At1g01280.1
  misc_feature (1)..(390): Homolog of NCBI NO: 11249497 NR Description: cytochrome P450 CYP703A1 - garden petunia
  misc_feature (1)..(390): Homolog of NCBI NO: 18481718 NR Description: cytochrome P450 protein [Sorghum bicolor]
  misc_feature (1)..(386): Homolog of NCBI NO: 25282608 NR Description: cytochrome P-450LXXIA1 [similarity] - avocado
  misc_feature (1)..(359): Homolog of NCBI NO: 117188 NR Description: CYTOCHROME P450 71A1 (CYPLXXIA1) (ARP-2)
MGPHWKRMRRICMEHLLTTKRLESFTTQRAEEARYLIRDVFKRSETGKPINLKEVLGAFSMNNVTRMLLGKQFFGPGSLVSPKEAQEFLHITHKLFWLLGVIYLGDYLPFWRWVDPSGCEKEMRDVEKRVDEFHTKIIDEHRRAKLEDEDKNGDMDFVDVLLSLPGENGKAHMEDVEIKALIQDMIAAATDTSAVTNEWAMAEAIKQPRVMRKIQEELDNVVGSNRMVDESDLVHLNYLRCVVRETFRMHPAGPFLIPHESVRATTINGYYIPAKTRVFINTHGLGRNTKIWDDVEDFRPERHWPVEGSGRVEISHGPDFKILPFSAGKRKCPGAPLGVTMVLMALARLFHCFEWSSPGNIDTVEVYGMTMPKAKPLRAIAKPRLAAHLYT

SEQ ID NO: 80142 - protein, 384 aa, Arabidopsis thaliana
  peptide (1)..(384): Ceres Seq. ID no. 12654600
  misc_feature (1)..(384): Homolog of NCBI NO: 15223365 NR Description: cytochrome p450 family; protein id: At1g01280.1
  misc_feature (1)..(383): Homolog of NCBI NO: 11249497 NR Description: cytochrome P450 CYP703A1 - garden petunia
  misc_feature (1)..(383): Homolog of NCBI NO: 18481718 NR Description: cytochrome P450 protein [Sorghum bicolor]
  misc_feature (1)..(379): Homolog of NCBI NO: 25282608 NR Description: cytochrome P-450LXXIA1 [similarity] - avocado
  misc_feature (1)..(352): Homolog of NCBI NO: 117188 NR Description: CYTOCHROME P450 71A1 (CYPLXXIA1) (ARP-2)
MRRICMEHLLTTKRLESFTTQRAEEARYLIRDVFKRSETGKPINLKEVLGAFSMNNVTRMLLGKQFFGPGSLVSPKEAQEFLHITHKLFWLLGVIYLGDYLPFWRWVDPSGCEKEMRDVEKRVDEFHTKIIDEHRRAKLEDEDKNGDMDFVDVLLSLPGENGKAHMEDVEIKALIQDMIAAATDTSAVTNEWAMAEAIKQPRVMRKIQEELDNVVGSNRMVDESDLVHLNYLRCVVRETFRMHPAGPFLIPHESVRATTINGYYIPAKTRVFINTHGLGRNTKIWDDVEDFRPERHWPVEGSGRVEISHGPDFKILPFSAGKRKCPGAPLGVTMVLMALARLFHCFEWSSPGNIDTVEVYGMTMPKAKPLRAIAKPRLAAHLYT

SEQ ID NO: 80143 - DNA, 2418 bp, Arabidopsis thaliana
  misc_feature (1)..(2418): Ceres Seq. ID no. 12654609
  misc_feature: MA Experiment ID: 20000171 Result: Up-regulated in Transcription
  misc_feature: MA Experiment 20000171 PARAMETER Experiment Name: At_42deg_Heat_P Parameter: Age (day) Value: 14
  misc_feature: MA Experiment 20000171 PARAMETER Experiment Name: At_42deg_Heat_P Parameter: Organism Value: A. thaliana
  misc_feature: MA Experiment 20000171 PARAMETER Experiment Name: At_42deg_Heat_P Parameter: Plant Line Value: WS
  misc_feature: MA Experiment 20000171 PARAMETER Experiment Name: At_42deg_Heat_P Parameter: Temperature (deg C) Value: 42 vs. 22
  misc_feature: MA Experiment 20000171 PARAMETER Experiment Name: At_42deg_Heat_P Parameter: Timepoint (hr) Value: 1
  misc_feature: MA Experiment 20000171 PARAMETER Experiment Name: At_42deg_Heat_P Parameter: Tissue Value: Aerial
  misc_feature: MA Experiment ID: 20000173 Result: Up-regulated in Transcription
  misc_feature: MA Experiment 20000173 PARAMETER Experiment Name: At_42deg_Heat_P Parameter: Age (day) Value: 14
  misc_feature: MA Experiment 20000173 PARAMETER Experiment Name: At_42deg_Heat_P Parameter: Organism Value: A. thaliana
  misc_feature: MA Experiment 20000173 PARAMETER Experiment Name: At_42deg_Heat_P Parameter: Plant Line Value: WS
  misc_feature: MA Experiment 20000173 PARAMETER Experiment Name: At_42deg_Heat_P Parameter: Temperature (deg C) Value: 42 vs. 22
  misc_feature: MA Experiment 20000173 PARAMETER Experiment Name: At_42deg_Heat_P Parameter: Timepoint (hr) Value: 6
  misc_feature: MA Experiment 20000173 PARAMETER Experiment Name: At_42deg_Heat_P Parameter: Tissue Value: Aerial
atcatgtagaagaattcgtatgtcttaagttttggttcttattataatgttaggactcgtcaccctgtaagcgaaagatcagttgaaatatacaagggtttggctgatggcatttagccatgataatcgtgtaaggttggtagttacagaaaatcttgaaaacagttcatagttgaatgattttttctactatctcattttcttatgattttgtttaggttcaaagatgaaggcaaaccattatcctctgaatatggttatggaagaaaagctagaccttctttagatagagttttcaagaatgtaaaatggggattcaagaagccattgagtttcccttcacataaggatcctgaccacaaggaaacatctagtgttactcggaagaacatcataaacccgcaggattcgtttctccagaactggaacaaaatatttttatttgcttgtgtggttgctttggcgattgatccattgtttttctacattcccattgtcgatagcgcaaggcactgtcttactttggactcaaagttggagatagctgcgagtttgcttcgtacgctcatcgatgccttttacattattcacattgtgtttcagttcaggacagcttacatcgctccttcttcgcgggtttttggaagaggtgaactggtagatgatgctaaggcaatagccttaaagtatctctcttcttacttcatcattgatctactctctatccttcctctcccacagatagtagttttagccgttattccaagcgtcaaccagccagtctctttgctaacaaaagactaccttaaattttccataattgctcaatatgttcctcggattctccgtatgtatccgctttacactgaagtgacaagaacatctggcattgttactgaaacagcatgggctggagctgcttggaacctctctctctatatgttagccagtcatgtgtttggagctttatggtacttaatctcagtagaacgagaagacagatgctggcaagaggcatgcgagaagacaaaaggttgtaatatgaaattcctctactgtgaaaacgatcgtaacgttagcaacaatttcctgaccacttcttgcccatttctcgaccctggtgatataacaaactcaaccatcttcaactttggcatcttcactgatgctcttaagagtggcgttgttgaatcacatgatttctggaagaaattcttctactgcttctggtggggtcttcgaaatctgagtgcattgggacagaatctccaaactagcaaattcgttggtgaaatcatatttgctatatcaatctgcatatctggactagtcttatttgctctacttatcggcaatatgcagaaatatttggagtcaacaacagttcgagaagaggaaatgagggtgagaaagagagatgcagagcagtggatgtctcatagaatgttacctgaagacctgaggaaacgtatcagaagatatgaacaatatagatggcaagagacaagaggagttgaagaagaaacccttcttcgtaacctccctaaagacctcagaagagatattaaacgccatctttgcctcgatctcctcaagaaagtacctttgtttgagataatggatgagcagttacttgacgcggtttgcgataggctaagacctgtgctctacaccgagaacagttacgtgatccgtgaaggagatcctgttggggaaatgttgtttgttatgagaggaagactggtaagtgccaccactaatggaggaagaagtgggttcttcaatgccgtgaacctaaaggcaagtgatttctgcggagaagatcttctcccgtgggcattagatcctcaatcttcttctcactttcccatctcgacaagaacagttcaagctctcactgaagtcgaagcctttgctctcacagctgaggatctcaagtctgtcgcttcacaattcagacgcctccatagcaagcaactccaacatacttttcggttttactcagtgcaatggagaacatggagcgtgtcttttatacaagcagcgtggaggagatactgtcggaggaagttagccaagtcactacgcgatgaagaagatcgtctccgagaagcgctcgctagtcaagataaagaacacaatgctgcaaccgtgtcgtcgtccttgagccttggaggcgctctttacgcgtcgcgtttcgcatcaaacgcgcttcacaatctgaggcacaatatctccaaccttcctcctcgctacactcttcctttgctacctcaaaaacccaccgagcctgacttcaccgccaatcatacaactgacccttagatctctcttgcatgtgtatagtgtgtggaataaagtgtaaaaacaatggtttgaactttgaaccaataaaatgtaaaaaattttgttgattga

SEQ ID NO: 80144 - protein, 706 aa, Arabidopsis thaliana
  peptide (1)..(706): Ceres Seq. ID no. 12654610
  misc_feature (114)..(385): Pfam Name: Ion transport protein Pfam Description: Ion transport protein
  misc_feature (5)..(699): Homolog of NCBI NO: 22328204 NR Description: cyclic nucleotide-regulated ion channel,
  misc_feature (13)..(699): Homolog of NCBI NO: 7484881 NR Description: cyclic nucleotide gated channel homolog F3I3.30 -
  misc_feature (5)..(699): Homolog of NCBI NO: 25407074 NR Description: hypothetical protein AT4g01010 [imported] - thaliana >gi|7228242|emb|CAB45784.2| cyclic nucleotide gated (CNGC4) like protein [Arabidopsis thaliana]
  misc_feature (21)..(703): Homolog of NCBI NO: 18407073 NR Description: cyclic nucleotide-regulated ion channel (CNGC3); id: At2g46430.1, supported by cDNA: gi_16648780, supported by
  misc_feature (21)..(703): Homolog of NCBI NO: 25408996 NR Description: hypothetical protein At2g46430 [imported] -
  misc_feature (21)..(703): Homolog of NCBI NO: 4378659 NR Description: cyclic nucleotide gated channel [Arabidopsis
  misc_feature (38)..(701): Homolog of NCBI NO: 15238657 NR Description: cyclic nucleotide-regulated ion channel (CNGC1); id: At5g53130.1, supported by cDNA: gi_13877752 [Arabidopsis
  misc_feature (23)..(700): Homolog of NCBI NO: 6969231 NR Description: cyclic nucleotide-gated calmodulin-binding ion
  misc_feature (61)..(700): Homolog of NCBI NO: 7489415 NR Description: probable calmodulin binding transport protein - >gi|3169012|emb|CAA05637.1| putative calmodulin binding
  misc_feature (6)..(701): Homolog of NCBI NO: 30696976 NR Description: cyclic nucleotide-regulated ion channel (CNGC5)
MILFRFKDEGKPLSSEYGYGRKARPSLDRVFKNVKWGFKKPLSFPSHKDPDHKETSSVTRKNIINPQDSFLQNWNKIFLFACVVALAIDPLFFYIPIVDSARHCLTLDSKLEIAASLLRTLIDAFYIIHIVFQFRTAYIAPSSRVFGRGELVDDAKAIALKYLSSYFIIDLLSILPLPQIVVLAVIPSVNQPVSLLTKDYLKFSIIAQYVPRILRMYPLYTEVTRTSGIVTETAWAGAAWNLSLYMLASHVFGALWYLISVEREDRCWQEACEKTKGCNMKFLYCENDRNVSNNFLTTSCPFLDPGDITNSTIFNFGIFTDALKSGVVESHDFWKKFFYCFWWGLRNLSALGQNLQTSKFVGEIIFAISICISGLVLFALLIGNMQKYLESTTVREEEMRVRKRDAEQWMSHRMLPEDLRKRIRRYEQYRWQETRGVEEETLLRNLPKDLRRDIKRHLCLDLLKKVPLFEIMDEQLLDAVCDRLRPVLYTENSYVIREGDPVGEMLFVMRGRLVSATTNGGRSGFFNAVNLKASDFCGEDLLPWALDPQSSSHFPISTRTVQALTEVEAFALTAEDLKSVASQFRRLHSKQLQHTFRFYSVQWRTWSVSFIQAAWRRYCRRKLAKSLRDEEDRLREALASQDKEHNAATVSSSLSLGGALYASRFASNALHNLRHNISNLPPRYTLPLLPQKPTEPDFTANHTTDP

SEQ ID NO: 80145 - protein, 491 aa, Arabidopsis thaliana
  peptide (1)..(491): Ceres Seq. ID no. 12654611
  misc_feature (1)..(170): Pfam Name: Ion transport protein Pfam Description: Ion transport protein
  misc_feature (1)..(484): Homolog of NCBI NO: 22328204 NR Description: cyclic nucleotide-regulated ion channel,
  misc_feature (1)..(484): Homolog of NCBI NO: 7484881 NR Description: cyclic nucleotide gated channel homolog F3I3.30 -
  misc_feature (1)..(484): Homolog of NCBI NO: 25407074 NR Description: hypothetical protein AT4g01010 [imported] - thaliana >gi|7228242|emb|CAB45784.2| cyclic nucleotide gated (CNGC4) like protein [Arabidopsis thaliana]
  misc_feature (1)..(488): Homolog of NCBI NO: 18407073 NR Description: cyclic nucleotide-regulated ion channel (CNGC3); id: At2g46430.1, supported by cDNA: gi_16648780, supported by
  misc_feature (1)..(488): Homolog of NCBI NO: 25408996 NR Description: hypothetical protein At2g46430 [imported] -
  misc_feature (1)..(488): Homolog of NCBI NO: 4378659 NR Description: cyclic nucleotide gated channel [Arabidopsis
  misc_feature (1)..(486): Homolog of NCBI NO: 15238657 NR Description: cyclic nucleotide-regulated ion channel (CNGC1); id: At5g53130.1, supported by cDNA: gi_13877752 [Arabidopsis
  misc_feature (1)..(485): Homolog of NCBI NO: 6969231 NR Description: cyclic nucleotide-gated calmodulin-binding ion
  misc_feature (1)..(485): Homolog of NCBI NO: 7489415 NR Description: probable calmodulin binding transport protein - >gi|3169012|emb|CAA05637.1| putative calmodulin binding
  misc_feature (1)..(486): Homolog of NCBI NO: 30696976 NR Description: cyclic nucleotide-regulated ion channel (CNGC5)
MYPLYTEVTRTSGIVTETAWAGAAWNLSLYMLASHVFGALWYLISVEREDRCWQEACEKTKGCNMKFLYCENDRNVSNNFLTTSCPFLDPGDITNSTIFNFGIFTDALKSGVVESHDFWKKFFYCFWWGLRNLSALGQNLQTSKFVGEIIFAISICISGLVLFALLIGNMQKYLESTTVREEEMRVRKRDAEQWMSHRMLPEDLRKRIRRYEQYRWQETRGVEEETLLRNLPKDLRRDIKRHLCLDLLKKVPLFEIMDEQLLDAVCDRLRPVLYTENSYVIREGDPVGEMLFVMRGRLVSATTNGGRSGFFNAVNLKASDFCGEDLLPWALDPQSSSHFPISTRTVQALTEVEAFALTAEDLKSVASQFRRLHSKQLQHTFRFYSVQWRTWSVSFIQAAWRRYCRRKLAKSLRDEEDRLREALASQDKEHNAATVSSSLSLGGALYASRFASNALHNLRHNISNLPPRYTLPLLPQKPTEPDFTANHTTDP

SEQ ID NO: 80146 - protein, 461 aa, Arabidopsis thaliana
  peptide (1)..(461): Ceres Seq. ID no. 12654612
  misc_feature (1)..(140): Pfam Name: Ion transport protein Pfam Description: Ion transport protein
  misc_feature (1)..(454): Homolog of NCBI NO: 22328204 NR Description: cyclic nucleotide-regulated ion channel,
  misc_feature (1)..(454): Homolog of NCBI NO: 7484881 NR Description: cyclic nucleotide gated channel homolog F3I3.30 -
  misc_feature (1)..(454): Homolog of NCBI NO: 25407074 NR Description: hypothetical protein AT4g01010 [imported] - thaliana >gi|7228242|emb|CAB45784.2| cyclic nucleotide gated (CNGC4) like protein [Arabidopsis thaliana]
  misc_feature (1)..(458): Homolog of NCBI NO: 18407073 NR Description: cyclic nucleotide-regulated ion channel (CNGC3); id: At2g46430.1, supported by cDNA: gi_16648780, supported by
  misc_feature (1)..(458): Homolog of NCBI NO: 25408996 NR Description: hypothetical protein At2g46430 [imported] -
  misc_feature (1)..(458): Homolog of NCBI NO: 4378659 NR Description: cyclic nucleotide gated channel [Arabidopsis
  misc_feature (1)..(456): Homolog of NCBI NO: 15238657 NR Description: cyclic nucleotide-regulated ion channel (CNGC1); id: At5g53130.1, supported by cDNA: gi_13877752 [Arabidopsis
  misc_feature (1)..(455): Homolog of NCBI NO: 6969231 NR Description: cyclic nucleotide-gated calmodulin-binding ion
  misc_feature (1)..(455): Homolog of NCBI NO: 7489415 NR Description: probable calmodulin binding transport protein - >gi|3169012|emb|CAA05637.1| putative calmodulin binding
  misc_feature (1)..(456): Homolog of NCBI NO: 30696976 NR Description: cyclic nucleotide-regulated ion channel (CNGC5)
MLASHVFGALWYLISVEREDRCWQEACEKTKGCNMKFLYCENDRNVSNNFLTTSCPFLDPGDITNSTIFNFGIFTDALKSGVVESHDFWKKFFYCFWWGLRNLSALGQNLQTSKFVGEIIFAISICISGLVLFALLIGNMQKYLESTTVREEEMRVRKRDAEQWMSHRMLPEDLRKRIRRYEQYRWQETRGVEEETLLRNLPKDLRRDIKRHLCLDLLKKVPLFEIMDEQLLDAVCDRLRPVLYTENSYVIREGDPVGEMLFVMRGRLVSATTNGGRSGFFNAVNLKASDFCGEDLLPWALDPQSSSHFPISTRTVQALTEVEAFALTAEDLKSVASQFRRLHSKQLQHTFRFYSVQWRTWSVSFIQAAWRRYCRRKLAKSLRDEEDRLREALASQDKEHNAATVSSSLSLGGALYASRFASNALHNLRHNISNLPPRYTLPLLPQKPTEPDFTANHTTDP

SEQ ID NO: 80147 - DNA, 1687 bp, Arabidopsis thaliana
  misc_feature (1)..(1687): Ceres Seq. ID no. 12654613
  misc_feature: MA Experiment ID: 20000180 Result: Up-regulated in Transcription
  misc_feature: MA Experiment 20000180 PARAMETER Experiment Name: At_Germinating_Seeds_P Parameter: Age (hr) Value: 24 vs. 0
  misc_feature: MA Experiment 20000180 PARAMETER Experiment Name: At_Germinating_Seeds_P Parameter: Tissue Value: Germinating Seeds
  misc_feature: MA Experiment ID: 20000184 Result: Up-regulated in Transcription
  misc_feature: MA Experiment 20000184 PARAMETER Experiment Name: At_Shoots__P Parameter: Age (day) Value: 7
  misc_feature: MA Experiment 20000184 PARAMETER Experiment Name: At_Shoots__P Parameter: Tissue Value: Shoots vs. Whole Plant
  misc_feature: MA Experiment ID: 20000436 Result: Down-regulated in Transcription
  misc_feature: MA Experiment 20000436 PARAMETER Experiment Name: At_Drought_P Parameter: Age (day) Value: 7
  misc_feature: MA Experiment 20000436 PARAMETER Experiment Name: At_Drought_P Parameter: Organism Value: A. thaliana
  misc_feature: MA Experiment 20000436 PARAMETER Experiment Name: At_Drought_P Parameter: Plant Line Value: WS
  misc_feature: MA Experiment 20000436 PARAMETER Experiment Name: At_Drought_P Parameter: Timepoint (hr) Value: 12
  misc_feature: MA Experiment 20000436 PARAMETER Experiment Name: At_Drought_P Parameter: Tissue Value: Whole Plant
  misc_feature: MA Experiment 20000436 PARAMETER Experiment Name: At_Drought_P Parameter: Treatment Value: Drought vs. No Drought
  misc_feature: MA Experiment ID: 20000438 Result: Up-regulated in Transcription
  misc_feature: MA Experiment 20000438 PARAMETER Experiment Name: At_Shoots__P Parameter: Age (day) Value: 14
  misc_feature: MA Experiment 20000438 PARAMETER Experiment Name: At_Shoots__P Parameter: Tissue Value: Shoots vs. Whole Plant
  misc_feature: MA Experiment ID: 20001247 Result: Down-regulated in Transcription
  misc_feature: MA Experiment 20001247 PARAMETER Experiment Name: At_Far-red-induction_P Parameter: Age (day) Value: 7
  misc_feature: MA Experiment 20001247 PARAMETER Experiment Name: At_Far-red-induction_P Parameter: Light Value: Far-red vs. White
  misc_feature: MA Experiment 20001247 PARAMETER Experiment Name: At_Far-red-induction_P Parameter: Organism Value: A. thaliana
  misc_feature: MA Experiment 20001247 PARAMETER Experiment Name: At_Far-red-induction_P Parameter: Plant Line Value: Columbia
  misc_feature: MA Experiment 20001247 PARAMETER Experiment Name: At_Far-red-induction_P Parameter: Timepoint (hr) Value: 1
  misc_feature: MA Experiment 20001247 PARAMETER Experiment Name: At_Far-red-induction_P Parameter: Tissue Value: Whole Plant
  misc_feature: MA Experiment ID: 20001450 Result: Up-regulated in Transcription
  misc_feature: MA Experiment 20001450 PARAMETER Experiment Name: At_Far-red-induction_P Parameter: Age (day) Value: 7
  misc_feature: MA Experiment 20001450 PARAMETER Experiment Name: At_Far-red-induction_P Parameter: Light Value: Far-red vs. White
  misc_feature: MA Experiment 20001450 PARAMETER Experiment Name: At_Far-red-induction_P Parameter: Organism Value: A. thaliana
  misc_feature: MA Experiment 20001450 PARAMETER Experiment Name: At_Far-red-induction_P Parameter: Plant Line Value: Columbia
  misc_feature: MA Experiment 20001450 PARAMETER Experiment Name: At_Far-red-induction_P Parameter: Timepoint (hr) Value: 8
  misc_feature: MA Experiment 20001450 PARAMETER Experiment Name: At_Far-red-induction_P Parameter: Tissue Value: Whole Plant
  misc_feature: MA Experiment ID: 20001555 Result: Down-regulated in Transcription
  misc_feature: MA Experiment 20001555 PARAMETER Experiment Name: At_Drought_Soil_Dry_P Parameter: Age (day) Value: 24
  misc_feature: MA Experiment 20001555 PARAMETER Experiment Name: At_Drought_Soil_Dry_P Parameter: Organism Value: A. thaliana
  misc_feature: MA Experiment 20001555 PARAMETER Experiment Name: At_Drought_Soil_Dry_P Parameter: Plant Line Value: WS
  misc_feature: MA Experiment 20001555 PARAMETER Experiment Name: At_Drought_Soil_Dry_P Parameter: Post Timepoint (hr) Value: None
  misc_feature: MA Experiment 20001555 PARAMETER Experiment Name: At_Drought_Soil_Dry_P Parameter: Post-Treatment Value: None
  misc_feature: MA Experiment 20001555 PARAMETER Experiment Name: At_Drought_Soil_Dry_P Parameter: Timepoint (day) Value: 10
  misc_feature: MA Experiment 20001555 PARAMETER Experiment Name: At_Drought_Soil_Dry_P Parameter: Treatment Value: Drought vs. No Drought
  misc_feature: MA Experiment ID: 20001556 Result: Down-regulated in Transcription
  misc_feature: MA Experiment 20001556 PARAMETER Experiment Name: At_Drought_Soil_Dry_P Parameter: Age (day) Value: 26
  misc_feature: MA Experiment 20001556 PARAMETER Experiment Name: At_Drought_Soil_Dry_P Parameter: Organism Value: A. thaliana
  misc_feature: MA Experiment 20001556 PARAMETER Experiment Name: At_Drought_Soil_Dry_P Parameter: Plant Line Value: WS
  misc_feature: MA Experiment 20001556 PARAMETER Experiment Name: At_Drought_Soil_Dry_P Parameter: Post Timepoint (hr) Value: None
  misc_feature: MA Experiment 20001556 PARAMETER Experiment Name: At_Drought_Soil_Dry_P Parameter: Post-Treatment Value: None
  misc_feature: MA Experiment 20001556 PARAMETER Experiment Name: At_Drought_Soil_Dry_P Parameter: Timepoint (day) Value: 12
  misc_feature: MA Experiment 20001556 PARAMETER Experiment Name: At_Drought_Soil_Dry_P Parameter: Treatment Value: Drought vs. No Drought
  misc_feature: MA Experiment ID: 20001557 Result: Down-regulated in Transcription
  misc_feature: MA Experiment 20001557 PARAMETER Experiment Name: At_Drought_Soil_Dry_P Parameter: Age (day) Value: 27
  misc_feature: MA Experiment 20001557 PARAMETER Experiment Name: At_Drought_Soil_Dry_P Parameter: Organism Value: A. thaliana
  misc_feature: MA Experiment 20001557 PARAMETER Experiment Name: At_Drought_Soil_Dry_P Parameter: Plant Line Value: WS
  misc_feature: MA Experiment 20001557 PARAMETER Experiment Name: At_Drought_Soil_Dry_P Parameter: Post Timepoint (hr) Value: 3
  misc_feature: MA Experiment 20001557 PARAMETER Experiment Name: At_Drought_Soil_Dry_P Parameter: Post-Treatment Value: Re-Water vs. No Drought
  misc_feature: MA Experiment 20001557 PARAMETER Experiment Name: At_Drought_Soil_Dry_P Parameter: Timepoint (day) Value: 13
  misc_feature: MA Experiment 20001557 PARAMETER Experiment Name: At_Drought_Soil_Dry_P Parameter: Treatment Value: Drought vs. No Drought
  misc_feature: MA Experiment ID: 20001558 Result: Down-regulated in Transcription
  misc_feature: MA Experiment 20001558 PARAMETER Experiment Name: At_Drought_Soil_Dry_P Parameter: Age (day) Value: 27
  misc_feature: MA Experiment 20001558 PARAMETER Experiment Name: At_Drought_Soil_Dry_P Parameter: Organism Value: A. thaliana
  misc_feature: MA Experiment 20001558 PARAMETER Experiment Name: At_Drought_Soil_Dry_P Parameter: Plant Line Value: WS
  misc_feature: MA Experiment 20001558 PARAMETER Experiment Name: At_Drought_Soil_Dry_P Parameter: Post Timepoint (hr) Value: 6
  misc_feature: MA Experiment 20001558 PARAMETER Experiment Name: At_Drought_Soil_Dry_P Parameter: Post-Treatment Value: Re-Water vs. No Drought
  misc_feature: MA Experiment 20001558 PARAMETER Experiment Name: At_Drought_Soil_Dry_P Parameter: Timepoint (day) Value: 13
  misc_feature: MA Experiment 20001558 PARAMETER Experiment Name: At_Drought_Soil_Dry_P Parameter: Treatment Value: Drought vs. No Drought
  misc_feature: MA Experiment ID: 20001560 Result: Down-regulated in Transcription
  misc_feature: MA Experiment 20001560 PARAMETER Experiment Name: At_Drought_Soil_Dry_P Parameter: Age (day) Value: 28
  misc_feature: MA Experiment 20001560 PARAMETER Experiment Name: At_Drought_Soil_Dry_P Parameter: Organism Value: A. thaliana
  misc_feature: MA Experiment 20001560 PARAMETER Experiment Name: At_Drought_Soil_Dry_P Parameter: Plant Line Value: WS
  misc_feature: MA Experiment 20001560 PARAMETER Experiment Name: At_Drought_Soil_Dry_P Parameter: Post Timepoint (hr) Value: None
  misc_feature: MA Experiment 20001560 PARAMETER Experiment Name: At_Drought_Soil_Dry_P Parameter: Post-Treatment Value: None
  misc_feature: MA Experiment 20001560 PARAMETER Experiment Name: At_Drought_Soil_Dry_P Parameter: Timepoint (day) Value: 14
  misc_feature: MA Experiment 20001560 PARAMETER Experiment Name: At_Drought_Soil_Dry_P Parameter: Treatment Value: Drought vs. No Drought
  misc_feature: MA Experiment ID: 20001904 Result: Down-regulated in Transcription
  misc_feature: MA Experiment 20001904 PARAMETER Experiment Name: At_Drought_Reproduction_P Parameter: Age (day) Value: 37
  misc_feature: MA Experiment 20001904 PARAMETER Experiment Name: At_Drought_Reproduction_P Parameter: Organism Value: A. thaliana
  misc_feature: MA Experiment 20001904 PARAMETER Experiment Name: At_Drought_Reproduction_P Parameter: Plant Line Value: WS
  misc_feature: MA Experiment 20001904 PARAMETER Experiment Name: At_Drought_Reproduction_P Parameter: Timepoint (day) Value: 7
  misc_feature: MA Experiment 20001904 PARAMETER Experiment Name: At_Drought_Reproduction_P Parameter: Tissue Value: Rosettes
  misc_feature: MA Experiment 20001904 PARAMETER Experiment Name: At_Drought_Reproduction_P Parameter: Treatment Value: Drought vs. No Drought
atagatatttttcaagaaataagaataaagaaaattctactcttaatggcggaagcaaacactccacacatagcaatcatgccgagtcccggtatgggtcaccttatcccattcgtcgagttagcaaagcgactcgttcagcacgactgtttcaccgtcacaatgatcatctccggtgaaacttcgccgtctaaggcacaaagatccgttctcaactctctcccttcctccatagcctccgtatttctccctcccgccgatctttccgatgttccctccacagcgcgaatcgaaactcgggccatgctcaccatgactcgttccaatccggcgctccgggagctttttggctctttatcaacgaagaaaagtctcccggcggttctcgtcgtcgatatgtttggtgcggatgcgttcgacgtggccgttgacttccacgtgtcaccatacattttctatgcatccaatgcaaacgtcttgtcgttttttcttcacttgccgaaactagacaaaacggtgtcgtgtgagtttaggtacttaaccgaaccgcttaagattcccggctgtgtcccgataaccggtaaggactttcttgatacggttcaagaccgaaacgacgacgcatacaaattgcttctccataacaccaagaggtacaaagaagctaaagggattctagtgaattccttcgttgatttagagtcgaatgcaataaaggccttacaagaaccggctcctgataaaccaacggtatacccgattgggccgctggttaacacaagttcatctaatgttaacttggaagacaagttcggatgtttaagttggctagacaaccaaccattcggctcggttctatacatatcatttggaagcggcggaacacttacatgtgagcagtttaatgagcttgctattggtcttgcggagagcggaaaacggtttatttgggtcatacgaagtccaagcgagatagttagttcgtcgtatttcaatccacacagcgagacagaccccttttcgtttttaccaattgggttcttagaccgaaccaaagagaaaggtttggtggttccatcatgggctccacaggttcaaatcctggctcatccatccacatgcgggtttttaacacactgtggatggaattcgaccttagaaagcattgtaaacggtgtaccactcatagcgtggcctttattcgcggagcaaaagatgaatacattgctactcgtggaggatgttggagcggctctaagaatccatgcgggtgaagatgggattgtacggagggaagaagtggtgagagtggtgaaggcactgatggaaggtgaagagggaaaagccataggaaataaagtgaaggagttgaaagaaggagttgttagagtcttgggtgacgatggattgtccagcaagtcatttggtgaagttttgttaaagtggaaaacgcaccagcgagatatcaaccaagagacgtcccactaaatatgtgagtttgaggctttgagctatgttatgcacattaggtatgcgaccatgctcaagataaaaaatgcttcaatattatgcattgtgttgcaaggagtcaccaacatattaataaactgtaattttgaccttggtcaaaatcaaaatgacctttgtacaacataaaatttaaaaggtaacatactttcatctgatt

SEQ ID NO: 80148 - protein, 495 aa, Arabidopsis thaliana
  peptide (1)..(495): Ceres Seq. ID no. 12654614
  misc_feature (32)..(486): Pfam Name: UDP-glucoronosyl and UDP-glucosyl transferase Pfam Description: UDP-glucoronosyl and UDP-glucosyl transferase
  misc_feature (16)..(495): Homolog of NCBI NO: 15223392 NR Description: flavonol 3-o-glucosyltransferase, putative; id: At1g01390.1, supported by cDNA: gi_17065183 [Arabidopsis
  misc_feature (27)..(495): Homolog of NCBI NO: 25286808 NR Description: protein probable UTP-glucose glucosyltransferase
  misc_feature (16)..(492): Homolog of NCBI NO: 15223396 NR Description: flavonol 3-o-glucosyltransferase, putative; id: At1g01420.1 [Arabidopsis thaliana] >gi|25286824|pir||G86144
  misc_feature (16)..(495): Homolog of NCBI NO: 15234056 NR Description: putative flavonol glucosyltransferase; protein At4g01070.1, supported by cDNA: 1204., supported by cDNA: [Arabidopsis thaliana] >gi|28380085|sp|Q9M156|HQGT_ARATH Probable
  misc_feature (180)..(495): Homolog of NCBI NO: 7433902 NR Description: UTP-glucose glucosyltransferase homolog
  misc_feature (16)..(160): Homolog of NCBI NO: 7433902 NR Description: UTP-glucose glucosyltransferase homolog
  misc_feature (20)..(483): Homolog of NCBI NO: 28380078 NR Description: Hydroquinone glucosyltransferase (Arbutin >gi|13508844|emb|CAC35167.1| arbutin synthase [Rauvolfia
  misc_feature (23)..(484): Homolog of NCBI NO: 19911209 NR Description: glucosyltransferase-13 [Vigna angularis]
  misc_feature (18)..(483): Homolog of NCBI NO: 34912764 NR Description: putative UTP-glucose glucosyltransferase [Oryza
  misc_feature (17)..(483): Homolog of NCBI NO: 34912752 NR Description: putative UTP-glucose glucosyltransferase [Oryza
IDIFQEIRIKKILLLMAEANTPHIAIMPSPGMGHLIPFVELAKRLVQHDCFTVTMIISGETSPSKAQRSVLNSLPSSIASVFLPPADLSDVPSTARIETRAMLTMTRSNPALRELFGSLSTKKSLPAVLVVDMFGADAFDVAVDFHVSPYIFYASNANVLSFFLHLPKLDKTVSCEFRYLTEPLKIPGCVPITGKDFLDTVQDRNDDAYKLLLHNTKRYKEAKGILVNSFVDLESNAIKALQEPAPDKPTVYPIGPLVNTSSSNVNLEDKFGCLSWLDNQPFGSVLYISFGSGGTLTCEQFNELAIGLAESGKRFIWVIRSPSEIVSSSYFNPHSETDPFSFLPIGFLDRTKEKGLVVPSWAPQVQILAHPSTCGFLTHCGWNSTLESIVNGVPLIAWPLFAEQKMNTLLLVEDVGAALRIHAGEDGIVRREEVVRVVKALMEGEEGKAIGNKVKELKEGVVRVLGDDGLSSKSFGEVLLKWKTHQRDINQETSH

SEQ ID NO: 80149 - protein, 480 aa, Arabidopsis thaliana
  peptide (1)..(480): Ceres Seq. ID no. 12654615
  misc_feature (17)..(471): Pfam Name: UDP-glucoronosyl and UDP-glucosyl transferase Pfam Description: UDP-glucoronosyl and UDP-glucosyl transferase
  misc_feature (1)..(480): Homolog of NCBI NO: 15223392 NR Description: flavonol 3-o-glucosyltransferase, putative; id: At1g01390.1, supported by cDNA: gi_17065183 [Arabidopsis
  misc_feature (12)..(480): Homolog of NCBI NO: 25286808 NR Description: protein probable UTP-glucose glucosyltransferase
  misc_feature (1)..(477): Homolog of NCBI NO: 15223396 NR Description: flavonol 3-o-glucosyltransferase, putative; id: At1g01420.1 [Arabidopsis thaliana] >gi|25286824|pir||G86144
  misc_feature (1)..(480): Homolog of NCBI NO: 15234056 NR Description: putative flavonol glucosyltransferase; protein At4g01070.1, supported by cDNA: 1204., supported by cDNA: [Arabidopsis thaliana] >gi|28380085|sp|Q9M156|HQGT_ARATH Probable
  misc_feature (165)..(480): Homolog of NCBI NO: 7433902 NR Description: UTP-glucose glucosyltransferase homolog
  misc_feature (1)..(145): Homolog of NCBI NO: 7433902 NR Description: UTP-glucose glucosyltransferase homolog
  misc_feature (5)..(468): Homolog of NCBI NO: 28380078 NR Description: Hydroquinone glucosyltransferase (Arbutin >gi|13508844|emb|CAC35167.1| arbutin synthase [Rauvolfia
  misc_feature (8)..(469): Homolog of NCBI NO: 19911209 NR Description: glucosyltransferase-13 [Vigna angularis]
  misc_feature (3)..(468): Homolog of NCBI NO: 34912764 NR Description: putative UTP-glucose glucosyltransferase [Oryza
  misc_feature (2)..(468): Homolog of NCBI NO: 34912752 NR Description: putative UTP-glucose glucosyltransferase [Oryza
MAEANTPHIAIMPSPGMGHLIPFVELAKRLVQHDCFTVTMIISGETSPSKAQRSVLNSLPSSIASVFLPPADLSDVPSTARIETRAMLTMTRSNPALRELFGSLSTKKSLPAVLVVDMFGADAFDVAVDFHVSPYIFYASNANVLSFFLHLPKLDKTVSCEFRYLTEPLKIPGCVPITGKDFLDTVQDRNDDAYKLLLHNTKRYKEAKGILVNSFVDLESNAIKALQEPAPDKPTVYPIGPLVNTSSSNVNLEDKFGCLSWLDNQPFGSVLYISFGSGGTLTCEQFNELAIGLAESGKRFIWVIRSPSEIVSSSYFNPHSETDPFSFLPIGFLDRTKEKGLVVPSWAPQVQILAHPSTCGFLTHCGWNSTLESIVNGVPLIAWPLFAEQKMNTLLLVEDVGAALRIHAGEDGIVRREEVVRVVKALMEGEEGKAIGNKVKELKEGVVRVLGDDGLSSKSFGEVLLKWKTHQRDINQETSH

SEQ ID NO: 80150 - protein, 469 aa, Arabidopsis thaliana
  peptide (1)..(469): Ceres Seq. ID no. 12654616
  misc_feature (6)..(460): Pfam Name: UDP-glucoronosyl and UDP-glucosyl transferase Pfam Description: UDP-glucoronosyl and UDP-glucosyl transferase
  misc_feature (1)..(469): Homolog of NCBI NO: 15223392 NR Description: flavonol 3-o-glucosyltransferase, putative; id: At1g01390.1, supported by cDNA: gi_17065183 [Arabidopsis
  misc_feature (1)..(469): Homolog of NCBI NO: 25286808 NR Description: protein probable UTP-glucose glucosyltransferase
  misc_feature (1)..(466): Homolog of NCBI NO: 15223396 NR Description: flavonol 3-o-glucosyltransferase, putative; id: At1g01420.1 [Arabidopsis thaliana] >gi|25286824|pir||G86144
  misc_feature (1)..(469): Homolog of NCBI NO: 15234056 NR Description: putative flavonol glucosyltransferase; protein At4g01070.1, supported by cDNA: 1204., supported by cDNA: [Arabidopsis thaliana] >gi|28380085|sp|Q9M156|HQGT_ARATH Probable
  misc_feature (154)..(469): Homolog of NCBI NO: 7433902 NR Description: UTP-glucose glucosyltransferase homolog
  misc_feature (1)..(134): Homolog of NCBI NO: 7433902 NR Description: UTP-glucose glucosyltransferase homolog
  misc_feature (1)..(457): Homolog of NCBI NO: 28380078 NR Description: Hydroquinone glucosyltransferase (Arbutin >gi|13508844|emb|CAC35167.1| arbutin synthase [Rauvolfia
  misc_feature (1)..(458): Homolog of NCBI NO: 19911209 NR Description: glucosyltransferase-13 [Vigna angularis]
  misc_feature (1)..(457): Homolog of NCBI NO: 34912764 NR Description: putative UTP-glucose glucosyltransferase [Oryza
  misc_feature (1)..(457): Homolog of NCBI NO: 34912752 NR Description: putative UTP-glucose glucosyltransferase [Oryza
MPSPGMGHLIPFVELAKRLVQHDCFTVTMIISGETSPSKAQRSVLNSLPSSIASVFLPPADLSDVPSTARIETRAMLTMTRSNPALRELFGSLSTKKSLPAVLVVDMFGADAFDVAVDFHVSPYIFYASNANVLSFFLHLPKLDKTVSCEFRYLTEPLKIPGCVPITGKDFLDTVQDRNDDAYKLLLHNTKRYKEAKGILVNSFVDLESNAIKALQEPAPDKPTVYPIGPLVNTSSSNVNLEDKFGCLSWLDNQPFGSVLYISFGSGGTLTCEQFNELAIGLAESGKRFIWVIRSPSEIVSSSYFNPHSETDPFSFLPIGFLDRTKEKGLVVPSWAPQVQILAHPSTCGFLTHCGWNSTLESIVNGVPLIAWPLFAEQKMNTLLLVEDVGAALRIHAGEDGIVRREEVVRVVKALMEGEEGKAIGNKVKELKEGVVRVLGDDGLSSKSFGEVLLKWKTHQRDINQETSH

SEQ ID NO: 80151 - DNA, 1446 bp, Arabidopsis thaliana
  misc_feature (1)..(1446): Ceres Seq. ID no. 12654623
  misc_feature: MA Experiment ID: 20000314 Result: Up-regulated in Transcription
  misc_feature: MA Experiment 20000314 PARAMETER Experiment Name: At_14day_Shoots-Roots_Sub_P Parameter: Age (day) Value: 14
  misc_feature: MA Experiment 20000314 PARAMETER Experiment Name: At_14day_Shoots-Roots_Sub_P Parameter: Organism Value: A. thaliana
  misc_feature: MA Experiment 20000314 PARAMETER Experiment Name: At_14day_Shoots-Roots_Sub_P Parameter: Plant Line Value: WS
  misc_feature: MA Experiment 20000314 PARAMETER Experiment Name: At_14day_Shoots-Roots_Sub_P Parameter: Tissue Value: Roots vs. Whole Plant
  misc_feature: MA Experiment ID: 20000315 Result: Up-regulated in Transcription
  misc_feature: MA Experiment 20000315 PARAMETER Experiment Name: At_14day_Shoots-Roots_Sub_P Parameter: Age (day) Value: 14
  misc_feature: MA Experiment 20000315 PARAMETER Experiment Name: At_14day_Shoots-Roots_Sub_P Parameter: Organism Value: A. thaliana
  misc_feature: MA Experiment 20000315 PARAMETER Experiment Name: At_14day_Shoots-Roots_Sub_P Parameter: Plant Line Value: WS
  misc_feature: MA Experiment 20000315 PARAMETER Experiment Name: At_14day_Shoots-Roots_Sub_P Parameter: Tissue Value: Shoots vs. Whole Plant
  misc_feature: MA Experiment ID: 20000327 Result: Down-regulated in Transcription
  misc_feature: MA Experiment 20000327 PARAMETER Experiment Name: At_42deg_Heat_Sub_P Parameter: Age (day) Value: 14
  misc_feature: MA Experiment 20000327 PARAMETER Experiment Name: At_42deg_Heat_Sub_P Parameter: Organism Value: A. thaliana
  misc_feature: MA Experiment 20000327 PARAMETER Experiment Name: At_42deg_Heat_Sub_P Parameter: Plant Line Value: WS
  misc_feature: MA Experiment 20000327 PARAMETER Experiment Name: At_42deg_Heat_Sub_P Parameter: Temperature (deg C) Value: 42 vs. 22
  misc_feature: MA Experiment 20000327 PARAMETER Experiment Name: At_42deg_Heat_Sub_P Parameter: Timepoint (hr) Value: 1
  misc_feature: MA Experiment 20000327 PARAMETER Experiment Name: At_42deg_Heat_Sub_P Parameter: Tissue Value: Aerial
  misc_feature: MA Experiment ID: 20000328 Result: Down-regulated in Transcription
  misc_feature: MA Experiment 20000328 PARAMETER Experiment Name: At_42deg_Heat_Sub_P Parameter: Age (day) Value: 14
  misc_feature: MA Experiment 20000328 PARAMETER Experiment Name: At_42deg_Heat_Sub_P Parameter: Organism Value: A. thaliana
  misc_feature: MA Experiment 20000328 PARAMETER Experiment Name: At_42deg_Heat_Sub_P Parameter: Plant Line Value: WS
  misc_feature: MA Experiment 20000328 PARAMETER Experiment Name: At_42deg_Heat_Sub_P Parameter: Temperature (deg C) Value: 42 vs. 22
  misc_feature: MA Experiment 20000328 PARAMETER Experiment Name: At_42deg_Heat_Sub_P Parameter: Timepoint (hr) Value: 6
  misc_feature: MA Experiment 20000328 PARAMETER Experiment Name: At_42deg_Heat_Sub_P Parameter: Tissue Value: Aerial
  misc_feature: MA Experiment ID: 20000349 Result: Down-regulated in Transcription
  misc_feature: MA Experiment 20000349 PARAMETER Experiment Name: At_100uM_ABA_Sub_P Parameter: Age (day) Value: 14
  misc_feature: MA Experiment 20000349 PARAMETER Experiment Name: At_100uM_ABA_Sub_P Parameter: Organism Value: A. thaliana
  misc_feature: MA Experiment 20000349 PARAMETER Experiment Name: At_100uM_ABA_Sub_P Parameter: Plant Line Value: WS
  misc_feature: MA Experiment 20000349 PARAMETER Experiment Name: At_100uM_ABA_Sub_P Parameter: Timepoint (hr) Value: 6
  misc_feature: MA Experiment 20000349 PARAMETER Experiment Name: At_100uM_ABA_Sub_P Parameter: Tissue Value: Aerial
  misc_feature: MA Experiment 20000349 PARAMETER Experiment Name: At_100uM_ABA_Sub_P Parameter: Treatment Value: 100uM ABA vs. No Treatment
  misc_feature: MA Experiment ID: 20000440 Result: Down-regulated in Transcription
  misc_feature: MA Experiment 20000440 PARAMETER Experiment Name: At_Closed-Flower__Sub_P Parameter: Tissue Value: Closed Flower vs. Whole Plant
atggcagatggaaacactccacatgtagcaatcataccaagtcccggtataggtcacctcatcccactcgtcgagttagcaaagcgactccttgacaatcacggtttcaccgtcactttcatcatccccggcgattctcctccgtctaaggctcaaagatccgttctcaactctctcccttcctccatagcctccgtcttcctccctcccgccgatctttccgacgttccttcgacagctcgaatcgaaactcggatatcgctcaccgtgactcgttccaacccggcgctccgggagctttttggctcgttatcggcggagaaacgtctcccggcggttctcgtcgtcgatctatttggtacggatgcgttcgacgtggctgctgagttccacgtgtcgccatacattttctatgcatcaaatgccaacgtcctcacgtttctgcttcacttgccgaagctagacgaaacggtgtcgtgtgagtttagggaattaaccgaaccggttattattcccggttgtgtccccataaccggtaaggatttcgtcgatccgtgtcaagaccgaaaagatgaatcatacaaatggcttctacacaacgtcaagagattcaaagaagctgaagggattctagtgaattccttcgtcgatttagagccaaacactataaagattgtacaagaaccggctcctgataaaccaccggtttacctgattgggccgttggttaactcgggttcacacgatgctgacgtgaacgatgagtacaaatgtttaaattggctagacaaccaaccattcgggtcggttctatacgtatcctttggaagcggcggaacactcacgtttgagcagttcattgagctggctcttggcctagcggagagtggaaaacggtttctttgggtcatacgaagtccgagtgggatagctagttcatcgtatttcaatccacaaagccgaaatgatccattttcgtttttaccacaaggcttcttagaccgaaccaaagaaaaaggtctagtggttgggtcatgggctccacaggctcaaattctgactcatacatctataggtggatttttaactcattgtggatggaattcgagtctagaaagtattgtaaacggtgtaccgctcatagcatggccgttatacgcggagcaaaagatgaacgcattgctactcgtggatgttggtgcggctctaagagcacgactgggtgaagacggggtcgtaggaagggaagaagtggcgagagtggtaaaaggattgatagaaggagaagaagggaatgcggtaaggaaaaaaatgaaagagttgaaagaaggatctgttagagtcttaagggacgatggattctctaccaaatcgcttaatgaagtttcgttgaagtggaaagcccaccaacgaaagatcgaccaagaacaggaatcatttctatga

SEQ ID NO: 80152 - protein, 481 aa, Arabidopsis thaliana
  peptide (1)..(481): Ceres Seq. ID no. 12654624
  misc_feature (7)..(471): Pfam Name: UDP-glucoronosyl and UDP-glucosyl transferase Pfam Description: UDP-glucoronosyl and UDP-glucosyl transferase
  misc_feature (1)..(481): Homolog of NCBI NO: 15223396 NR Description: flavonol 3-o-glucosyltransferase, putative; id: At1g01420.1 [Arabidopsis thaliana] >gi|25286824|pir||G86144
  misc_feature (1)..(476): Homolog of NCBI NO: 15223392 NR Description: flavonol 3-o-glucosyltransferase, putative; id: At1g01390.1, supported by cDNA: gi_17065183 [Arabidopsis
  misc_feature (12)..(476): Homolog of NCBI NO: 25286808 NR Description: protein probable UTP-glucose glucosyltransferase
  misc_feature (1)..(475): Homolog of NCBI NO: 15234056 NR Description: putative flavonol glucosyltransferase; protein At4g01070.1, supported by cDNA: 1204., supported by cDNA: [Arabidopsis thaliana] >gi|28380085|sp|Q9M156|HQGT_ARATH Probable
  misc_feature (164)..(475): Homolog of NCBI NO: 7433902 NR Description: UTP-glucose glucosyltransferase homolog
  misc_feature (1)..(152): Homolog of NCBI NO: 7433902 NR Description: UTP-glucose glucosyltransferase homolog
  misc_feature (5)..(467): Homolog of NCBI NO: 28380078 NR Description: Hydroquinone glucosyltransferase (Arbutin >gi|13508844|emb|CAC35167.1| arbutin synthase [Rauvolfia
  misc_feature (8)..(468): Homolog of NCBI NO: 19911209 NR Description: glucosyltransferase-13 [Vigna angularis]
  misc_feature (8)..(467): Homolog of NCBI NO: 34912764 NR Description: putative UTP-glucose glucosyltransferase [Oryza
  misc_feature (6)..(467): Homolog of NCBI NO: 34912752 NR Description: putative UTP-glucose glucosyltransferase [Oryza
MADGNTPHVAIIPSPGIGHLIPLVELAKRLLDNHGFTVTFIIPGDSPPSKAQRSVLNSLPSSIASVFLPPADLSDVPSTARIETRISLTVTRSNPALRELFGSLSAEKRLPAVLVVDLFGTDAFDVAAEFHVSPYIFYASNANVLTFLLHLPKLDETVSCEFRELTEPVIIPGCVPITGKDFVDPCQDRKDESYKWLLHNVKRFKEAEGILVNSFVDLEPNTIKIVQEPAPDKPPVYLIGPLVNSGSHDADVNDEYKCLNWLDNQPFGSVLYVSFGSGGTLTFEQFIELALGLAESGKRFLWVIRSPSGIASSSYFNPQSRNDPFSFLPQGFLDRTKEKGLVVGSWAPQAQILTHTSIGGFLTHCGWNSSLESIVNGVPLIAWPLYAEQKMNALLLVDVGAALRARLGEDGVVGREEVARVVKGLIEGEEGNAVRKKMKELKEGSVRVLRDDGFSTKSLNEVSLKWKAHQRKIDQEQESFL

SEQ ID NO: 80153 - DNA, 1329 bp, Arabidopsis thaliana
  misc_feature (1)..(1329): Ceres Seq. ID no. 12654625
  misc_feature: MA Experiment ID: 20000307 Result: Up-regulated in Transcription
  misc_feature: MA Experiment 20000307 PARAMETER Experiment Name: At_Germinating_Seeds_Sub_P Parameter: Age (hr) Value: 24 vs. 0
  misc_feature: MA Experiment 20000307 PARAMETER Experiment Name: At_Germinating_Seeds_Sub_P Parameter: Organism Value: A. thaliana
  misc_feature: MA Experiment 20000307 PARAMETER Experiment Name: At_Germinating_Seeds_Sub_P Parameter: Plant Line Value: WS
  misc_feature: MA Experiment 20000307 PARAMETER Experiment Name: At_Germinating_Seeds_Sub_P Parameter: Tissue Value: Germinating Seeds
  misc_feature: MA Experiment ID: 20000314 Result: Down-regulated in Transcription
  misc_feature: MA Experiment 20000314 PARAMETER Experiment Name: At_14day_Shoots-Roots_Sub_P Parameter: Age (day) Value: 14
  misc_feature: MA Experiment 20000314 PARAMETER Experiment Name: At_14day_Shoots-Roots_Sub_P Parameter: Organism Value: A. thaliana
  misc_feature: MA Experiment 20000314 PARAMETER Experiment Name: At_14day_Shoots-Roots_Sub_P Parameter: Plant Line Value: WS
  misc_feature: MA Experiment 20000314 PARAMETER Experiment Name: At_14day_Shoots-Roots_Sub_P Parameter: Tissue Value: Roots vs. Whole Plant
  misc_feature: MA Experiment ID: 20000315 Result: Up-regulated in Transcription
  misc_feature: MA Experiment 20000315 PARAMETER Experiment Name: At_14day_Shoots-Roots_Sub_P Parameter: Age (day) Value: 14
  misc_feature: MA Experiment 20000315 PARAMETER Experiment Name: At_14day_Shoots-Roots_Sub_P Parameter: Organism Value: A. thaliana
  misc_feature: MA Experiment 20000315 PARAMETER Experiment Name: At_14day_Shoots-Roots_Sub_P Parameter: Plant Line Value: WS
  misc_feature: MA Experiment 20000315 PARAMETER Experiment Name: At_14day_Shoots-Roots_Sub_P Parameter: Tissue Value: Shoots vs. Whole Plant
  misc_feature: MA Experiment ID: 20000327 Result: Down-regulated in Transcription
  misc_feature: MA Experiment 20000327 PARAMETER Experiment Name: At_42deg_Heat_Sub_P Parameter: Age (day) Value: 14
  misc_feature: MA Experiment 20000327 PARAMETER Experiment Name: At_42deg_Heat_Sub_P Parameter: Organism Value: A. thaliana
  misc_feature: MA Experiment 20000327 PARAMETER Experiment Name: At_42deg_Heat_Sub_P Parameter: Plant Line Value: WS
  misc_feature: MA Experiment 20000327 PARAMETER Experiment Name: At_42deg_Heat_Sub_P Parameter: Temperature (deg C) Value: 42 vs. 22
  misc_feature: MA Experiment 20000327 PARAMETER Experiment Name: At_42deg_Heat_Sub_P Parameter: Timepoint (hr) Value: 1
  misc_feature: MA Experiment 20000327 PARAMETER Experiment Name: At_42deg_Heat_Sub_P Parameter: Tissue Value: Aerial
  misc_feature: MA Experiment ID: 20000328 Result: Down-regulated in Transcription
  misc_feature: MA Experiment 20000328 PARAMETER Experiment Name: At_42deg_Heat_Sub_P Parameter: Age (day) Value: 14
  misc_feature: MA Experiment 20000328 PARAMETER Experiment Name: At_42deg_Heat_Sub_P Parameter: Organism Value: A. thaliana
  misc_feature: MA Experiment 20000328 PARAMETER Experiment Name: At_42deg_Heat_Sub_P Parameter: Plant Line Value: WS
  misc_feature: MA Experiment 20000328 PARAMETER Experiment Name: At_42deg_Heat_Sub_P Parameter: Temperature (deg C) Value: 42 vs. 22
  misc_feature: MA Experiment 20000328 PARAMETER Experiment Name: At_42deg_Heat_Sub_P Parameter: Timepoint (hr) Value: 6
  misc_feature: MA Experiment 20000328 PARAMETER Experiment Name: At_42deg_Heat_Sub_P Parameter: Tissue Value: Aerial
  misc_feature: MA Experiment ID: 20000332 Result: Down-regulated in Transcription
  misc_feature: MA Experiment 20000332 PARAMETER Experiment Name: At_4deg_Cold_Sub_P Parameter: Age (day) Value: 14
  misc_feature: MA Experiment 20000332 PARAMETER Experiment Name: At_4deg_Cold_Sub_P Parameter: Organism Value: A. thaliana
  misc_feature: MA Experiment 20000332 PARAMETER Experiment Name: At_4deg_Cold_Sub_P Parameter: Plant Line Value: WS
  misc_feature: MA Experiment 20000332 PARAMETER Experiment Name: At_4deg_Cold_Sub_P Parameter: Temperature (deg C) Value: 4 vs. 22
  misc_feature: MA Experiment 20000332 PARAMETER Experiment Name: At_4deg_Cold_Sub_P Parameter: Timepoint (hr) Value: 2
  misc_feature: MA Experiment 20000332 PARAMETER Experiment Name: At_4deg_Cold_Sub_P Parameter: Tissue Value: Aerial
  misc_feature: MA Experiment ID: 20000347 Result: Down-regulated in Transcription
  misc_feature: MA Experiment 20000347 PARAMETER Experiment Name: At_2mM_SA_Sub_P Parameter: Age (day) Value: 14
  misc_feature: MA Experiment 20000347 PARAMETER Experiment Name: At_2mM_SA_Sub_P Parameter: Organism Value: A. thaliana
  misc_feature: MA Experiment 20000347 PARAMETER Experiment Name: At_2mM_SA_Sub_P Parameter: Plant Line Value: WS
  misc_feature: MA Experiment 20000347 PARAMETER Experiment Name: At_2mM_SA_Sub_P Parameter: Timepoint (hr) Value: 6
  misc_feature: MA Experiment 20000347 PARAMETER Experiment Name: At_2mM_SA_Sub_P Parameter: Tissue Value: Aerial
  misc_feature: MA Experiment 20000347 PARAMETER Experiment Name: At_2mM_SA_Sub_P Parameter: Treatment Value: 2mM SA vs. No Treatment
atggattcattgagattaatatctaagagcatcaagattgaaggaaccccatttggttcctctcaccaacgcaatcaaattttcctcaaatccgtcgctttcttccttttgatcggtctcgcttaccgttttctcatcactaattccaccgtctctccggttcccaccgttcgatcctcgccggaatctctcccgccggatccttcaggtctcactgccatcactcaaacttcagcctctgtcgattccccagcaaacatcacaaccattgcttcacagaatgacccatcagggccaatctacaccaatgtctcttgccgtcatatccaagattaccaaaattgcttgaaaaacggaaggccagatgtgaattaccttcgatggagatggcaacctcgcgattgcgatctcccgaggtttaaccctgagcaattccttgacaatatgaggaacaaatggttggcttttatcggtgattccatctctcgtaaccatgtccaatccctcctctgcattctctctcaggtagaagaagtagaagatatcttccatgacaaggaatacaaatcaaggatctggagattcccttcttacaacttcacactctctgtcatttggtctcctttccttgtaaaagctgaaacctttgagaacggagttcctttctcagacattcgagtacacctcgacaagctagaccagaaatggactgatcagtacatcaatttcgactacgttgtcatctccggtggaaaatggttcctcaaaacaacaatcttccatgaaaacaacaccgtaaccggatgccattactgccaagggaagaacaatatgaccgaactcggttatctatactcgtaccgaaaggttcttcatttggttttagactttgtcgctgaaccgaaccataaagctcaggttctcttcagaacaacaacacctgatcatttcgagaatggagagtgggactctggtggtttctgtaaccgaacaatgccgtttacggaaggcagcgaaggagagatgaagagcgaggatgtatcgatgcgtgatatcgagcttgaagagttctataagactactactacacaacaagaaggttccaattcaaacattgtattacttgacacaacttcaatgtcgcttctccgaccagatggacatccgggaccgtaccggtatccaaatcctttcgctgggctgaagaacaaggagctgaatcaggttcagaacgattgtcttcattggtgcttacccggtccgattgattcatggaatgatctaatggtcgaggtgatgcttaaccgggaacggcaaagacgagaatag

SEQ ID NO: 80154 - protein, 442 aa, Arabidopsis thaliana
  peptide (1)..(442): Ceres Seq. ID no. 12654626
  misc_feature (254)..(433): Pfam Name: Arabidopsis proteins of unknown function Pfam Description: Arabidopsis proteins of unknown function
  misc_feature (1)..(442): Homolog of NCBI NO: 25518737 NR Description: hypothetical protein F6F3.23 [imported] - thaliana >gi|9665154|gb|AAF97338.1|AC023628_19 Unknown protein
  misc_feature (1)..(442): Homolog of NCBI NO: 30678135 NR Description: expressed protein [Arabidopsis thaliana] unknown protein [Arabidopsis thaliana]
  misc_feature (8)..(439): Homolog of NCBI NO: 15234058 NR Description: hypothetical protein; protein id: At4g01080.1
  misc_feature (8)..(439): Homolog of NCBI NO: 28393189 NR Description: unknown protein [Arabidopsis thaliana]
  misc_feature (20)..(435): Homolog of NCBI NO: 15237044 NR Description: putative protein; protein id: At4g11090.1
  misc_feature (20)..(435): Homolog of NCBI NO: 30686312 NR Description: expressed protein [Arabidopsis thaliana]
  misc_feature (22)..(435): Homolog of NCBI NO: 7486743 NR Description: hypothetical protein F9D16.260 - Arabidopsis >gi|4454048|emb|CAA23045.1| putative protein [Arabidopsis >gi|7269228|emb|CAB81297.1| putative protein [Arabidopsis
  misc_feature (99)..(433): Homolog of NCBI NO: 15237211 NR Description: putative protein; protein id: At5g15890.1
  misc_feature (95)..(433): Homolog of NCBI NO: 15223079 NR Description: unknown protein; protein id: At1g70230.1, by cDNA: gi_19310588 [Arabidopsis thaliana]
  misc_feature (95)..(434): Homolog of NCBI NO: 34911880 NR Description: OSJNBb0032K15.17 [Oryza sativa (japonica
MDSLRLISKSIKIEGTPFGSSHQRNQIFLKSVAFFLLIGLAYRFLITNSTVSPVPTVRSSPESLPPDPSGLTAITQTSASVDSPANITTIASQNDPSGPIYTNVSCRHIQDYQNCLKNGRPDVNYLRWRWQPRDCDLPRFNPEQFLDNMRNKWLAFIGDSISRNHVQSLLCILSQVEEVEDIFHDKEYKSRIWRFPSYNFTLSVIWSPFLVKAETFENGVPFSDIRVHLDKLDQKWTDQYINFDYVVISGGKWFLKTTIFHENNTVTGCHYCQGKNNMTELGYLYSYRKVLHLVLDFVAEPNHKAQVLFRTTTPDHFENGEWDSGGFCNRTMPFTEGSEGEMKSEDVSMRDIELEEFYKTTTTQQEGSNSNIVLLDTTSMSLLRPDGHPGPYRYPNPFAGLKNKELNQVQNDCLHWCLPGPIDSWNDLMVEVMLNRERQRRE

SEQ ID NO: 80155 - protein, 294 aa, Arabidopsis thaliana; identical to SEQ ID NO: 44234
  peptide (1)..(294): Ceres Seq. ID no. 12654627
  misc_feature (106)..(285): Pfam Name: Arabidopsis proteins of unknown function Pfam Description: Arabidopsis proteins of unknown function
  misc_feature (1)..(294): Homolog of NCBI NO: 25518737 NR Description: hypothetical protein F6F3.23 [imported] - thaliana >gi|9665154|gb|AAF97338.1|AC023628_19 Unknown protein
  misc_feature (1)..(294): Homolog of NCBI NO: 30678135 NR Description: expressed protein [Arabidopsis thaliana] unknown protein [Arabidopsis thaliana]
  misc_feature (1)..(291): Homolog of NCBI NO: 15234058 NR Description: hypothetical protein; protein id: At4g01080.1
  misc_feature (1)..(291): Homolog of NCBI NO: 28393189 NR Description: unknown protein [Arabidopsis thaliana]
  misc_feature (1)..(287): Homolog of NCBI NO: 15237044 NR Description: putative protein; protein id: At4g11090.1
  misc_feature (1)..(287): Homolog of NCBI NO: 30686312 NR Description: expressed protein [Arabidopsis thaliana]
  misc_feature (1)..(287): Homolog of NCBI NO: 7486743 NR Description: hypothetical protein F9D16.260 - Arabidopsis >gi|4454048|emb|CAA23045.1| putative protein [Arabidopsis >gi|7269228|emb|CAB81297.1| putative protein [Arabidopsis
  misc_feature (1)..(285): Homolog of NCBI NO: 15237211 NR Description: putative protein; protein id: At5g15890.1
  misc_feature (1)..(285): Homolog of NCBI NO: 15223079 NR Description: unknown protein; protein id: At1g70230.1, by cDNA: gi_19310588 [Arabidopsis thaliana]
  misc_feature (1)..(286): Homolog of NCBI NO: 34911880 NR Description: OSJNBb0032K15.17 [Oryza sativa (japonica

SEQ ID NO: 80156 - DNA, 1016 bp, Arabidopsis thaliana
  misc_feature (1)..(1016): Ceres Seq. ID no. 12654632
  misc_feature: MA Experiment ID: 20000184 Result: Down-regulated in Transcription
  misc_feature: MA Experiment 20000184 PARAMETER Experiment Name: At_Shoots__P Parameter: Age (day) Value: 7
  misc_feature: MA Experiment 20000184 PARAMETER Experiment Name: At_Shoots__P Parameter: Tissue Value: Shoots vs. Whole Plant
  misc_feature: MA Experiment ID: 20000214 Result: Down-regulated in Transcription
  misc_feature: MA Experiment 20000214 PARAMETER Experiment Name: At_4deg_Cold_P Parameter: Timepoint (hr) Value: 6
  misc_feature: MA Experiment ID: 20000234 Result: Down-regulated in Transcription
  misc_feature: MA Experiment 20000234 PARAMETER Experiment Name: At_Siliques_P Parameter: Age (day) Value: 21
  misc_feature: MA Experiment 20000234 PARAMETER Experiment Name: At_Siliques_P Parameter: Organism Value: A. thaliana
  misc_feature: MA Experiment 20000234 PARAMETER Experiment Name: At_Siliques_P Parameter: Plant Line Value: WS
  misc_feature: MA Experiment 20000234 PARAMETER Experiment Name: At_Siliques_P Parameter: Tissue Value: Less Than 5mm Siliques vs. Whole Plant
  misc_feature: MA Experiment ID: 20000265 Result: Down-regulated in Transcription
  misc_feature: MA Experiment 20000265 PARAMETER Experiment Name: At_Open_Flower_P Parameter: Age (day) Value: 21
  misc_feature: MA Experiment 20000265 PARAMETER Experiment Name: At_Open_Flower_P Parameter: Plant Line Value: WS
  misc_feature: MA Experiment 20000265 PARAMETER Experiment Name: At_Open_Flower_P Parameter: Tissue Value: Closed Flower vs. Whole Plant
  misc_feature: MA Experiment ID: 20000441 Result: Up-regulated in Transcription
  misc_feature: MA Experiment 20000441 PARAMETER Experiment Name: At_1uM_BR-BRZ__P Parameter: Tissue Value: Shoot Apices
  misc_feature: MA Experiment 20000441 PARAMETER Experiment Name: At_1uM_BR-BRZ__P Parameter: Treatment Value: 1uM BR vs. No Treatment
  misc_feature: MA Experiment ID: 20000443 Result: Up-regulated in Transcription
  misc_feature: MA Experiment 20000443 PARAMETER Experiment Name: At_1uM_BR-BRZ__P Parameter: Tissue Value: Shoot Apices
  misc_feature: MA Experiment 20000443 PARAMETER Experiment Name: At_1uM_BR-BRZ__P Parameter: Treatment Value: 1uM BRZ vs. No Treatment
ctctctctgcatgcatctttctctctattaatctctccagtatttgtcaggatttgggtatttttttaataacgatcagtgtccaatctctcttatcgtcttcataagtttcctattatttcattcttcttcttctttattctcatttctctctctctctctttttactcacagacaaatctttttcacatctctttgcaaattcttgagaattcattcaagttacataaaaagctgagagcaatgaagaaaattgtgttaaagctggatttgcatgacgatagggcaaaacaaaaggcccttaaaacggtttctactctcccaggaatcgattccattgcaatggacatgaaggagaagaaattgacggttattggaaccgtggatccggtaaatgtagtaagtaagctaagaaagtattggccgatgacggatatcgtactagtgggacctgcgaaagagccggaaaaggagaagaaggaggagccgaagaaggaaggtggtggcgagccgccaaagaaagaaggagaagctccaaaagaagaagggaaaaaggaaggagaagcaccgaagaaggaagaagagaagaaagaaggtggcgataagaaggaaggagagaagaaagatcaaccacaagcgcagccgcaaccagttgtgccgccacctgatcatgtgttggaacttgtaaaggcgtataaagcatataatcctcacctaacaacgtattactacgcccaaagcatcgaagaaaaccctaatgcttgcgttatatgttgaaatatttataatgtgatatattttggggaaaagatggaccgatctatatatagtcatgaggatgaagaataagaaacaaaggatatatcttagacttcggatgggatcggatatgtttttgtctcctcgataatgcggggaagttttatttccttaaatcgatttcgatgatatgttttgtgtatatatcgtcgatagtactagaattttattttttcactttgaaggtaactttctgt

SEQ ID NO: 80157 - protein, 177 aa, Arabidopsis thaliana
  peptide (1)..(177): Ceres Seq. ID no. 12654633
  misc_feature (4)..(72): Pfam Name: Heavy-metal-associated domain Pfam Description: Heavy-metal-associated domain
  misc_feature (1)..(177): Homolog of NCBI NO: 15223416 NR Description: expressed protein; protein id: At1g01490.1, by cDNA: gi_17380661 [Arabidopsis thaliana] hypothetical protein [Arabidopsis thaliana]
MKKIVLKLDLHDDRAKQKALKTVSTLPGIDSIAMDMKEKKLTVIGTVDPVNVVSKLRKYWPMTDIVLVGPAKEPEKEKKEEPKKEGGGEPPKKEGEAPKEEGKKEGEAPKKEEEKKEGGDKKEGEKKDQPQAQPQPVVPPPDHVLELVKAYKAYNPHLTTYYYAQSIEENPNACVIC

SEQ ID NO: 80158 - protein, 144 aa, Arabidopsis thaliana
  peptide (1)..(144): Ceres Seq. ID no. 12654634
  misc_feature (1)..(144): Homolog of NCBI NO: 15223416 NR Description: expressed protein; protein id: At1g01490.1, by cDNA: gi_17380661 [Arabidopsis thaliana] hypothetical protein [Arabidopsis thaliana]
MDMKEKKLTVIGTVDPVNVVSKLRKYWPMTDIVLVGPAKEPEKEKKEEPKKEGGGEPPKKEGEAPKEEGKKEGEAPKKEEEKKEGGDKKEGEKKDQPQAQPQPVVPPPDHVLELVKAYKAYNPHLTTYYYAQSIEENPNACVIC

SEQ ID NO: 80159 - protein, 142 aa, Arabidopsis thaliana
  peptide (1)..(142): Ceres Seq. ID no. 12654635
  misc_feature (1)..(142): Homolog of NCBI NO: 15223416 NR Description: expressed protein; protein id: At1g01490.1, by cDNA: gi_17380661 [Arabidopsis thaliana] hypothetical protein [Arabidopsis thaliana]
MKEKKLTVIGTVDPVNVVSKLRKYWPMTDIVLVGPAKEPEKEKKEEPKKEGGGEPPKKEGEAPKEEGKKEGEAPKKEEEKKEGGDKKEGEKKDQPQAQPQPVVPPPDHVLELVKAYKAYNPHLTTYYYAQSIEENPNACVIC

SEQ ID NO: 80160 - DNA, 1110 bp, Arabidopsis thaliana
  misc_feature (1)..(1110): Ceres Seq. ID no. 12654640
  misc_feature: MA Experiment ID: 20000182 Result: Up-regulated in Transcription
  misc_feature: MA Experiment 20000182 PARAMETER Experiment Name: At_2mM_SA_P Parameter: Age (day) Value: 14
  misc_feature: MA Experiment 20000182 PARAMETER Experiment Name: At_2mM_SA_P Parameter: Organism Value: A. thaliana
  misc_feature: MA Experiment 20000182 PARAMETER Experiment Name: At_2mM_SA_P Parameter: Plant Line Value: WS
  misc_feature: MA Experiment 20000182 PARAMETER Experiment Name: At_2mM_SA_P Parameter: Timepoint (hr) Value: 6
  misc_feature: MA Experiment 20000182 PARAMETER Experiment Name: At_2mM_SA_P Parameter: Tissue Value: Aerial
  misc_feature: MA Experiment 20000182 PARAMETER Experiment Name: At_2mM_SA_P Parameter: Treatment Value: 2mM SA vs. No Treatment
  misc_feature: MA Experiment ID: 20000227 Result: Down-regulated in Transcription
  misc_feature: MA Experiment 20000227 PARAMETER Experiment Name: At_Root-Tips-vs-Tops_P Parameter: Tissue Value: Root Tips vs. Root Tops
  misc_feature: MA Experiment ID: 20000234 Result: Down-regulated in Transcription
  misc_feature: MA Experiment 20000234 PARAMETER Experiment Name: At_Siliques_P Parameter: Age (day) Value: 21
  misc_feature: MA Experiment 20000234 PARAMETER Experiment Name: At_Siliques_P Parameter: Organism Value: A. thaliana
  misc_feature: MA Experiment 20000234 PARAMETER Experiment Name: At_Siliques_P Parameter: Plant Line Value: WS
  misc_feature: MA Experiment 20000234 PARAMETER Experiment Name: At_Siliques_P Parameter: Tissue Value: Less Than 5mm Siliques vs. Whole Plant
  misc_feature: MA Experiment ID: 20000235 Result: Down-regulated in Transcription
  misc_feature: MA Experiment 20000235 PARAMETER Experiment Name: At_Siliques_P Parameter: Age (day) Value: 21
  misc_feature: MA Experiment 20000235 PARAMETER Experiment Name: At_Siliques_P Parameter: Organism Value: A. thaliana
  misc_feature: MA Experiment 20000235 PARAMETER Experiment Name: At_Siliques_P Parameter: Plant Line Value: WS
  misc_feature: MA Experiment 20000235 PARAMETER Experiment Name: At_Siliques_P Parameter: Tissue Value: 5-10mm Siliques vs. Whole Plant
  misc_feature: MA Experiment ID: 20000264 Result: Down-regulated in Transcription
  misc_feature: MA Experiment 20000264 PARAMETER Experiment Name: At_Open_Flower_P Parameter: Age (day) Value: 21
  misc_feature: MA Experiment 20000264 PARAMETER Experiment Name: At_Open_Flower_P Parameter: Plant Line Value: WS
  misc_feature: MA Experiment 20000264 PARAMETER Experiment Name: At_Open_Flower_P Parameter: Tissue Value: Open Flower vs. Whole Plant
  misc_feature: MA Experiment ID: 20000265 Result: Down-regulated in Transcription
  misc_feature: MA Experiment 20000265 PARAMETER Experiment Name: At_Open_Flower_P Parameter: Age (day) Value: 21
  misc_feature: MA Experiment 20000265 PARAMETER Experiment Name: At_Open_Flower_P Parameter: Plant Line Value: WS
  misc_feature: MA Experiment 20000265 PARAMETER Experiment Name: At_Open_Flower_P Parameter: Tissue Value: Closed Flower vs. Whole Plant
  misc_feature: MA Experiment ID: 20000286 Result: Down-regulated in Transcription
  misc_feature: MA Experiment 20000286 PARAMETER Experiment Name: At_Open_Flower_P Parameter: Age (day) Value: 21
  misc_feature: MA Experiment 20000286 PARAMETER Experiment Name: At_Open_Flower_P Parameter: Plant Line Value: WS
  misc_feature: MA Experiment 20000286 PARAMETER Experiment Name: At_Open_Flower_P Parameter: Tissue Value: Half Open vs. Whole Plant
  misc_feature: MA Experiment ID: 20000438 Result: Down-regulated in Transcription
  misc_feature: MA Experiment 20000438 PARAMETER Experiment Name: At_Shoots__P Parameter: Age (day) Value: 14
  misc_feature: MA Experiment 20000438 PARAMETER Experiment Name: At_Shoots__P Parameter: Tissue Value: Shoots vs. Whole Plant
  misc_feature: MA Experiment ID: 20000439 Result: Down-regulated in Transcription
  misc_feature: MA Experiment 20000439 PARAMETER Experiment Name: At_Roots__P Parameter: Age (day) Value: 14 vs. 21
  misc_feature: MA Experiment 20000439 PARAMETER Experiment Name: At_Roots__P Parameter: Organism Value: A. thaliana
  misc_feature: MA Experiment 20000439 PARAMETER Experiment Name: At_Roots__P Parameter: Tissue Value: Roots vs. Whole Plant
  misc_feature: MA Experiment ID: 20000453 Result: Up-regulated in Transcription
  misc_feature: MA Experiment 20000453 PARAMETER Experiment Name: At_100uM_ABA_P Parameter: Age (day) Value: 15
  misc_feature: MA Experiment 20000453 PARAMETER Experiment Name: At_100uM_ABA_P Parameter: Organism Value: A. thaliana
  misc_feature: MA Experiment 20000453 PARAMETER Experiment Name: At_100uM_ABA_P Parameter: Plant Line Value: WS
  misc_feature: MA Experiment 20000453 PARAMETER Experiment Name: At_100uM_ABA_P Parameter: Timepoint (hr) Value: 24
  misc_feature: MA Experiment 20000453 PARAMETER Experiment Name: At_100uM_ABA_P Parameter: Tissue Value: Aerial
  misc_feature: MA Experiment 20000453 PARAMETER Experiment Name: At_100uM_ABA_P Parameter: Treatment Value: 100uM ABA vs. No Treatment
  misc_feature: MA Experiment ID: 20000495 Result: Down-regulated in Transcription
  misc_feature: MA Experiment 20000495 PARAMETER Experiment Name: At_Guard_Cells_P Parameter: Harvest Date Value: 8/2/2002
  misc_feature: MA Experiment 20000495 PARAMETER Experiment Name: At_Guard_Cells_P Parameter: Organism Value: A. thaliana
  misc_feature: MA Experiment 20000495 PARAMETER Experiment Name: At_Guard_Cells_P Parameter: Tissue Value: Guard Cells vs. Leaves
  misc_feature: MA Experiment ID: 20000794 Result: Down-regulated in Transcription
  misc_feature: MA Experiment 20000794 PARAMETER Experiment Name: At_Petals_P Parameter: Age (day) Value: 23-25 days
  misc_feature: MA Experiment 20000794 PARAMETER Experiment Name: At_Petals_P Parameter: Plant Line Value: WS
  misc_feature: MA Experiment 20000794 PARAMETER Experiment Name: At_Petals_P Parameter: Tissue Value: Petals vs. Whole plant
  misc_feature: MA Experiment ID: 20001451 Result: Up-regulated in Transcription
  misc_feature: MA Experiment 20001451 PARAMETER Experiment Name: At_Far-red-induction_P Parameter: Age (day) Value: 7
  misc_feature: MA Experiment 20001451 PARAMETER Experiment Name: At_Far-red-induction_P Parameter: Light Value: Far-red vs. White
  misc_feature: MA Experiment 20001451 PARAMETER Experiment Name: At_Far-red-induction_P Parameter: Organism Value: A. thaliana
  misc_feature: MA Experiment 20001451 PARAMETER Experiment Name: At_Far-red-induction_P Parameter: Plant Line Value: Columbia
  misc_feature: MA Experiment 20001451 PARAMETER Experiment Name: At_Far-red-induction_P Parameter: Timepoint (hr) Value: 24
  misc_feature: MA Experiment 20001451 PARAMETER Experiment Name: At_Far-red-induction_P Parameter: Tissue Value: Whole Plant
  misc_feature: MA Experiment ID: 20001905 Result: Up-regulated in Transcription
  misc_feature: MA Experiment 20001905 PARAMETER Experiment Name: At_Drought_Reproduction_P Parameter: Age (day) Value: 40
  misc_feature: MA Experiment 20001905 PARAMETER Experiment Name: At_Drought_Reproduction_P Parameter: Organism Value: A. thaliana
  misc_feature: MA Experiment 20001905 PARAMETER Experiment Name: At_Drought_Reproduction_P Parameter: Plant Line Value: WS
  misc_feature: MA Experiment 20001905 PARAMETER Experiment Name: At_Drought_Reproduction_P Parameter: Timepoint (day) Value: 10
  misc_feature: MA Experiment 20001905 PARAMETER Experiment Name: At_Drought_Reproduction_P Parameter: Tissue Value: Rosettes
  misc_feature: MA Experiment 20001905 PARAMETER Experiment Name: At_Drought_Reproduction_P Parameter: Treatment Value: Drought vs. No Drought
atgtcaatagagaaaccattcttcggtgatgacagcaacagaggagtaagtatcaatggtggtcgttatgtgcagtataatgtctatggaaatctctttgaagtttctaaaaagtatgttcctcctcttcgtcctatcggcagaggcgcttctggcatcgtctgtgctgcatggaattcggagacgggtgaggaagtagcgatcaagaagattggtaatgcatttggcaacattatcgacgctaagagaactttgagagagattaagcttcttaagcatatggatcatgacaatgtcattgccattatagacataataagaccacctcagccagacaacttcaatgatgttcacattgtctatgagttaatggacactgatcttcaccacattatccgctctaaccaaccgttaactgatgatcattcacggttcttcctgtatcagttgttgcgaggcctcaagtatgtgcattcagccaatgtactgcatcgtgatttaaaaccgagtaacttgctcctgaatgcaaactgtgacctcaagattggggattttgggcttgcgaggactaaatcagagacagacttcatgacagaatatgttgttacacgttggtaccgagctccagagttgctccttaattgctcagaatacactgcagctatcgacatttggtctgtcggttgtatactcggtgaaataatgacgcgggagccgttatttccgggcagagattatgttcagcagcttagactcatcactgagcttataggctcaccagatgattcaagcctaggattcttaagaagcgacaacgctagaagatacgtaagacagcttccacagtatccaagacaaaactttgccgctagattcccaaacatgtcggtcaatgctgttgatttgctgcagaaaatgctcgtctttgacccaaacagacgcattacagtcgatgaagccttgtgccacccttacttagcaccgctacacgaatataacgaggaacctgtgtgtgtgagaccgttccattttgatttcgagcaaccttcattgacggaagagaacatcaaggagcttatatatcgtgaatcagtcaagtttaacccttaa

SEQ ID NO: 80161 - protein, 369 aa, Arabidopsis thaliana
  peptide (1)..(369): Ceres Seq. ID no. 12654641
  misc_feature (40)..(326): Pfam Name: Protein kinase domain Pfam Description: Protein kinase domain
  misc_feature (1)..(369): Homolog of NCBI NO: 18378855 NR Description: MAP kinase, putative; protein id: At1g01560.1
  misc_feature (1)..(369): Homolog of NCBI NO: 15234152 NR Description: MAP kinase 4 (MPK4); protein id: At4g01370.1, by cDNA: 7653., supported by cDNA: gi_13430637, supported by gi_14532813, supported by cDNA: gi_457399 [Arabidopsis thaliana]
  misc_feature (1)..(369): Homolog of NCBI NO: 2129645 NR Description: mitogen-activated protein kinase 4 (EC 2.7.1.-) - thaliana >gi|457400|dbj|BAA04867.1| MAP kinase [Arabidopsis
  misc_feature (14)..(369): Homolog of NCBI NO: 25052804 NR Description: mitogen-activated protein kinase 4 [Petroselinum
  misc_feature (1)..(369): Homolog of NCBI NO: 2129855 NR Description: mitogen-activated protein kinase MMK2 (EC
  misc_feature (1)..(369): Homolog of NCBI NO: 2499613 NR Description: MITOGEN-ACTIVATED PROTEIN KINASE HOMOLOG MMK2
  misc_feature (19)..(369): Homolog of NCBI NO: 27312014 NR Description: mitogen-activated protein kinase [Malus
  misc_feature (56)..(369): Homolog of NCBI NO: 2191146 NR Description: MAP Kinase [Arabidopsis thaliana]
  misc_feature (1)..(37): Homolog of NCBI NO: 2191146 NR Description: MAP Kinase [Arabidopsis thaliana]
  misc_feature (9)..(369): Homolog of NCBI NO: 21165527 NR Description: mitogen-activated protein kinase [Solanum
MSIEKPFFGDDSNRGVSINGGRYVQYNVYGNLFEVSKKYVPPLRPIGRGASGIVCAAWNSETGEEVAIKKIGNAFGNIIDAKRTLREIKLLKHMDHDNVIAIIDIIRPPQPDNFNDVHIVYELMDTDLHHIIRSNQPLTDDHSRFFLYQLLRGLKYVHSANVLHRDLKPSNLLLNANCDLKIGDFGLARTKSETDFMTEYVVTRWYRAPELLLNCSEYTAAIDIWSVGCILGEIMTREPLFPGRDYVQQLRLITELIGSPDDSSLGFLRSDNARRYVRQLPQYPRQNFAARFPNMSVNAVDLLQKMLVFDPNRRITVDEALCHPYLAPLHEYNEEPVCVRPFHFDFEQPSLTEENIKELIYRESVKFNP

SEQ ID NO: 80162 - protein, 276 aa, Arabidopsis thaliana
  peptide (1)..(276): Ceres Seq. ID no. 12654642
  misc_feature (1)..(233): Pfam Name: Protein kinase domain Pfam Description: Protein kinase domain
  misc_feature (1)..(276): Homolog of NCBI NO: 18378855 NR Description: MAP kinase, putative; protein id: At1g01560.1
  misc_feature (1)..(276): Homolog of NCBI NO: 15234152 NR Description: MAP kinase 4 (MPK4); protein id: At4g01370.1, by cDNA: 7653., supported by cDNA: gi_13430637, supported by gi_14532813, supported by cDNA: gi_457399 [Arabidopsis thaliana]
  misc_feature (1)..(276): Homolog of NCBI NO: 2129645 NR Description: mitogen-activated protein kinase 4 (EC 2.7.1.-) - thaliana >gi|457400|dbj|BAA04867.1| MAP kinase [Arabidopsis
  misc_feature (1)..(276): Homolog of NCBI NO: 25052804 NR Description: mitogen-activated protein kinase 4 [Petroselinum
  misc_feature (1)..(276): Homolog of NCBI NO: 2129855 NR Description: mitogen-activated protein kinase MMK2 (EC
  misc_feature (1)..(276): Homolog of NCBI NO: 2499613 NR Description: MITOGEN-ACTIVATED PROTEIN KINASE HOMOLOG MMK2
  misc_feature (1)..(276): Homolog of NCBI NO: 27312014 NR Description: mitogen-activated protein kinase [Malus
  misc_feature (1)..(276): Homolog of NCBI NO: 2191146 NR Description: MAP Kinase [Arabidopsis thaliana]
  misc_feature (1)..(276): Homolog of NCBI NO: 21165527 NR Description: mitogen-activated protein kinase [Solanum
  misc_feature (1)..(276): Homolog of NCBI NO: 25387109 NR Description: probable mitogen-activated protein kinase
MDHDNVIAIIDIIRPPQPDNFNDVHIVYELMDTDLHHIIRSNQPLTDDHSRFFLYQLLRGLKYVHSANVLHRDLKPSNLLLNANCDLKIGDFGLARTKSETDFMTEYVVTRWYRAPELLLNCSEYTAAIDIWSVGCILGEIMTREPLFPGRDYVQQLRLITELIGSPDDSSLGFLRSDNARRYVRQLPQYPRQNFAARFPNMSVNAVDLLQKMLVFDPNRRITVDEALCHPYLAPLHEYNEEPVCVRPFHFDFEQPSLTEENIKELIYRESVKFNP

SEQ ID NO: 80163 - protein, 246 aa, Arabidopsis thaliana
  peptide (1)..(246): Ceres Seq. ID no. 12654643
  misc_feature (1)..(203): Pfam Name: Protein kinase domain Pfam Description: Protein kinase domain
  misc_feature (1)..(246): Homolog of NCBI NO: 18378855 NR Description: MAP kinase, putative; protein id: At1g01560.1
  misc_feature (1)..(246): Homolog of NCBI NO: 15234152 NR Description: MAP kinase 4 (MPK4); protein id: At4g01370.1, by cDNA: 7653., supported by cDNA: gi_13430637, supported by gi_14532813, supported by cDNA: gi_457399 [Arabidopsis thaliana]
  misc_feature (1)..(246): Homolog of NCBI NO: 2129645 NR Description: mitogen-activated protein kinase 4 (EC 2.7.1.-) - thaliana >gi|457400|dbj|BAA04867.1| MAP kinase [Arabidopsis
  misc_feature (1)..(246): Homolog of NCBI NO: 25052804 NR Description: mitogen-activated protein kinase 4 [Petroselinum
  misc_feature (1)..(246): Homolog of NCBI NO: 2129855 NR Description: mitogen-activated protein kinase MMK2 (EC
  misc_feature (1)..(246): Homolog of NCBI NO: 2499613 NR Description: MITOGEN-ACTIVATED PROTEIN KINASE HOMOLOG MMK2
  misc_feature (1)..(246): Homolog of NCBI NO: 27312014 NR Description: mitogen-activated protein kinase [Malus
  misc_feature (1)..(246): Homolog of NCBI NO: 2191146 NR Description: MAP Kinase [Arabidopsis thaliana]
  misc_feature (1)..(246): Homolog of NCBI NO: 21165527 NR Description: mitogen-activated protein kinase [Solanum
  misc_feature (1)..(246): Homolog of NCBI NO: 25387109 NR Description: probable mitogen-activated protein kinase
MDTDLHHIIRSNQPLTDDHSRFFLYQLLRGLKYVHSANVLHRDLKPSNLLLNANCDLKIGDFGLARTKSETDFMTEYVVTRWYRAPELLLNCSEYTAAIDIWSVGCILGEIMTREPLFPGRDYVQQLRLITELIGSPDDSSLGFLRSDNARRYVRQLPQYPRQNFAARFPNMSVNAVDLLQKMLVFDPNRRITVDEALCHPYLAPLHEYNEEPVCVRPFHFDFEQPSLTEENIKELIYRESVKFNP

SEQ ID NO: 80164 - DNA, 624 bp, Arabidopsis thaliana
  misc_feature (1)..(624): Ceres Seq. ID no. 12654652
  misc_feature: MA Experiment ID: 20000180 Result: Down-regulated in Transcription
  misc_feature: MA Experiment 20000180 PARAMETER Experiment Name: At_Germinating_Seeds_P Parameter: Age (hr) Value: 24 vs. 0
  misc_feature: MA Experiment 20000180 PARAMETER Experiment Name: At_Germinating_Seeds_P Parameter: Tissue Value: Germinating Seeds
  misc_feature: MA Experiment ID: 20000184 Result: Down-regulated in Transcription
  misc_feature: MA Experiment 20000184 PARAMETER Experiment Name: At_Shoots__P Parameter: Age (day) Value: 7
  misc_feature: MA Experiment 20000184 PARAMETER Experiment Name: At_Shoots__P Parameter: Tissue Value: Shoots vs. Whole Plant
  misc_feature: MA Experiment ID: 20000227 Result: Down-regulated in Transcription
  misc_feature: MA Experiment 20000227 PARAMETER Experiment Name: At_Root-Tips-vs-Tops_P Parameter: Tissue Value: Root Tips vs. Root Tops
  misc_feature: MA Experiment ID: 20000438 Result: Down-regulated in Transcription
  misc_feature: MA Experiment 20000438 PARAMETER Experiment Name: At_Shoots__P Parameter: Age (day) Value: 14
  misc_feature: MA Experiment 20000438 PARAMETER Experiment Name: At_Shoots__P Parameter: Tissue Value: Shoots vs. Whole Plant
  misc_feature: MA Experiment ID: 20000439 Result: Up-regulated in Transcription
  misc_feature: MA Experiment 20000439 PARAMETER Experiment Name: At_Roots__P Parameter: Age (day) Value: 14 vs. 21
  misc_feature: MA Experiment 20000439 PARAMETER Experiment Name: At_Roots__P Parameter: Organism Value: A. thaliana
  misc_feature: MA Experiment 20000439 PARAMETER Experiment Name: At_Roots__P Parameter: Tissue Value: Roots vs. Whole Plant
atgacagaagcagagcaaaaggcggctttcctcggtggtcttgttgtctcattcaaggagcaaatgcatactgatgttctcgttaaacctggtgaagaagctccacccatacctacccacaaagccgttctggcggcaagatcaaaggtcttcaggaacatgttagattctgatgaatgcaagacctcccccgaggaatcaatcactctccctgatttgtcccacgacgaactcaaatctcttctcgagttcctctacagcggtaacctaaaagctccatacaatcaataccgatccctatatctggctgcagataagtacgacatttcatatctgcaagacgtatgccgtaaccatttcatcgcatctctgagctctaggaacgtcctagacatcttagagctcgccagtataccttgtgacacaatcttgaaagacgcggctatcaatcatattgtcaaacatatggaagaagtggttgttcccatgaaatatgagacgtttgtgcagaggaacccggatctaagcgtggagatcactcgggcttatctgagagagaccaaagccaaagccaaagatcatggagctcctctaaatggtaatactcgcccacgcatctggtga

SEQ ID NO: 80165 - protein, 207 aa, Arabidopsis thaliana
  peptide (1)..(207): Ceres Seq. ID no. 12654653
  misc_feature (18)..(124): Pfam Name: BTB/POZ domain Pfam Description: BTB/POZ domain
  misc_feature (1)..(207): Homolog of NCBI NO: 15223447 NR Description: hypothetical protein; protein id: At1g01640.1
  misc_feature (1)..(207): Homolog of NCBI NO: 33589788 NR Description: At3g01790 [Arabidopsis thaliana]
  misc_feature (2)..(193): Homolog of NCBI NO: 15228868 NR Description: putative protein; protein id: At3g56230.1
  misc_feature (1)..(192): Homolog of NCBI NO: 15226686 NR Description: hypothetical protein; protein id: At2g40450.1
  misc_feature (1)..(184): Homolog of NCBI NO: 15238994 NR Description: putative protein; protein id: At5g48510.1 thaliana] >gi|8777381|dbj|BAA96971.1|
  misc_feature (43)..(187): Homolog of NCBI NO: 15224510 NR Description: hypothetical protein; protein id: At2g05330.1
  misc_feature (14)..(182): Homolog of NCBI NO: 15233388 NR Description: hypothetical protein; protein id: At4g04090.1
  misc_feature (24)..(184): Homolog of NCBI NO: 22328490 NR Description: hypothetical protein; protein id: At4g08455.1
  misc_feature (18)..(181): Homolog of NCBI NO: 27661061 NR Description: similar to speckle-type POZ protein [Homo
  misc_feature (18)..(181): Homolog of NCBI NO: 34858214 NR Description: similar to speckle-type POZ protein-like 1; POZ
MTEAEQKAAFLGGLVVSFKEQMHTDVLVKPGEEAPPIPTHKAVLAARSKVFRNMLDSDECKTSPEESITLPDLSHDELKSLLEFLYSGNLKAPYNQYRSLYLAADKYDISYLQDVCRNHFIASLSSRNVLDILELASIPCDTILKDAAINHIVKHMEEVVVPMKYETFVQRNPDLSVEITRAYLRETKAKAKDHGAPLNGNTRPRIW

SEQ ID NO: 80166 - protein, 186 aa, Arabidopsis thaliana
  peptide (1)..(186): Ceres Seq. ID no. 12654654
  misc_feature (1)..(103): Pfam Name: BTB/POZ domain Pfam Description: BTB/POZ domain
  misc_feature (1)..(186): Homolog of NCBI NO: 15223447 NR Description: hypothetical protein; protein id: At1g01640.1
  misc_feature (1)..(186): Homolog of NCBI NO: 33589788 NR Description: At3g01790 [Arabidopsis thaliana]
  misc_feature (1)..(172): Homolog of NCBI NO: 15228868 NR Description: putative protein; protein id: At3g56230.1
  misc_feature (1)..(171): Homolog of NCBI NO: 15226686 NR Description: hypothetical protein; protein id: At2g40450.1
  misc_feature (1)..(163): Homolog of NCBI NO: 15238994 NR Description: putative protein; protein id: At5g48510.1 thaliana] >gi|8777381|dbj|BAA96971.1|
  misc_feature (22)..(166): Homolog of NCBI NO: 15224510 NR Description: hypothetical protein; protein id: At2g05330.1
  misc_feature (1)..(161): Homolog of NCBI NO: 15233388 NR Description: hypothetical protein; protein id: At4g04090.1
  misc_feature (3)..(163): Homolog of NCBI NO: 22328490 NR Description: hypothetical protein; protein id: At4g08455.1
  misc_feature (1)..(160): Homolog of NCBI NO: 27661061 NR Description: similar to speckle-type POZ protein [Homo
  misc_feature (1)..(160): Homolog of NCBI NO: 34858214 NR Description: similar to speckle-type POZ protein-like 1; POZ
MHTDVLVKPGEEAPPIPTHKAVLAARSKVFRNMLDSDECKTSPEESITLPDLSHDELKSLLEFLYSGNLKAPYNQYRSLYLAADKYDISYLQDVCRNHFIASLSSRNVLDILELASIPCDTILKDAAINHIVKHMEEVVVPMKYETFVQRNPDLSVEITRAYLRETKAKAKDHGAPLNGNTRPRIW

SEQ ID NO: 80167 - protein, 154 aa, Arabidopsis thaliana
  peptide (1)..(154): Ceres Seq. ID no. 12654655
  misc_feature (1)..(71): Pfam Name: BTB/POZ domain Pfam Description: BTB/POZ domain
  misc_feature (1)..(154): Homolog of NCBI NO: 15223447 NR Description: hypothetical protein; protein id: At1g01640.1
  misc_feature (1)..(154): Homolog of NCBI NO: 33589788 NR Description: At3g01790 [Arabidopsis thaliana]
  misc_feature (1)..(140): Homolog of NCBI NO: 15228868 NR Description: putative protein; protein id: At3g56230.1
  misc_feature (1)..(139): Homolog of NCBI NO: 15226686 NR Description: hypothetical protein; protein id: At2g40450.1
  misc_feature (1)..(131): Homolog of NCBI NO: 15238994 NR Description: putative protein; protein id: At5g48510.1 thaliana] >gi|8777381|dbj|BAA96971.1|
  misc_feature (1)..(134): Homolog of NCBI NO: 15224510 NR Description: hypothetical protein; protein id: At2g05330.1
  misc_feature (1)..(129): Homolog of NCBI NO: 15233388 NR Description: hypothetical protein; protein id: At4g04090.1
  misc_feature (1)..(131): Homolog of NCBI NO: 22328490 NR Description: hypothetical protein; protein id: At4g08455.1
  misc_feature (1)..(128): Homolog of NCBI NO: 27661061 NR Description: similar to speckle-type POZ protein [Homo
  misc_feature (1)..(128): Homolog of NCBI NO: 34858214 NR Description: similar to speckle-type POZ protein-like 1; POZ
MLDSDECKTSPEESITLPDLSHDELKSLLEFLYSGNLKAPYNQYRSLYLAADKYDISYLQDVCRNHFIASLSSRNVLDILELASIPCDTILKDAAINHIVKHMEEVVVPMKYETFVQRNPDLSVEITRAYLRETKAKAKDHGAPLNGNTRPRIW

SEQ ID NO: 80168 - DNA, 1452 bp, Arabidopsis thaliana
  misc_feature (1)..(1452): Ceres Seq. ID no. 12654660
  misc_feature: MA Experiment ID: 20000327 Result: Down-regulated in Transcription
  misc_feature: MA Experiment 20000327 PARAMETER Experiment Name: At_42deg_Heat_Sub_P Parameter: Age (day) Value: 14
  misc_feature: MA Experiment 20000327 PARAMETER Experiment Name: At_42deg_Heat_Sub_P Parameter: Organism Value: A. thaliana
  misc_feature: MA Experiment 20000327 PARAMETER Experiment Name: At_42deg_Heat_Sub_P Parameter: Plant Line Value: WS
  misc_feature: MA Experiment 20000327 PARAMETER Experiment Name: At_42deg_Heat_Sub_P Parameter: Temperature (deg C) Value: 42 vs. 22
  misc_feature: MA Experiment 20000327 PARAMETER Experiment Name: At_42deg_Heat_Sub_P Parameter: Timepoint (hr) Value: 1
  misc_feature: MA Experiment 20000327 PARAMETER Experiment Name: At_42deg_Heat_Sub_P Parameter: Tissue Value: Aerial
  misc_feature: MA Experiment ID: 20000328 Result: Down-regulated in Transcription
  misc_feature: MA Experiment 20000328 PARAMETER Experiment Name: At_42deg_Heat_Sub_P Parameter: Age (day) Value: 14
  misc_feature: MA Experiment 20000328 PARAMETER Experiment Name: At_42deg_Heat_Sub_P Parameter: Organism Value: A. thaliana
  misc_feature: MA Experiment 20000328 PARAMETER Experiment Name: At_42deg_Heat_Sub_P Parameter: Plant Line Value: WS
  misc_feature: MA Experiment 20000328 PARAMETER Experiment Name: At_42deg_Heat_Sub_P Parameter: Temperature (deg C) Value: 42 vs. 22
  misc_feature: MA Experiment 20000328 PARAMETER Experiment Name: At_42deg_Heat_Sub_P Parameter: Timepoint (hr) Value: 6
  misc_feature: MA Experiment 20000328 PARAMETER Experiment Name: At_42deg_Heat_Sub_P Parameter: Tissue Value: Aerial
atgggaggtcaaagctcaaagattggtacatgttgttcacacaagactactgctcttgaagctccagatgttgaaaacaaagagaatggtgaggtaaacggtgtgcattcttttcgtgaatactcactagaacagcttaagatcgccacctcttgttttgctttggagaatgttgtatctgaacatggagaaacagctccaaatgttgtctatcaagggaaattggagaatcatatgaagattgctatcaagcgcttttctggaactgcctggcctgatcctcgccaattcctggaagaagcaagattggttggtcagctacgcagcaaaagaatggccaatttactcggttattgctgtgaaggcggcgagaggttacttgtggctgagtttatgcctaatgagacactagccaaacaccttttccactgggatacagagccaatgaaatgggcgatgcgactaagggttgctctatacatttcagaagctcttgaatactgtagtaacaatggacacacgctatatcatgatctcaatgcttacagagttttatttgacgaggaatgtaatccaagactttcaacatttgggttaatgaagaatagtcgggatgggaaaagttatagcacaaatcttgcttttaccccacctgagtatctacgaactgggagaatcacagcagagagtgtgatttacagttttggcactcttctgcttgatcttctcaccggaaagcatattcctcctagccatgcccttgatttgattcgagacagaaatcttcagactctaaccgattcctgcttggagggacaattttcagacagtgatggtacggagttagtacgcctgacatcttgttgtcttcagtatgaagctcgtgagcgaccaaacataaaatctttggtcactgcactgatatctctccagaaagacacagaggttctgtctcatgttctaatgggtctgcctcaaagtggtacttttgcgtcacctccgtctccttttgctgaggcttgctcgggaaaagacctgacgtctatggttgagatcttggaaaaaattggttacaaagacgatgaagatctttcgtttatgtggacggaacagatgcaagaagctataaactcgaagaaaaaaggtgatattgcatttagaagaaaagactttagtgaagccattgagttttacacgcagtttcttgatttgggaatgatctctgcaacagtcttggtgcggcgaagtcaaagttacctaatgagtaacatggcgaaagaagctttagatgatgcaatgaaggctcaaggcatttctcctgtttggtatgttgcattgtatctccagtctgctgctctttctgtcctgggaatggagaaggaatctcaaatcgcacttaccgaaggatccattcttgaagccagaaagatttcagcttccacacagaactaa

SEQ ID NO: 80169 - protein, 483 aa, Arabidopsis thaliana
  peptide (1)..(483): Ceres Seq. ID no. 12654661
  misc_feature (1)..(483): Homolog of NCBI NO: 15223469 NR Description: protein kinase, putative; protein id: At1g01740.1
  misc_feature (1)..(483): Homolog of NCBI NO: 25518738 NR Description: hypothetical protein T1N6.15 - Arabidopsis
  misc_feature (1)..(475): Homolog of NCBI NO: 22328189 NR Description: hypothetical protein; protein id: At4g00710.1, by cDNA: gi_17064837, supported by cDNA: gi_20259853 [Arabidopsis >gi|17064838|gb|AAL32573.1| Unknown protein [Arabidopsis
  misc_feature (1)..(475): Homolog of NCBI NO: 7486564 NR Description: hypothetical protein F6N23.9 - Arabidopsis >gi|3047104|gb|AAC13615.1| F6N23.9 gene product [Arabidopsis >gi|7267410|emb|CAB80880.1| hypothetical protein [Arabidopsis
  misc_feature (1)..(476): Homolog of NCBI NO: 15237604 NR Description: protein kinase-like; protein id: At5g41260.1
  misc_feature (1)..(476): Homolog of NCBI NO: 22327962 NR Description: protein kinase - like; protein id: At5g59010.1, by cDNA: gi_19715585 [Arabidopsis thaliana]
  misc_feature (1)..(476): Homolog of NCBI NO: 15232406 NR Description: protein kinase -like protein; protein id: supported by cDNA: 150889., supported by cDNA: gi_15450845
  misc_feature (1)..(476): Homolog of NCBI NO: 21553556 NR Description: protein kinase-like protein [Arabidopsis thaliana]
  misc_feature (97)..(310): Homolog of NCBI NO: 6633851 NR Description: F2K11.13 [Arabidopsis thaliana]
  misc_feature (325)..(476): Homolog of NCBI NO: 6633851 NR Description: F2K11.13 [Arabidopsis thaliana]
MGGQSSKIGTCCSHKTTALEAPDVENKENGEVNGVHSFREYSLEQLKIATSCFALENVVSEHGETAPNVVYQGKLENHMKIAIKRFSGTAWPDPRQFLEEARLVGQLRSKRMANLLGYCCEGGERLLVAEFMPNETLAKHLFHWDTEPMKWAMRLRVALYISEALEYCSNNGHTLYHDLNAYRVLFDEECNPRLSTFGLMKNSRDGKSYSTNLAFTPPEYLRTGRITAESVIYSFGTLLLDLLTGKHIPPSHALDLIRDRNLQTLTDSCLEGQFSDSDGTELVRLTSCCLQYEARERPNIKSLVTALISLQKDTEVLSHVLMGLPQSGTFASPPSPFAEACSGKDLTSMVEILEKIGYKDDEDLSFMWTEQMQEAINSKKKGDIAFRRKDFSEAIEFYTQFLDLGMISATVLVRRSQSYLMSNMAKEALDDAMKAQGISPVWYVALYLQSAALSVLGMEKESQIALTEGSILEARKISASTQN

SEQ ID NO: 80170 - protein, 405 aa, Arabidopsis thaliana
  peptide (1)..(405): Ceres Seq. ID no. 12654662
  misc_feature (1)..(405): Homolog of NCBI NO: 15223469 NR Description: protein kinase, putative; protein id: At1g01740.1
  misc_feature (1)..(405): Homolog of NCBI NO: 25518738 NR Description: hypothetical protein T1N6.15 - Arabidopsis
  misc_feature (1)..(397): Homolog of NCBI NO: 22328189 NR Description: hypothetical protein; protein id: At4g00710.1, by cDNA: gi_17064837, supported by cDNA: gi_20259853 [Arabidopsis >gi|17064838|gb|AAL32573.1| Unknown protein [Arabidopsis
  misc_feature (1)..(397): Homolog of NCBI NO: 7486564 NR Description: hypothetical protein F6N23.9 - Arabidopsis >gi|3047104|gb|AAC13615.1| F6N23.9 gene product [Arabidopsis >gi|7267410|emb|CAB80880.1| hypothetical protein [Arabidopsis
  misc_feature (1)..(398): Homolog of NCBI NO: 15237604 NR Description: protein kinase-like; protein id: At5g41260.1
  misc_feature (1)..(398): Homolog of NCBI NO: 22327962 NR Description: protein kinase - like; protein id: At5g59010.1, by cDNA: gi_19715585 [Arabidopsis thaliana]
  misc_feature (1)..(398): Homolog of NCBI NO: 15232406 NR Description: protein kinase -like protein; protein id: supported by cDNA: 150889., supported by cDNA: gi_15450845
  misc_feature (1)..(398): Homolog of NCBI NO: 21553556 NR Description: protein kinase-like protein [Arabidopsis thaliana]
  misc_feature (19)..(232): Homolog of NCBI NO: 6633851 NR Description: F2K11.13 [Arabidopsis thaliana]
  misc_feature (247)..(398): Homolog of NCBI NO: 6633851 NR Description: F2K11.13 [Arabidopsis thaliana]
MKIAIKRFSGTAWPDPRQFLEEARLVGQLRSKRMANLLGYCCEGGERLLVAEFMPNETLAKHLFHWDTEPMKWAMRLRVALYISEALEYCSNNGHTLYHDLNAYRVLFDEECNPRLSTFGLMKNSRDGKSYSTNLAFTPPEYLRTGRITAESVIYSFGTLLLDLLTGKHIPPSHALDLIRDRNLQTLTDSCLEGQFSDSDGTELVRLTSCCLQYEARERPNIKSLVTALISLQKDTEVLSHVLMGLPQSGTFASPPSPFAEACSGKDLTSMVEILEKIGYKDDEDLSFMWTEQMQEAINSKKKGDIAFRRKDFSEAIEFYTQFLDLGMISATVLVRRSQSYLMSNMAKEALDDAMKAQGISPVWYVALYLQSAALSVLGMEKESQIALTEGSILEARKISASTQN

SEQ ID NO: 80171 - protein, 372 aa, Arabidopsis thaliana
  peptide (1)..(372): Ceres Seq. ID no. 12654663
  misc_feature (1)..(372): Homolog of NCBI NO: 15223469 NR Description: protein kinase, putative; protein id: At1g01740.1
  misc_feature (1)..(372): Homolog of NCBI NO: 25518738 NR Description: hypothetical protein T1N6.15 - Arabidopsis
  misc_feature (1)..(364): Homolog of NCBI NO: 22328189 NR Description: hypothetical protein; protein id: At4g00710.1, by cDNA: gi_17064837, supported by cDNA: gi_20259853 [Arabidopsis >gi|17064838|gb|AAL32573.1| Unknown protein [Arabidopsis
  misc_feature (1)..(364): Homolog of NCBI NO: 7486564 NR Description: hypothetical protein F6N23.9 - Arabidopsis >gi|3047104|gb|AAC13615.1| F6N23.9 gene product [Arabidopsis >gi|7267410|emb|CAB80880.1| hypothetical protein [Arabidopsis
  misc_feature (1)..(365): Homolog of NCBI NO: 15237604 NR Description: protein kinase-like; protein id: At5g41260.1
  misc_feature (1)..(365): Homolog of NCBI NO: 22327962 NR Description: protein kinase - like; protein id: At5g59010.1, by cDNA: gi_19715585 [Arabidopsis thaliana]
  misc_feature (1)..(365): Homolog of NCBI NO: 15232406 NR Description: protein kinase -like protein; protein id: supported by cDNA: 150889., supported by cDNA: gi_15450845
  misc_feature (1)..(365): Homolog of NCBI NO: 21553556 NR Description: protein kinase-like protein [Arabidopsis thaliana]
  misc_feature (1)..(199): Homolog of NCBI NO: 6633851 NR Description: F2K11.13 [Arabidopsis thaliana]
  misc_feature (214)..(365): Homolog of NCBI NO: 6633851 NR Description: F2K11.13 [Arabidopsis thaliana]
MANLLGYCCEGGERLLVAEFMPNETLAKHLFHWDTEPMKWAMRLRVALYISEALEYCSNNGHTLYHDLNAYRVLFDEECNPRLSTFGLMKNSRDGKSYSTNLAFTPPEYLRTGRITAESVIYSFGTLLLDLLTGKHIPPSHALDLIRDRNLQTLTDSCLEGQFSDSDGTELVRLTSCCLQYEARERPNIKSLVTALISLQKDTEVLSHVLMGLPQSGTFASPPSPFAEACSGKDLTSMVEILEKIGYKDDEDLSFMWTEQMQEAINSKKKGDIAFRRKDFSEAIEFYTQFLDLGMISATVLVRRSQSYLMSNMAKEALDDAMKAQGISPVWYVALYLQSAALSVLGMEKESQIALTEGSILEARKISASTQN

SEQ ID NO: 80172 - DNA, 1017 bp, Arabidopsis thaliana
  misc_feature (1)..(1017): Ceres Seq. ID no. 12654738
  misc_feature: MA Experiment ID: 20000182 Result: Up-regulated in Transcription
  misc_feature: MA Experiment 20000182 PARAMETER Experiment Name: At_2mM_SA_P Parameter: Age (day) Value: 14
  misc_feature: MA Experiment 20000182 PARAMETER Experiment Name: At_2mM_SA_P Parameter: Organism Value: A. thaliana
  misc_feature: MA Experiment 20000182 PARAMETER Experiment Name: At_2mM_SA_P Parameter: Plant Line Value: WS
  misc_feature: MA Experiment 20000182 PARAMETER Experiment Name: At_2mM_SA_P Parameter: Timepoint (hr) Value: 6
  misc_feature: MA Experiment 20000182 PARAMETER Experiment Name: At_2mM_SA_P Parameter: Tissue Value: Aerial
  misc_feature: MA Experiment 20000182 PARAMETER Experiment Name: At_2mM_SA_P Parameter: Treatment Value: 2mM SA vs. No Treatment
  misc_feature: MA Experiment ID: 20000264 Result: Down-regulated in Transcription
  misc_feature: MA Experiment 20000264 PARAMETER Experiment Name: At_Open_Flower_P Parameter: Age (day) Value: 21
  misc_feature: MA Experiment 20000264 PARAMETER Experiment Name: At_Open_Flower_P Parameter: Plant Line Value: WS
  misc_feature: MA Experiment 20000264 PARAMETER Experiment Name: At_Open_Flower_P Parameter: Tissue Value: Open Flower vs. Whole Plant
  misc_feature: MA Experiment ID: 20000439 Result: Up-regulated in Transcription
  misc_feature: MA Experiment 20000439 PARAMETER Experiment Name: At_Roots__P Parameter: Age (day) Value: 14 vs. 21
  misc_feature: MA Experiment 20000439 PARAMETER Experiment Name: At_Roots__P Parameter: Organism Value: A. thaliana
  misc_feature: MA Experiment 20000439 PARAMETER Experiment Name: At_Roots__P Parameter: Tissue Value: Roots vs. Whole Plant
  misc_feature: MA Experiment ID: 20000495 Result: Up-regulated in Transcription
  misc_feature: MA Experiment 20000495 PARAMETER Experiment Name: At_Guard_Cells_P Parameter: Harvest Date Value: 8/2/2002
  misc_feature: MA Experiment 20000495 PARAMETER Experiment Name: At_Guard_Cells_P Parameter: Organism Value: A. thaliana
  misc_feature: MA Experiment 20000495 PARAMETER Experiment Name: At_Guard_Cells_P Parameter: Tissue Value: Guard Cells vs. Leaves
  misc_feature: MA Experiment ID: 20001450 Result: Up-regulated in Transcription
  misc_feature: MA Experiment 20001450 PARAMETER Experiment Name: At_Far-red-induction_P Parameter: Age (day) Value: 7
  misc_feature: MA Experiment 20001450 PARAMETER Experiment Name: At_Far-red-induction_P Parameter: Light Value: Far-red vs. White
  misc_feature: MA Experiment 20001450 PARAMETER Experiment Name: At_Far-red-induction_P Parameter: Organism Value: A. thaliana
  misc_feature: MA Experiment 20001450 PARAMETER Experiment Name: At_Far-red-induction_P Parameter: Plant Line Value: Columbia
  misc_feature: MA Experiment 20001450 PARAMETER Experiment Name: At_Far-red-induction_P Parameter: Timepoint (hr) Value: 8
  misc_feature: MA Experiment 20001450 PARAMETER Experiment Name: At_Far-red-induction_P Parameter: Tissue Value: Whole Plant
  misc_feature: MA Experiment ID: 20001451 Result: Up-regulated in Transcription
  misc_feature: MA Experiment 20001451 PARAMETER Experiment Name: At_Far-red-induction_P Parameter: Age (day) Value: 7
  misc_feature: MA Experiment 20001451 PARAMETER Experiment Name: At_Far-red-induction_P Parameter: Light Value: Far-red vs. White
  misc_feature: MA Experiment 20001451 PARAMETER Experiment Name: At_Far-red-induction_P Parameter: Organism Value: A. thaliana
  misc_feature: MA Experiment 20001451 PARAMETER Experiment Name: At_Far-red-induction_P Parameter: Plant Line Value: Columbia
  misc_feature: MA Experiment 20001451 PARAMETER Experiment Name: At_Far-red-induction_P Parameter: Timepoint (hr) Value: 24
  misc_feature: MA Experiment 20001451 PARAMETER Experiment Name: At_Far-red-induction_P Parameter: Tissue Value: Whole Plant
ctcctctcttttccaaccaattctcttctttcttgtgtgttcacattcaaagaaaatggataatcacacagctaaagacattggtatgaagagaagtgcttctgagctggctctacaagagtatctcactacaagccctctagacccttgtttcgacctcatgaaccgggattacacttgtgagttaagagatagtcttttgtggtctgagggattgtttccggctggaccttttcgcgatgcacagtcctcaatctgcgagaatctgtcagctgatagtccagtgtcagccaataaacctgaggtaagaggaggagttaggagaaccacaagtggatcttctcatgttaactctgatgacgaagatgccgagacagaagcagggcaatctgaaatgactaatgatcccaatgatctgaaacgtattagaaggatgaactcaaacagggaatcagcaaagaggtcgaggagaaggaagcaagagtacttggtagatcttgagactcaggttgattctttgaaaggcgataactcaacactgtacaagcagctcatagacgcaacacaacagtttcgtagcgctggaacaaataacagagttctcaaatcagatgttgaaactctgagagtcaaggtgaaactagcagaagatttggtagcgagagggtcactcactagcagcttgaatcaacttctacaaactcatctaagtccaccatcacactccatcagcagtctgcactacacgggaaatacctcgcccgccattacagtccacagtgaccaatctttgttccctggaatgacactttctggacagaactcaagccctggacttggtaatgtatccagtgaagctgttagctgcgtctcagacatctggccatgactctctttcttcagaacatgtaatgatcactcagcgaatttcctgtatgtgtttcgctatagaactagaaacatataatgaaagcagcatgttcgttaaataaactcaagtttcgtcaacatatactt

SEQ ID NO: 80173 - protein, 295 aa, Arabidopsis thaliana
  peptide (1)..(295): Ceres Seq. ID no. 12654739
  misc_feature (136)..(200): Pfam Name: bZIP transcription factor Pfam Description: bZIP transcription factor
  misc_feature (19)..(295): Homolog of NCBI NO: 18420842 NR Description: bZIP protein, G/HBF-1-related; protein id: supported by cDNA: gi_10954096 [Arabidopsis thaliana]
  misc_feature (80)..(282): Homolog of NCBI NO: 7489562 NR Description: probable transcription activator - rice
  misc_feature (80)..(238): Homolog of NCBI NO: 13365772 NR Description: RISBZ4 [Oryza sativa]
  misc_feature (108)..(238): Homolog of NCBI NO: 7489563 NR Description: probable transcription activator 2 - rice plasmid
  misc_feature (109)..(295): Homolog of NCBI NO: 13365774 NR Description: RISBZ5 [Oryza sativa]
SSLFQPILFFLVCSHSKKMDNHTAKDIGMKRSASELALQEYLTTSPLDPCFDLMNRDYTCELRDSLLWSEGLFPAGPFRDAQSSICENLSADSPVSANKPEVRGGVRRTTSGSSHVNSDDEDAETEAGQSEMTNDPNDLKRIRRMNSNRESAKRSRRRKQEYLVDLETQVDSLKGDNSTLYKQLIDATQQFRSAGTNNRVLKSDVETLRVKVKLAEDLVARGSLTSSLNQLLQTHLSPPSHSISSLHYTGNTSPAITVHSDQSLFPGMTLSGQNSSPGLGNVSSEAVSCVSDIWP

SEQ ID NO: 80174 - protein, 277 aa, Arabidopsis thaliana
  peptide (1)..(277): Ceres Seq. ID no. 12654740
  misc_feature (118)..(182): Pfam Name: bZIP transcription factor Pfam Description: bZIP transcription factor
  misc_feature (1)..(277): Homolog of NCBI NO: 18420842 NR Description: bZIP protein, G/HBF-1-related; protein id: supported by cDNA: gi_10954096 [Arabidopsis thaliana]
  misc_feature (62)..(264): Homolog of NCBI NO: 7489562 NR Description: probable transcription activator - rice
  misc_feature (62)..(220): Homolog of NCBI NO: 13365772 NR Description: RISBZ4 [Oryza sativa]
  misc_feature (90)..(220): Homolog of NCBI NO: 7489563 NR Description: probable transcription activator 2 - rice plasmid
  misc_feature (91)..(277): Homolog of NCBI NO: 13365774 NR Description: RISBZ5 [Oryza sativa]
MDNHTAKDIGMKRSASELALQEYLTTSPLDPCFDLMNRDYTCELRDSLLWSEGLFPAGPFRDAQSSICENLSADSPVSANKPEVRGGVRRTTSGSSHVNSDDEDAETEAGQSEMTNDPNDLKRIRRMNSNRESAKRSRRRKQEYLVDLETQVDSLKGDNSTLYKQLIDATQQFRSAGTNNRVLKSDVETLRVKVKLAEDLVARGSLTSSLNQLLQTHLSPPSHSISSLHYTGNTSPAITVHSDQSLFPGMTLSGQNSSPGLGNVSSEAVSCVSDIWP

SEQ ID NO: 80175 - protein, 267 aa, Arabidopsis thaliana
  peptide (1)..(267): Ceres Seq. ID no. 12654741
  misc_feature (108)..(172): Pfam Name: bZIP transcription factor Pfam Description: bZIP transcription factor
  misc_feature (1)..(267): Homolog of NCBI NO: 18420842 NR Description: bZIP protein, G/HBF-1-related; protein id: supported by cDNA: gi_10954096 [Arabidopsis thaliana]
  misc_feature (52)..(254): Homolog of NCBI NO: 7489562 NR Description: probable transcription activator - rice
  misc_feature (52)..(210): Homolog of NCBI NO: 13365772 NR Description: RISBZ4 [Oryza sativa]
  misc_feature (80)..(210): Homolog of NCBI NO: 7489563 NR Description: probable transcription activator 2 - rice plasmid
  misc_feature (81)..(267): Homolog of NCBI NO: 13365774 NR Description: RISBZ5 [Oryza sativa]
MKRSASELALQEYLTTSPLDPCFDLMNRDYTCELRDSLLWSEGLFPAGPFRDAQSSICENLSADSPVSANKPEVRGGVRRTTSGSSHVNSDDEDAETEAGQSEMTNDPNDLKRIRRMNSNRESAKRSRRRKQEYLVDLETQVDSLKGDNSTLYKQLIDATQQFRSAGTNNRVLKSDVETLRVKVKLAEDLVARGSLTSSLNQLLQTHLSPPSHSISSLHYTGNTSPAITVHSDQSLFPGMTLSGQNSSPGLGNVSSEAVSCVSDIWP

SEQ ID NO: 80176 - DNA, 1578 bp, Arabidopsis thaliana
  misc_feature (1)..(1578): Ceres Seq. ID no. 12654757
  misc_feature: MA Experiment ID: 20000179 Result: Down-regulated in Transcription
  misc_feature: MA Experiment 20000179 PARAMETER Experiment Name: At_Germinating_Seeds_P Parameter: Age (hr) Value: 6 vs. 0
  misc_feature: MA Experiment 20000179 PARAMETER Experiment Name: At_Germinating_Seeds_P Parameter: Tissue Value: Germinating Seeds
  misc_feature: MA Experiment ID: 20000180 Result: Down-regulated in Transcription
  misc_feature: MA Experiment 20000180 PARAMETER Experiment Name: At_Germinating_Seeds_P Parameter: Age (hr) Value: 24 vs. 0
  misc_feature: MA Experiment 20000180 PARAMETER Experiment Name: At_Germinating_Seeds_P Parameter: Tissue Value: Germinating Seeds
  misc_feature: MA Experiment ID: 20000185 Result: Up-regulated in Transcription
  misc_feature: MA Experiment 20000185 PARAMETER Experiment Name: At_Roots__P Parameter: Age (day) Value: 7 vs. 21
  misc_feature: MA Experiment 20000185 PARAMETER Experiment Name: At_Roots__P Parameter: Organism Value: A. thaliana
  misc_feature: MA Experiment 20000185 PARAMETER Experiment Name: At_Roots__P Parameter: Tissue Value: Roots vs. Whole Plant
  misc_feature: MA Experiment ID: 20000227 Result: Up-regulated in Transcription
  misc_feature: MA Experiment 20000227 PARAMETER Experiment Name: At_Root-Tips-vs-Tops_P Parameter: Tissue Value: Root Tips vs. Root Tops
atggagagtttggttgttcatacggtaaatgcaatttggtgcatagttattgtcggaatcttcagcgtaggttatcatgtgtatggaagagcggtggtggagcagtggaggatgcggaggagtttaaagttgcaaggcgtgaagggtcctccaccgtcgatctttaacggcaatgtgtcggagatgcaacggattcagtcggaggctaaacactgttccggcgataacatcatttctcatgactattcttcttctctatttcctcatttcgatcactggcgaaaacaatacggaaggatttacacatactcaacggggttaaagcagcacctttacataaaccacccggaaatggtgaaggagcttagccaaaccaacacacttaaccttggtagaatcactcacatcaccaaacgccttaaccccattctcggcaatggcatcatcacctctaatgggcctcattgggcccatcaacgtcgtatcattgcctatgagtttacccacgacaaaatcaagggaatggttggtttaatggtggaatctgccatgccaatgttgaacaaatgggaagagatggtgaaaagaggaggagaaatgggttgtgacataagagtggacgaagaccttaaggatgtctcagctgatgtcatcgctaaggcttgctttgggagctctttttcaaaaggcaaagcaatattctctatgattagggatcttttaaccgccattactaaacgaagcgtcctcttcagattcaatggcttcactgatatggtgtttggaagtaagaagcatggtgatgtggatattgatgcgcttgagatggaattagaatcttctatatgggaaacggttaaggagagggaaattgaatgtaaggatactcacaagaaggatctaatgcagttgatactcgagggagcgatgcgaagctgcgatggtaacttgtgggacaagtcagcctatagacggtttgtggtggacaattgcaagagcatctatttcgccggacatgattcaaccgcagtctcagtgtcttggtgccttatgctcctcgctctcaatcctagttggcaggttaaaattcgcgatgaaatcttgagttcttgcaagaatggcattcccgacgcagaatcaattcctaatctcaaaacggtgacaatggtaatacaagaaacaatgagactatacccaccagcaccaatcgtgggaagagaagcatccaaagacataagacttggagaccttgtggtgccaaaaggagtgtgcatttggacactcattcctgccttacaccgagaccccgagatctggggaccagacgcaaacgacttcaagccagagaggtttagtgagggaatctctaaggcttgcaaataccctcagtcatacatcccatttggccttggaccaagaacatgcgtaggcaaaaactttggtatgatggaagtgaaagtgcttgtttcacttattgtctcaaagttcagttttactctttccccgacttatcagcactctccaagccataaactccttgtagagcctcaacatggtgttgtcattagggttgtttga

SEQ ID NO: 80177 - protein, 525 aa, Arabidopsis thaliana
  peptide (1)..(525): Ceres Seq. ID no. 12654758
  misc_feature (47)..(524): Pfam Name: Cytochrome P450 Pfam Description: Cytochrome P450
  misc_feature (1)..(525): Homolog of NCBI NO: 15238644 NR Description: cytochrome p450 family; protein id: At5g24900.1
  misc_feature (1)..(525): Homolog of NCBI NO: 18420859 NR Description: cytochrome p450, putative; protein id: supported by cDNA: gi_16604323 [Arabidopsis thaliana] AT5g24910/F6A4_120 [Arabidopsis thaliana]
  misc_feature (37)..(524): Homolog of NCBI NO: 13661756 NR Description: putative cytochrome P450 [Lolium rigidum]
  misc_feature (37)..(520): Homolog of NCBI NO: 33146666 NR Description: putative cytochrome P450 [Oryza sativa (japonica
  misc_feature (37)..(524): Homolog of NCBI NO: 13661758 NR Description: putative cytochrome P450 [Lolium rigidum]
  misc_feature (4)..(522): Homolog of NCBI NO: 15240917 NR Description: cytochrome p450, putative; protein id: At5g38450.1
  misc_feature (37)..(520): Homolog of NCBI NO: 15219831 NR Description: cytochrome P450, putative; protein id: [Arabidopsis thaliana] >gi|25282618|pir||A96695 hypothetical
  misc_feature (36)..(524): Homolog of NCBI NO: 21805645 NR Description: cytochrome P450 monooxygenase CYP72A5 [Zea mays
  misc_feature (12)..(520): Homolog of NCBI NO: 38112707 NR Description: cytochrome P450 [Triticum aestivum]
  misc_feature (13)..(520): Homolog of NCBI NO: 22324446 NR Description: putative cytochrome P450 [Oryza sativa (japonica
MESLVVHTVNAIWCIVIVGIFSVGYHVYGRAVVEQWRMRRSLKLQGVKGPPPSIFNGNVSEMQRIQSEAKHCSGDNIISHDYSSSLFPHFDHWRKQYGRIYTYSTGLKQHLYINHPEMVKELSQTNTLNLGRITHITKRLNPILGNGIITSNGPHWAHQRRIIAYEFTHDKIKGMVGLMVESAMPMLNKWEEMVKRGGEMGCDIRVDEDLKDVSADVIAKACFGSSFSKGKAIFSMIRDLLTAITKRSVLFRFNGFTDMVFGSKKHGDVDIDALEMELESSIWETVKEREIECKDTHKKDLMQLILEGAMRSCDGNLWDKSAYRRFVVDNCKSIYFAGHDSTAVSVSWCLMLLALNPSWQVKIRDEILSSCKNGIPDAESIPNLKTVTMVIQETMRLYPPAPIVGREASKDIRLGDLVVPKGVCIWTLIPALHRDPEIWGPDANDFKPERFSEGISKACKYPQSYIPFGLGPRTCVGKNFGMMEVKVLVSLIVSKFSFTLSPTYQHSPSHKLLVEPQHGVVIRVV

SEQ ID NO: 80178 - protein, 488 aa, Arabidopsis thaliana
  peptide (1)..(488): Ceres Seq. ID no. 12654759
  misc_feature (10)..(487): Pfam Name: Cytochrome P450 Pfam Description: Cytochrome P450
  misc_feature (1)..(488): Homolog of NCBI NO: 15238644 NR Description: cytochrome p450 family; protein id: At5g24900.1
  misc_feature (1)..(488): Homolog of NCBI NO: 18420859 NR Description: cytochrome p450, putative; protein id: supported by cDNA: gi_16604323 [Arabidopsis thaliana] AT5g24910/F6A4_120 [Arabidopsis thaliana]
  misc_feature (1)..(487): Homolog of NCBI NO: 13661756 NR Description: putative cytochrome P450 [Lolium rigidum]
  misc_feature (1)..(483): Homolog of NCBI NO: 33146666 NR Description: putative cytochrome P450 [Oryza sativa (japonica
  misc_feature (1)..(487): Homolog of NCBI NO: 13661758 NR Description: putative cytochrome P450 [Lolium rigidum]
  misc_feature (1)..(485): Homolog of NCBI NO: 15240917 NR Description: cytochrome p450, putative; protein id: At5g38450.1
  misc_feature (1)..(483): Homolog of NCBI NO: 15219831 NR Description: cytochrome P450, putative; protein id: [Arabidopsis thaliana] >gi|25282618|pir||A96695 hypothetical
  misc_feature (1)..(487): Homolog of NCBI NO: 21805645 NR Description: cytochrome P450 monooxygenase CYP72A5 [Zea mays
  misc_feature (1)..(483): Homolog of NCBI NO: 38112707 NR Description: cytochrome P450 [Triticum aestivum]
  misc_feature (1)..(483): Homolog of NCBI NO: 22324446 NR Description: putative cytochrome P450 [Oryza sativa (japonica
MRRSLKLQGVKGPPPSIFNGNVSEMQRIQSEAKHCSGDNIISHDYSSSLFPHFDHWRKQYGRIYTYSTGLKQHLYINHPEMVKELSQTNTLNLGRITHITKRLNPILGNGIITSNGPHWAHQRRIIAYEFTHDKIKGMVGLMVESAMPMLNKWEEMVKRGGEMGCDIRVDEDLKDVSADVIAKACFGSSFSKGKAIFSMIRDLLTAITKRSVLFRFNGFTDMVFGSKKHGDVDIDALEMELESSIWETVKEREIECKDTHKKDLMQLILEGAMRSCDGNLWDKSAYRRFVVDNCKSIYFAGHDSTAVSVSWCLMLLALNPSWQVKIRDEILSSCKNGIPDAESIPNLKTVTMVIQETMRLYPPAPIVGREASKDIRLGDLVVPKGVCIWTLIPALHRDPEIWGPDANDFKPERFSEGISKACKYPQSYIPFGLGPRTCVGKNFGMMEVKVLVSLIVSKFSFTLSPTYQHSPSHKLLVEPQHGVVIRVV

SEQ ID NO: 80179 - protein, 464 aa, Arabidopsis thaliana
  peptide (1)..(464): Ceres Seq. ID no. 12654760
  misc_feature (1)..(463): Pfam Name: Cytochrome P450 Pfam Description: Cytochrome P450
  misc_feature (1)..(464): Homolog of NCBI NO: 15238644 NR Description: cytochrome p450 family; protein id: At5g24900.1
  misc_feature (1)..(464): Homolog of NCBI NO: 18420859 NR Description: cytochrome p450, putative; protein id: supported by cDNA: gi_16604323 [Arabidopsis thaliana] AT5g24910/F6A4_120 [Arabidopsis thaliana]
  misc_feature (1)..(463): Homolog of NCBI NO: 13661756 NR Description: putative cytochrome P450 [Lolium rigidum]
  misc_feature (1)..(459): Homolog of NCBI NO: 33146666 NR Description: putative cytochrome P450 [Oryza sativa (japonica
  misc_feature (1)..(463): Homolog of NCBI NO: 13661758 NR Description: putative cytochrome P450 [Lolium rigidum]
  misc_feature (1)..(461): Homolog of NCBI NO: 15240917 NR Description: cytochrome p450, putative; protein id: At5g38450.1
  misc_feature (1)..(459): Homolog of NCBI NO: 15219831 NR Description: cytochrome P450, putative; protein id: [Arabidopsis thaliana] >gi|25282618|pir||A96695 hypothetical
  misc_feature (1)..(463): Homolog of NCBI NO: 21805645 NR Description: cytochrome P450 monooxygenase CYP72A5 [Zea mays
  misc_feature (1)..(459): Homolog of NCBI NO: 38112707 NR Description: cytochrome P450 [Triticum aestivum]
  misc_feature (1)..(459): Homolog of NCBI NO: 22324446 NR Description: putative cytochrome P450 [Oryza sativa (japonica
MQRIQSEAKHCSGDNIISHDYSSSLFPHFDHWRKQYGRIYTYSTGLKQHLYINHPEMVKELSQTNTLNLGRITHITKRLNPILGNGIITSNGPHWAHQRRIIAYEFTHDKIKGMVGLMVESAMPMLNKWEEMVKRGGEMGCDIRVDEDLKDVSADVIAKACFGSSFSKGKAIFSMIRDLLTAITKRSVLFRFNGFTDMVFGSKKHGDVDIDALEMELESSIWETVKEREIECKDTHKKDLMQLILEGAMRSCDGNLWDKSAYRRFVVDNCKSIYFAGHDSTAVSVSWCLMLLALNPSWQVKIRDEILSSCKNGIPDAESIPNLKTVTMVIQETMRLYPPAPIVGREASKDIRLGDLVVPKGVCIWTLIPALHRDPEIWGPDANDFKPERFSEGISKACKYPQSYIPFGLGPRTCVGKNFGMMEVKVLVSLIVSKFSFTLSPTYQHSPSHKLLVEPQHGVVIRVV

SEQ ID NO: 80180 - DNA, 1788 bp, Arabidopsis thaliana
  misc_feature (1)..(1788): Ceres Seq. ID no. 12654761
  misc_feature: MA Experiment ID: 20000179 Result: Down-regulated in Transcription
  misc_feature: MA Experiment 20000179 PARAMETER Experiment Name: At_Germinating_Seeds_P Parameter: Age (hr) Value: 6 vs. 0
  misc_feature: MA Experiment 20000179 PARAMETER Experiment Name: At_Germinating_Seeds_P Parameter: Tissue Value: Germinating Seeds
  misc_feature: MA Experiment ID: 20000180 Result: Down-regulated in Transcription
  misc_feature: MA Experiment 20000180 PARAMETER Experiment Name: At_Germinating_Seeds_P Parameter: Age (hr) Value: 24 vs. 0
  misc_feature: MA Experiment 20000180 PARAMETER Experiment Name: At_Germinating_Seeds_P Parameter: Tissue Value: Germinating Seeds
  misc_feature: MA Experiment ID: 20000182 Result: Up-regulated in Transcription
  misc_feature: MA Experiment 20000182 PARAMETER Experiment Name: At_2mM_SA_P Parameter: Age (day) Value: 14
  misc_feature: MA Experiment 20000182 PARAMETER Experiment Name: At_2mM_SA_P Parameter: Organism Value: A. thaliana
  misc_feature: MA Experiment 20000182 PARAMETER Experiment Name: At_2mM_SA_P Parameter: Plant Line Value: WS
  misc_feature: MA Experiment 20000182 PARAMETER Experiment Name: At_2mM_SA_P Parameter: Timepoint (hr) Value: 6
  misc_feature: MA Experiment 20000182 PARAMETER Experiment Name: At_2mM_SA_P Parameter: Tissue Value: Aerial
  misc_feature: MA Experiment 20000182 PARAMETER Experiment Name: At_2mM_SA_P Parameter: Treatment Value: 2mM SA vs. No Treatment
  misc_feature: MA Experiment ID: 20000185 Result: Up-regulated in Transcription
  misc_feature: MA Experiment 20000185 PARAMETER Experiment Name: At_Roots__P Parameter: Age (day) Value: 7 vs. 21
  misc_feature: MA Experiment 20000185 PARAMETER Experiment Name: At_Roots__P Parameter: Organism Value: A. thaliana
  misc_feature: MA Experiment 20000185 PARAMETER Experiment Name: At_Roots__P Parameter: Tissue Value: Roots vs. Whole Plant
  misc_feature: MA Experiment ID: 20000227 Result: Up-regulated in Transcription
  misc_feature: MA Experiment 20000227 PARAMETER Experiment Name: At_Root-Tips-vs-Tops_P Parameter: Tissue Value: Root Tips vs. Root Tops
  misc_feature: MA Experiment ID: 20000234 Result: Up-regulated in Transcription
  misc_feature: MA Experiment 20000234 PARAMETER Experiment Name: At_Siliques_P Parameter: Age (day) Value: 21
  misc_feature: MA Experiment 20000234 PARAMETER Experiment Name: At_Siliques_P Parameter: Organism Value: A. thaliana
  misc_feature: MA Experiment 20000234 PARAMETER Experiment Name: At_Siliques_P Parameter: Plant Line Value: WS
  misc_feature: MA Experiment 20000234 PARAMETER Experiment Name: At_Siliques_P Parameter: Tissue Value: Less Than 5mm Siliques vs. Whole Plant
  misc_feature: MA Experiment ID: 20000235 Result: Up-regulated in Transcription
  misc_feature: MA Experiment 20000235 PARAMETER Experiment Name: At_Siliques_P Parameter: Age (day) Value: 21
  misc_feature: MA Experiment 20000235 PARAMETER Experiment Name: At_Siliques_P Parameter: Organism Value: A. thaliana
  misc_feature: MA Experiment 20000235 PARAMETER Experiment Name: At_Siliques_P Parameter: Plant Line Value: WS
  misc_feature: MA Experiment 20000235 PARAMETER Experiment Name: At_Siliques_P Parameter: Tissue Value: 5-10mm Siliques vs. Whole Plant
  misc_feature: MA Experiment ID: 20000438 Result: Down-regulated in Transcription
  misc_feature: MA Experiment 20000438 PARAMETER Experiment Name: At_Shoots__P Parameter: Age (day) Value: 14
  misc_feature: MA Experiment 20000438 PARAMETER Experiment Name: At_Shoots__P Parameter: Tissue Value: Shoots vs. Whole Plant
  misc_feature: MA Experiment ID: 20000439 Result: Up-regulated in Transcription
  misc_feature: MA Experiment 20000439 PARAMETER Experiment Name: At_Roots__P Parameter: Age (day) Value: 14 vs. 21
  misc_feature: MA Experiment 20000439 PARAMETER Experiment Name: At_Roots__P Parameter: Organism Value: A. thaliana
  misc_feature: MA Experiment 20000439 PARAMETER Experiment Name: At_Roots__P Parameter: Tissue Value: Roots vs. Whole Plant
  misc_feature: MA Experiment ID: 20000527 Result: Down-regulated in Transcription
  misc_feature: MA Experiment 20000527 PARAMETER Experiment Name: At_10percent_PEG_P Parameter: Age (day) Value: 20
  misc_feature: MA Experiment 20000527 PARAMETER Experiment Name: At_10percent_PEG_P Parameter: Organism Value: A. thaliana
  misc_feature: MA Experiment 20000527 PARAMETER Experiment Name: At_10percent_PEG_P Parameter: Plant Line Value: WS
  misc_feature: MA Experiment 20000527 PARAMETER Experiment Name: At_10percent_PEG_P Parameter: Timepoint (day) Value: 20
  misc_feature: MA Experiment 20000527 PARAMETER Experiment Name: At_10percent_PEG_P Parameter: Tissue Value: Whole Plant
  misc_feature: MA Experiment 20000527 PARAMETER Experiment Name: At_10percent_PEG_P Parameter: Treatment Value: 10percent PEG vs. No Treatment
  misc_feature: MA Experiment ID: 20001248 Result: Up-regulated in Transcription
  misc_feature: MA Experiment 20001248 PARAMETER Experiment Name: At_Far-red-induction_P Parameter: Age (day) Value: 7
  misc_feature: MA Experiment 20001248 PARAMETER Experiment Name: At_Far-red-induction_P Parameter: Light Value: Far-red vs. White
  misc_feature: MA Experiment 20001248 PARAMETER Experiment Name: At_Far-red-induction_P Parameter: Organism Value: A. thaliana
  misc_feature: MA Experiment 20001248 PARAMETER Experiment Name: At_Far-red-induction_P Parameter: Plant Line Value: Columbia
  misc_feature: MA Experiment 20001248 PARAMETER Experiment Name: At_Far-red-induction_P Parameter: Timepoint (hr) Value: 4
  misc_feature: MA Experiment 20001248 PARAMETER Experiment Name: At_Far-red-induction_P Parameter: Tissue Value: Whole Plant
  misc_feature: MA Experiment ID: 20001450 Result: Up-regulated in Transcription
  misc_feature: MA Experiment 20001450 PARAMETER Experiment Name: At_Far-red-induction_P Parameter: Age (day) Value: 7
  misc_feature: MA Experiment 20001450 PARAMETER Experiment Name: At_Far-red-induction_P Parameter: Light Value: Far-red vs. White
  misc_feature: MA Experiment 20001450 PARAMETER Experiment Name: At_Far-red-induction_P Parameter: Organism Value: A. thaliana
  misc_feature: MA Experiment 20001450 PARAMETER Experiment Name: At_Far-red-induction_P Parameter: Plant Line Value: Columbia
  misc_feature: MA Experiment 20001450 PARAMETER Experiment Name: At_Far-red-induction_P Parameter: Timepoint (hr) Value: 8
  misc_feature: MA Experiment 20001450 PARAMETER Experiment Name: At_Far-red-induction_P Parameter: Tissue Value: Whole Plant
  misc_feature: MA Experiment ID: 20001911 Result: Up-regulated in Transcription
  misc_feature: MA Experiment 20001911 PARAMETER Experiment Name: At_Drought_Reproduction_P Parameter: Age (day) Value: 40
  misc_feature: MA Experiment 20001911 PARAMETER Experiment Name: At_Drought_Reproduction_P Parameter: Organism Value: A. thaliana
  misc_feature: MA Experiment 20001911 PARAMETER Experiment Name: At_Drought_Reproduction_P Parameter: Plant Line Value: WS
  misc_feature: MA Experiment 20001911 PARAMETER Experiment Name: At_Drought_Reproduction_P Parameter: Timepoint (day) Value: 10
  misc_feature: MA Experiment 20001911 PARAMETER Experiment Name: At_Drought_Reproduction_P Parameter: Tissue Value: Flowers
  misc_feature: MA Experiment 20001911 PARAMETER Experiment Name: At_Drought_Reproduction_P Parameter: Treatment Value: Drought vs. No Drought
agtgctcgactatacatatagccaaagaagagcagaaaaatcaaagtcgtgagttcagaagctataacaaaatttctaagaaaaagaaagataagaaaatggagaattttatggtagagatggccaagaccatttcgtggatagttgtaataggagtgttaggtttagggattcgtgtttacggtaaagtgatggcggagcaatggaggatgcggaggaagctgacgatgcagggcgtgaagggtcctccgccgtcgctatttcgtggaaacgtgccggagatgcaaaaaatccagtcacaaataatgagtaactctaaacactactccggtgataatatcatcgcccatgactacacttcttctctctttccatatctcgaccactggcgaaaacaatacgggagagtgtacacgtattcgacgggggtgaagcaacacttgtacatgaaccacccggagttggtgaaagaacttaaccaagccaacactcttaaccttggcaaagtctcttacgtcaccaaacgccttaaatccattcttggccgtggtgttatcacctctaatgggcctcattgggcccatcaacgtcgtatcattgcacctgagtttttcctcgacaaagtcaagggaatggtgggattggtggtggaatcagcgatgccaatgctgagtaaatgggaagagatgatgaaaagagaaggagaaatggtgtgtgacataattgtagacgaagacctaagagctgcctctgctgacgttatctctagagcttgctttgggagctctttctccaaaggcaaagagatcttctctaagcttagatgtcttcaaaaggccatcactcacaacaacatcctcttcagcctcaatggcttcactgatgttgtgttcgggactaagaagcatgggaacgggaagattgatgagctagagagacacattgagtctttgatatgggaaaccgttaaagaaagagaaagggaatgtgtgggagatcacaagaaggatctaatgcagttgatactagaaggggccaggagtagttgtgatggcaacttggaggacaagacacaatcttacaaaagtttcgtggtggacaattgcaagagcatctattttgccgggcatgagaccagtgcggttgctgtctcttggtgtcttatgctcctcgctctcaacccttcttggcaaactcgtatccgcgatgaagtctttcttcattgcaagaacggtatacctgacgcagactctatttccaacctcaaaacggtgacaatggttatccaggaaacgttgaggctatacccaccagcagcattcgtgtcgagagaagcccttgaggacacaaaactcggaaacctcgtggtgccaaagggagtgtgcatctggacgttgatccctacattgcacagagaccctgagatatggggagctgacgcaaatgaattcaatccagaaagatttagcgaaggagtctctaaagcctgcaaacaccctcagtcattcgtcccatttggcttagggacaaggttgtgtttaggaaagaattttggtatgatggagctcaaggttcttgtctcacttattgtgtcaaggtttagctttactctctctcccacatatcaacactctccggtgtttagaatgcttgtagagcctcaacatggtgttgtcattagagttctgagacaataagatatgtcgttagcttatggttttagttttaatcctgtgtaataataagatattattacactatagtactataatagtattttctttggta

SEQ ID NO: 80181 - protein, 564 aa, Arabidopsis thaliana
  peptide (1)..(564): Ceres Seq. ID no. 12654762
  misc_feature (79)..(561): Pfam Name: Cytochrome P450 Pfam Description: Cytochrome P450
  misc_feature (33)..(564): Homolog of NCBI NO: 18420859 NR Description: cytochrome p450, putative; protein id: supported by cDNA: gi_16604323 [Arabidopsis thaliana] AT5g24910/F6A4_120 [Arabidopsis thaliana]
  misc_feature (33)..(562): Homolog of NCBI NO: 15238644 NR Description: cytochrome p450 family; protein id: At5g24900.1
  misc_feature (54)..(563): Homolog of NCBI NO: 33146666 NR Description: putative cytochrome P450 [Oryza sativa (japonica
  misc_feature (47)..(563): Homolog of NCBI NO: 13661756 NR Description: putative cytochrome P450 [Lolium rigidum]
  misc_feature (47)..(563): Homolog of NCBI NO: 13661758 NR Description: putative cytochrome P450 [Lolium rigidum]
  misc_feature (47)..(559): Homolog of NCBI NO: 15240917 NR Description: cytochrome p450, putative; protein id: At5g38450.1
  misc_feature (99)..(564): Homolog of NCBI NO: 15219831 NR Description: cytochrome P450, putative; protein id: [Arabidopsis thaliana] >gi|25282618|pir||A96695 hypothetical
  misc_feature (68)..(561): Homolog of NCBI NO: 21805645 NR Description: cytochrome P450 monooxygenase CYP72A5 [Zea mays
  misc_feature (38)..(559): Homolog of NCBI NO: 15226472 NR Description: cytochrome p450, putative; protein id: [Arabidopsis thaliana] >gi|7430708|pir||T02192 probable
  misc_feature (44)..(557): Homolog of NCBI NO: 22324446 NR Description: putative cytochrome P450 [Oryza sativa (japonica
CSTIHIAKEEQKNQSREFRSYNKISKKKKDKKMENFMVEMAKTISWIVVIGVLGLGIRVYGKVMAEQWRMRRKLTMQGVKGPPPSLFRGNVPEMQKIQSQIMSNSKHYSGDNIIAHDYTSSLFPYLDHWRKQYGRVYTYSTGVKQHLYMNHPELVKELNQANTLNLGKVSYVTKRLKSILGRGVITSNGPHWAHQRRIIAPEFFLDKVKGMVGLVVESAMPMLSKWEEMMKREGEMVCDIIVDEDLRAASADVISRACFGSSFSKGKEIFSKLRCLQKAITHNNILFSLNGFTDVVFGTKKHGNGKIDELERHIESLIWETVKERERECVGDHKKDLMQLILEGARSSCDGNLEDKTQSYKSFVVDNCKSIYFAGHETSAVAVSWCLMLLALNPSWQTRIRDEVFLHCKNGIPDADSISNLKTVTMVIQETLRLYPPAAFVSREALEDTKLGNLVVPKGVCIWTLIPTLHRDPEIWGADANEFNPERFSEGVSKACKHPQSFVPFGLGTRLCLGKNFGMMELKVLVSLIVSRFSFTLSPTYQHSPVFRMLVEPQHGVVIRVLRQ

SEQ ID NO: 80182 - protein, 532 aa, Arabidopsis thaliana
  peptide (1)..(532): Ceres Seq. ID no. 12654763
  misc_feature (47)..(529): Pfam Name: Cytochrome P450 Pfam Description: Cytochrome P450
  misc_feature (1)..(532): Homolog of NCBI NO: 18420859 NR Description: cytochrome p450, putative; protein id: supported by cDNA: gi_16604323 [Arabidopsis thaliana] AT5g24910/F6A4_120 [Arabidopsis thaliana]
  misc_feature (1)..(530): Homolog of NCBI NO: 15238644 NR Description: cytochrome p450 family; protein id: At5g24900.1
  misc_feature (22)..(531): Homolog of NCBI NO: 33146666 NR Description: putative cytochrome P450 [Oryza sativa (japonica
  misc_feature (15)..(531): Homolog of NCBI NO: 13661756 NR Description: putative cytochrome P450 [Lolium rigidum]
  misc_feature (15)..(531): Homolog of NCBI NO: 13661758 NR Description: putative cytochrome P450 [Lolium rigidum]
  misc_feature (15)..(527): Homolog of NCBI NO: 15240917 NR Description: cytochrome p450, putative; protein id: At5g38450.1
  misc_feature (67)..(532): Homolog of NCBI NO: 15219831 NR Description: cytochrome P450, putative; protein id: [Arabidopsis thaliana] >gi|25282618|pir||A96695 hypothetical
  misc_feature (36)..(529): Homolog of NCBI NO: 21805645 NR Description: cytochrome P450 monooxygenase CYP72A5 [Zea mays
  misc_feature (6)..(527): Homolog of NCBI NO: 15226472 NR Description: cytochrome p450, putative; protein id: [Arabidopsis thaliana] >gi|7430708|pir||T02192 probable
  misc_feature (12)..(525): Homolog of NCBI NO: 22324446 NR Description: putative cytochrome P450 [Oryza sativa (japonica
MENFMVEMAKTISWIVVIGVLGLGIRVYGKVMAEQWRMRRKLTMQGVKGPPPSLFRGNVPEMQKIQSQIMSNSKHYSGDNIIAHDYTSSLFPYLDHWRKQYGRVYTYSTGVKQHLYMNHPELVKELNQANTLNLGKVSYVTKRLKSILGRGVITSNGPHWAHQRRIIAPEFFLDKVKGMVGLVVESAMPMLSKWEEMMKREGEMVCDIIVDEDLRAASADVISRACFGSSFSKGKEIFSKLRCLQKAITHNNILFSLNGFTDVVFGTKKHGNGKIDELERHIESLIWETVKERERECVGDHKKDLMQLILEGARSSCDGNLEDKTQSYKSFVVDNCKSIYFAGHETSAVAVSWCLMLLALNPSWQTRIRDEVFLHCKNGIPDADSISNLKTVTMVIQETLRLYPPAAFVSREALEDTKLGNLVVPKGVCIWTLIPTLHRDPEIWGADANEFNPERFSEGVSKACKHPQSFVPFGLGTRLCLGKNFGMMELKVLVSLIVSRFSFTLSPTYQHSPVFRMLVEPQHGVVIRVLRQ

SEQ ID NO: 80183 - protein, 528 aa, Arabidopsis thaliana
  peptide (1)..(528): Ceres Seq. ID no. 12654764
  misc_feature (43)..(525): Pfam Name: Cytochrome P450 Pfam Description: Cytochrome P450
  misc_feature (1)..(528): Homolog of NCBI NO: 18420859 NR Description: cytochrome p450, putative; protein id: supported by cDNA: gi_16604323 [Arabidopsis thaliana] AT5g24910/F6A4_120 [Arabidopsis thaliana]
  misc_feature (1)..(526): Homolog of NCBI NO: 15238644 NR Description: cytochrome p450 family; protein id: At5g24900.1
  misc_feature (18)..(527): Homolog of NCBI NO: 33146666 NR Description: putative cytochrome P450 [Oryza sativa (japonica
  misc_feature (11)..(527): Homolog of NCBI NO: 13661756 NR Description: putative cytochrome P450 [Lolium rigidum]
  misc_feature (11)..(527): Homolog of NCBI NO: 13661758 NR Description: putative cytochrome P450 [Lolium rigidum]
  misc_feature (11)..(523): Homolog of NCBI NO: 15240917 NR Description: cytochrome p450, putative; protein id: At5g38450.1
  misc_feature (63)..(528): Homolog of NCBI NO: 15219831 NR Description: cytochrome P450, putative; protein id: [Arabidopsis thaliana] >gi|25282618|pir||A96695 hypothetical
  misc_feature (32)..(525): Homolog of NCBI NO: 21805645 NR Description: cytochrome P450 monooxygenase CYP72A5 [Zea mays
  misc_feature (2)..(523): Homolog of NCBI NO: 15226472 NR Description: cytochrome p450, putative; protein id: [Arabidopsis thaliana] >gi|7430708|pir||T02192 probable
  misc_feature (8)..(521): Homolog of NCBI NO: 22324446 NR Description: putative cytochrome P450 [Oryza sativa (japonica
MVEMAKTISWIVVIGVLGLGIRVYGKVMAEQWRMRRKLTMQGVKGPPPSLFRGNVPEMQKIQSQIMSNSKHYSGDNIIAHDYTSSLFPYLDHWRKQYGRVYTYSTGVKQHLYMNHPELVKELNQANTLNLGKVSYVTKRLKSILGRGVITSNGPHWAHQRRIIAPEFFLDKVKGMVGLVVESAMPMLSKWEEMMKREGEMVCDIIVDEDLRAASADVISRACFGSSFSKGKEIFSKLRCLQKAITHNNILFSLNGFTDVVFGTKKHGNGKIDELERHIESLIWETVKERERECVGDHKKDLMQLILEGARSSCDGNLEDKTQSYKSFVVDNCKSIYFAGHETSAVAVSWCLMLLALNPSWQTRIRDEVFLHCKNGIPDADSISNLKTVTMVIQETLRLYPPAAFVSREALEDTKLGNLVVPKGVCIWTLIPTLHRDPEIWGADANEFNPERFSEGVSKACKHPQSFVPFGLGTRLCLGKNFGMMELKVLVSLIVSRFSFTLSPTYQHSPVFRMLVEPQHGVVIRVLRQ

SEQ ID NO: 80184 - DNA, 1344 bp, Arabidopsis thaliana
  misc_feature (1)..(1344): Ceres Seq. ID no. 12654769
  misc_feature: MA Experiment ID: 20001451 Result: Up-regulated in Transcription
  misc_feature: MA Experiment 20001451 PARAMETER Experiment Name: At_Far-red-induction_P Parameter: Age (day) Value: 7
  misc_feature: MA Experiment 20001451 PARAMETER Experiment Name: At_Far-red-induction_P Parameter: Light Value: Far-red vs. White
  misc_feature: MA Experiment 20001451 PARAMETER Experiment Name: At_Far-red-induction_P Parameter: Organism Value: A. thaliana
  misc_feature: MA Experiment 20001451 PARAMETER Experiment Name: At_Far-red-induction_P Parameter: Plant Line Value: Columbia
  misc_feature: MA Experiment 20001451 PARAMETER Experiment Name: At_Far-red-induction_P Parameter: Timepoint (hr) Value: 24
  misc_feature: MA Experiment 20001451 PARAMETER Experiment Name: At_Far-red-induction_P Parameter: Tissue Value: Whole Plant
  misc_feature: MA Experiment ID: 20001910 Result: Up-regulated in Transcription
  misc_feature: MA Experiment 20001910 PARAMETER Experiment Name: At_Drought_Reproduction_P Parameter: Age (day) Value: 37
  misc_feature: MA Experiment 20001910 PARAMETER Experiment Name: At_Drought_Reproduction_P Parameter: Organism Value: A. thaliana
  misc_feature: MA Experiment 20001910 PARAMETER Experiment Name: At_Drought_Reproduction_P Parameter: Plant Line Value: WS
  misc_feature: MA Experiment 20001910 PARAMETER Experiment Name: At_Drought_Reproduction_P Parameter: Timepoint (day) Value: 7
  misc_feature: MA Experiment 20001910 PARAMETER Experiment Name: At_Drought_Reproduction_P Parameter: Tissue Value: Flowers
  misc_feature: MA Experiment 20001910 PARAMETER Experiment Name: At_Drought_Reproduction_P Parameter: Treatment Value: Drought vs. No Drought
atgggatatatggacttggcgttatcttattcgaatcaaatgcggattgttgaagctcccgcaagcggaggtggtctcagtcagaatggaaaatttagctatggatatgcaagctcagctggaaaaaggtcatctatggaagacttttttgagacaaggatcgacggtatcgatggagaaatcgttggtctatttggagtctttgatggtcatggtggatccagagcagctgagtatgtgaagcgtcaccttttcagcaatcttattactcatcctaagttcatctctgacaccaaatctgcaatagctgatgcctatactcatacagactctgaacttctcaagtcagaaaatagtcatactagagatgctggttcaactgcttccacagctattctcgttggtgatcgtttacttgttgctaatgttggtgattccagagctgttatatgtcgtggcggaaatgcatttgctgtttcaagagaccataaacctgaccaaagtgatgagcgtgaacggattgagaatgctggtggttttgtgatgtgggcagggacttggagagttggaggagttcttgcagtttcccgcgcgtttggtgatcgattgcttaaacaatatgttgttgctgatccagaaattcaggaagagaagattgatgattctcttgagtttctgattcttgccagcgatggactatgggatgttttctccaatgaggaagcagttgcagtagtaaaagaagttgaagatccggaagagtccaccaagaaacttgtgggagaagcaattaaaagaggaagtgcagacaatattacatgtgtagttgtacgtttcttggagagcaagtcagctaacaacaacggttccagctcatccgaggaagcaaatcaagtgccaaccgctgttagaaatgactcagaccacaagatctcagccaaagaaaccaatcaagaccataccacagtaaacaaggacttggaccgcaacactgacagtcaaagcctgaaccaaaagccgattgcagctagaagtgccgataactcgaaccaaaaaccaatcgcgactacagcaacaggacacagcgtttcttcagaacagagtggtttaaccggggaaaagagtcaaatgccaatcaaaattcgcagcgactcagagcctaagagttcagccaaggtacctaatcaaacgcaaagcacagtacacaacgacttggacagtagcactgcgaagaagccggccgcaacagaacagagcggatcaacgggtgaaaggaatcgaaaaccaatcaaagttcatagtgattccgccgcaagaaagacaactccctctatctttaactaa

SEQ ID NO: 80185 - protein, 447 aa, Arabidopsis thaliana
  peptide (1)..(447): Ceres Seq. ID no. 12654770
  misc_feature (32)..(272): Pfam Name: Protein phosphatase 2C Pfam Description: Protein phosphatase 2C
  misc_feature (1)..(447): Homolog of NCBI NO: 15238651 NR Description: Protein phosphatase 2C-like protein; protein id:
  misc_feature (1)..(341): Homolog of NCBI NO: 18416366 NR Description: protein phosphatase 2C -like protein; protein id:
  misc_feature (1)..(341): Homolog of NCBI NO: 11358728 NR Description: protein phosphatase 2C-like protein - Arabidopsis
  misc_feature (1)..(314): Homolog of NCBI NO: 20146110 NR Description: protein phosphatase 2C [Mesembryanthemum
  misc_feature (1)..(307): Homolog of NCBI NO: 30689144 NR Description: protein phosphatase 2C (PP2C), putative thaliana] >gi|19347765|gb|AAL86334.1| unknown protein thaliana] >gi|22136752|gb|AAM91695.1| unknown protein
  misc_feature (27)..(215): Homolog of NCBI NO: 7486331 NR Description: hypothetical protein F28M20.60 - Arabidopsis >gi|3281853|emb|CAA19748.1| putative protein [Arabidopsis >gi|7270078|emb|CAB79893.1| putative protein [Arabidopsis
  misc_feature (204)..(307): Homolog of NCBI NO: 7486331 NR Description: hypothetical protein F28M20.60 - Arabidopsis >gi|3281853|emb|CAA19748.1| putative protein [Arabidopsis >gi|7270078|emb|CAB79893.1| putative protein [Arabidopsis
  misc_feature (19)..(286): Homolog of NCBI NO: 38345197 NR Description: OSJNBa0015K02.7 [Oryza sativa (japonica
  misc_feature (240)..(447): Homolog of NCBI NO: 26451149 NR Description: putative Protein phosphatase 2C [Arabidopsis
  misc_feature (46)..(286): Homolog of NCBI NO: 19387276 NR Description: putative protein phosphatase 2C [Oryza sativa
MGYMDLALSYSNQMRIVEAPASGGGLSQNGKFSYGYASSAGKRSSMEDFFETRIDGIDGEIVGLFGVFDGHGGSRAAEYVKRHLFSNLITHPKFISDTKSAIADAYTHTDSELLKSENSHTRDAGSTASTAILVGDRLLVANVGDSRAVICRGGNAFAVSRDHKPDQSDERERIENAGGFVMWAGTWRVGGVLAVSRAFGDRLLKQYVVADPEIQEEKIDDSLEFLILASDGLWDVFSNEEAVAVVKEVEDPEESTKKLVGEAIKRGSADNITCVVVRFLESKSANNNGSSSSEEANQVPTAVRNDSDHKISAKETNQDHTTVNKDLDRNTDSQSLNQKPIAARSADNSNQKPIATTATGHSVSSEQSGLTGEKSQMPIKIRSDSEPKSSAKVPNQTQSTVHNDLDSSTAKKPAATEQSGSTGERNRKPIKVHSDSAARKTTPSIFN

SEQ ID NO: 80186 - protein, 444 aa, Arabidopsis thaliana
  peptide (1)..(444): Ceres Seq. ID no. 12654771
  misc_feature (29)..(269): Pfam Name: Protein phosphatase 2C Pfam Description: Protein phosphatase 2C
  misc_feature (1)..(444): Homolog of NCBI NO: 15238651 NR Description: Protein phosphatase 2C-like protein; protein id:
  misc_feature (1)..(338): Homolog of NCBI NO: 18416366 NR Description: protein phosphatase 2C -like protein; protein id:
  misc_feature (1)..(338): Homolog of NCBI NO: 11358728 NR Description: protein phosphatase 2C-like protein - Arabidopsis
  misc_feature (1)..(311): Homolog of NCBI NO: 20146110 NR Description: protein phosphatase 2C [Mesembryanthemum
  misc_feature (1)..(304): Homolog of NCBI NO: 30689144 NR Description: protein phosphatase 2C (PP2C), putative thaliana] >gi|19347765|gb|AAL86334.1| unknown protein thaliana] >gi|22136752|gb|AAM91695.1| unknown protein
  misc_feature (24)..(212): Homolog of NCBI NO: 7486331 NR Description: hypothetical protein F28M20.60 - Arabidopsis >gi|3281853|emb|CAA19748.1| putative protein [Arabidopsis >gi|7270078|emb|CAB79893.1| putative protein [Arabidopsis
  misc_feature (201)..(304): Homolog of NCBI NO: 7486331 NR Description: hypothetical protein F28M20.60 - Arabidopsis >gi|3281853|emb|CAA19748.1| putative protein [Arabidopsis >gi|7270078|emb|CAB79893.1| putative protein [Arabidopsis
  misc_feature (16)..(283): Homolog of NCBI NO: 38345197 NR Description: OSJNBa0015K02.7 [Oryza sativa (japonica
  misc_feature (237)..(444): Homolog of NCBI NO: 26451149 NR Description: putative Protein phosphatase 2C [Arabidopsis
  misc_feature (43)..(283): Homolog of NCBI NO: 19387276 NR Description: putative protein phosphatase 2C [Oryza sativa
MDLALSYSNQMRIVEAPASGGGLSQNGKFSYGYASSAGKRSSMEDFFETRIDGIDGEIVGLFGVFDGHGGSRAAEYVKRHLFSNLITHPKFISDTKSAIADAYTHTDSELLKSENSHTRDAGSTASTAILVGDRLLVANVGDSRAVICRGGNAFAVSRDHKPDQSDERERIENAGGFVMWAGTWRVGGVLAVSRAFGDRLLKQYVVADPEIQEEKIDDSLEFLILASDGLWDVFSNEEAVAVVKEVEDPEESTKKLVGEAIKRGSADNITCVVVRFLESKSANNNGSSSSEEANQVPTAVRNDSDHKISAKETNQDHTTVNKDLDRNTDSQSLNQKPIAARSADNSNQKPIATTATGHSVSSEQSGLTGEKSQMPIKIRSDSEPKSSAKVPNQTQSTVHNDLDSSTAKKPAATEQSGSTGERNRKPIKVHSDSAARKTTPSIFN

SEQ ID NO: 80187 - protein, 434 aa, Arabidopsis thaliana
  peptide (1)..(434): Ceres Seq. ID no. 12654772
  misc_feature (19)..(259): Pfam Name: Protein phosphatase 2C Pfam Description: Protein phosphatase 2C
  misc_feature (1)..(434): Homolog of NCBI NO: 15238651 NR Description: Protein phosphatase 2C-like protein; protein id:
  misc_feature (1)..(328): Homolog of NCBI NO: 18416366 NR Description: protein phosphatase 2C -like protein; protein id:
  misc_feature (1)..(328): Homolog of NCBI NO: 11358728 NR Description: protein phosphatase 2C-like protein - Arabidopsis
  misc_feature (1)..(301): Homolog of NCBI NO: 20146110 NR Description: protein phosphatase 2C [Mesembryanthemum
  misc_feature (1)..(294): Homolog of NCBI NO: 30689144 NR Description: protein phosphatase 2C (PP2C), putative thaliana] >gi|19347765|gb|AAL86334.1| unknown protein thaliana] >gi|22136752|gb|AAM91695.1| unknown protein
  misc_feature (14)..(202): Homolog of NCBI NO: 7486331 NR Description: hypothetical protein F28M20.60 - Arabidopsis >gi|3281853|emb|CAA19748.1| putative protein [Arabidopsis >gi|7270078|emb|CAB79893.1| putative protein [Arabidopsis
  misc_feature (191)..(294): Homolog of NCBI NO: 7486331 NR Description: hypothetical protein F28M20.60 - Arabidopsis >gi|3281853|emb|CAA19748.1| putative protein [Arabidopsis >gi|7270078|emb|CAB79893.1| putative protein [Arabidopsis
  misc_feature (6)..(273): Homolog of NCBI NO: 38345197 NR Description: OSJNBa0015K02.7 [Oryza sativa (japonica
  misc_feature (227)..(434): Homolog of NCBI NO: 26451149 NR Description: putative Protein phosphatase 2C [Arabidopsis
  misc_feature (33)..(273): Homolog of NCBI NO: 19387276 NR Description: putative protein phosphatase 2C [Oryza sativa
MRIVEAPASGGGLSQNGKFSYGYASSAGKRSSMEDFFETRIDGIDGEIVGLFGVFDGHGGSRAAEYVKRHLFSNLITHPKFISDTKSAIADAYTHTDSELLKSENSHTRDAGSTASTAILVGDRLLVANVGDSRAVICRGGNAFAVSRDHKPDQSDERERIENAGGFVMWAGTWRVGGVLAVSRAFGDRLLKQYVVADPEIQEEKIDDSLEFLILASDGLWDVFSNEEAVAVVKEVEDPEESTKKLVGEAIKRGSADNITCVVVRFLESKSANNNGSSSSEEANQVPTAVRNDSDHKISAKETNQDHTTVNKDLDRNTDSQSLNQKPIAARSADNSNQKPIATTATGHSVSSEQSGLTGEKSQMPIKIRSDSEPKSSAKVPNQTQSTVHNDLDSSTAKKPAATEQSGSTGERNRKPIKVHSDSAARKTTPSIFN

SEQ ID NO: 80188 - DNA, 1491 bp, Arabidopsis thaliana
  misc_feature (1)..(1491): Ceres Seq. ID no. 12654773
  misc_feature: MA Experiment ID: 20000437 Result: Up-regulated in Transcription
  misc_feature: MA Experiment 20000437 PARAMETER Experiment Name: At_Drought_P Parameter: Age (day) Value: 8
  misc_feature: MA Experiment 20000437 PARAMETER Experiment Name: At_Drought_P Parameter: Organism Value: A. thaliana
  misc_feature: MA Experiment 20000437 PARAMETER Experiment Name: At_Drought_P Parameter: Plant Line Value: WS
  misc_feature: MA Experiment 20000437 PARAMETER Experiment Name: At_Drought_P Parameter: Timepoint (hr) Value: 24
  misc_feature: MA Experiment 20000437 PARAMETER Experiment Name: At_Drought_P Parameter: Tissue Value: Whole Plant
  misc_feature: MA Experiment 20000437 PARAMETER Experiment Name: At_Drought_P Parameter: Treatment Value: Drought vs. No Drought
  misc_feature: MA Experiment ID: 20000451 Result: Down-regulated in Transcription
  misc_feature: MA Experiment 20000451 PARAMETER Experiment Name: At_CS6879_Shoots-Roots_P Parameter: Age (day) Value: 14
  misc_feature: MA Experiment 20000451 PARAMETER Experiment Name: At_CS6879_Shoots-Roots_P Parameter: Organism Value: A. thaliana
  misc_feature: MA Experiment 20000451 PARAMETER Experiment Name: At_CS6879_Shoots-Roots_P Parameter: Plant Line Value: CS6879 vs. WS
  misc_feature: MA Experiment 20000451 PARAMETER Experiment Name: At_CS6879_Shoots-Roots_P Parameter: Tissue Value: Roots
  misc_feature: MA Experiment ID: 20001459 Result: Down-regulated in Transcription
  misc_feature: MA Experiment 20001459 PARAMETER Experiment Name: At_50mM_NH4NO3_L-to-H_P Parameter: Age (day) Value: Undefined
  misc_feature: MA Experiment 20001459 PARAMETER Experiment Name: At_50mM_NH4NO3_L-to-H_P Parameter: Organism Value: Undefined
  misc_feature: MA Experiment 20001459 PARAMETER Experiment Name: At_50mM_NH4NO3_L-to-H_P Parameter: Plant Line Value: Undefined
  misc_feature: MA Experiment 20001459 PARAMETER Experiment Name: At_50mM_NH4NO3_L-to-H_P Parameter: Timepoint (hr) Value: 4
  misc_feature: MA Experiment 20001459 PARAMETER Experiment Name: At_50mM_NH4NO3_L-to-H_P Parameter: Tissue Value: Siliques
  misc_feature: MA Experiment 20001459 PARAMETER Experiment Name: At_50mM_NH4NO3_L-to-H_P Parameter: Treatment Value: 50mM NH4NO3 vs. 100mM Manitol
atggaaatcataatcatctctctctgcctagcaacaatcctagcctttcttctcctaaaaccacttctgaatcgaaccgttgccaaagacaacctaccaccgtctccgtggcgagttccggtaatcggaaacctccaccagctaagcctccaccctcaccgctcccttcgttccctcagccaccgctacgggccactcatgctccttcattttggccgtgtcccgatcctcgtagtctcttcctctgacgtagctcatgacctcatgaaaacacacgaccttaaggttgcgaaccgcccgcgattaaaagtgattgaaacaatcctcaacggtgggagagaagtggttttttccccttacggagactattggaggcagattaagactgtatgcgtcgtccatctactcaataagaaaatggtacaatcctttgcaaaagtaagagaagaagagagaagtgtaatgatggagaaggtcgagaaagcaagttccgattcttcaccactaaatctaagcaagcttcttataacacttacaagcgatgtggcaagtagagtttcttttgggaaaaaacatagcaacgaggcaagcatgagcgatttcaagaatcaagtgagaaaaatcactgagctggtaggcggatttccggttagcgaatatatcccgtgtttggcgtggatagatcaaattcgtggtctgtataatagagcggaggaagtgagtaaaatttttggagatcttatggataaagtggtgcaagagcatttagatgctacaaataaaccaacaaaggatttcgtcgatatattgttgtcctttgaaagacagagtaaagatggaatagaagttcgacgaagcgacattaagttcataatcttggatatatttttaggaggaacgacaacaactaactcactactagaatggacaatgacggagcttattagacatccggaatgcatgaagaaactccaagacgagattcgcggcgatgcgacaaaccttactatatatagatcacatgaagaagttgaagatatgaagtacttaaaagcggttattaaggagggtcttcggttacatcccccttttccattactagtactaagactattgactcaagatgtcaaattaaaaggatatgacatagctgcaggcacacaggtaataaccaatgcttgggctattcaaagagacattgtgacatgggggatagatgcagaagaatttaggccagagagacacttagattcacctctggactttcgaggaacaaatttcgaatacattccatttggatctggaagaaggatttgtcctggaattggatttgctatggctttggttgaggtgacactagccaaccttgtgaaccgatttaactggagaatggatgctcggctttcgggggatgaatatgatctagctgaagcaacgggaatcgatgtttgccgcaaatttcctcttattgtatttccatctaatgcctaa

SEQ ID NO: 80189 - protein, 496 aa, Arabidopsis thaliana
  peptide (1)..(496): Ceres Seq. ID no. 12654774
  misc_feature (1)..(496): Homolog of NCBI NO: 15238652 NR Description: cytochrome p450 family; protein id: At5g24950.1
  misc_feature (1)..(496): Homolog of NCBI NO: 15238664 NR Description: cytochrome P450-like protein; protein id: [Arabidopsis thaliana] >gi|13878366|sp|P58045|C71E_ARATH
  misc_feature (1)..(495): Homolog of NCBI NO: 15224570 NR Description: cytochrome p450 family; protein id: At2g30770.1
  misc_feature (1)..(495): Homolog of NCBI NO: 22329490 NR Description: cytochrome P450, putative; protein id: [Arabidopsis thaliana] >gi|13878394|sp|Q9SAB6|C71I_ARATH
  misc_feature (1)..(495): Homolog of NCBI NO: 13878362 NR Description: Cytochrome P450 71A12 >gi|25282591|pir||C84712
  misc_feature (1)..(495): Homolog of NCBI NO: 30684709 NR Description: cytochrome p450 71A12 [Arabidopsis thaliana] At2g30750/T11J7.14 [Arabidopsis thaliana]
  misc_feature (3)..(496): Homolog of NCBI NO: 13878406 NR Description: Cytochrome P450 71A20 >gi|7430641|pir||T06288
  misc_feature (1)..(496): Homolog of NCBI NO: 15239008 NR Description: cytochrome p450, putative; protein id: [Arabidopsis thaliana] >gi|13878374|sp|Q9FH66|C71G_ARATH P450 71A16 >gi|9759017|dbj|BAB09330.1| cytochrome P450
  misc_feature (79)..(495): Homolog of NCBI NO: 25282567 NR Description: hypothetical protein [imported] - Arabidopsis >gi|4835796|gb|AAD30262.1|AC007296_23 Strong similarity to T11J7.14 putative cytochrome P450 from Arabidopsis thaliana and
  misc_feature (1)..(60): Homolog of NCBI NO: 25282567 NR Description: hypothetical protein [imported] - Arabidopsis >gi|4835796|gb|AAD30262.1|AC007296_23 Strong similarity to T11J7.14 putative cytochrome P450 from Arabidopsis thaliana and
MEIIIISLCLATILAFLLLKPLLNRTVAKDNLPPSPWRVPVIGNLHQLSLHPHRSLRSLSHRYGPLMLLHFGRVPILVVSSSDVAHDLMKTHDLKVANRPRLKVIETILNGGREVVFSPYGDYWRQIKTVCVVHLLNKKMVQSFAKVREEERSVMMEKVEKASSDSSPLNLSKLLITLTSDVASRVSFGKKHSNEASMSDFKNQVRKITELVGGFPVSEYIPCLAWIDQIRGLYNRAEEVSKIFGDLMDKVVQEHLDATNKPTKDFVDILLSFERQSKDGIEVRRSDIKFIILDIFLGGTTTTNSLLEWTMTELIRHPECMKKLQDEIRGDATNLTIYRSHEEVEDMKYLKAVIKEGLRLHPPFPLLVLRLLTQDVKLKGYDIAAGTQVITNAWAIQRDIVTWGIDAEEFRPERHLDSPLDFRGTNFEYIPFGSGRRICPGIGFAMALVEVTLANLVNRFNWRMDARLSGDEYDLAEATGIDVCRKFPLIVFPSNA

SEQ ID NO: 80190 - protein, 430 aa, Arabidopsis thaliana
  peptide (1)..(430): Ceres Seq. ID no. 12654775
  misc_feature (1)..(430): Homolog of NCBI NO: 15238652 NR Description: cytochrome p450 family; protein id: At5g24950.1
  misc_feature (1)..(430): Homolog of NCBI NO: 15238664 NR Description: cytochrome P450-like protein; protein id: [Arabidopsis thaliana] >gi|13878366|sp|P58045|C71E_ARATH
  misc_feature (1)..(429): Homolog of NCBI NO: 15224570 NR Description: cytochrome p450 family; protein id: At2g30770.1
  misc_feature (1)..(429): Homolog of NCBI NO: 22329490 NR Description: cytochrome P450, putative; protein id: [Arabidopsis thaliana] >gi|13878394|sp|Q9SAB6|C71I_ARATH
  misc_feature (1)..(429): Homolog of NCBI NO: 13878362 NR Description: Cytochrome P450 71A12 >gi|25282591|pir||C84712
  misc_feature (1)..(429): Homolog of NCBI NO: 30684709 NR Description: cytochrome p450 71A12 [Arabidopsis thaliana] At2g30750/T11J7.14 [Arabidopsis thaliana]
  misc_feature (1)..(430): Homolog of NCBI NO: 13878406 NR Description: Cytochrome P450 71A20 >gi|7430641|pir||T06288
  misc_feature (1)..(430): Homolog of NCBI NO: 15239008 NR Description: cytochrome p450, putative; protein id: [Arabidopsis thaliana] >gi|13878374|sp|Q9FH66|C71G_ARATH P450 71A16 >gi|9759017|dbj|BAB09330.1| cytochrome P450
  misc_feature (13)..(429): Homolog of NCBI NO: 25282567 NR Description: hypothetical protein [imported] - Arabidopsis >gi|4835796|gb|AAD30262.1|AC007296_23 Strong similarity to T11J7.14 putative cytochrome P450 from Arabidopsis thaliana and
  misc_feature (1)..(430): Homolog of NCBI NO: 15235661 NR Description: cytochrome p450 family; protein id: At4g13290.1
MLLHFGRVPILVVSSSDVAHDLMKTHDLKVANRPRLKVIETILNGGREVVFSPYGDYWRQIKTVCVVHLLNKKMVQSFAKVREEERSVMMEKVEKASSDSSPLNLSKLLITLTSDVASRVSFGKKHSNEASMSDFKNQVRKITELVGGFPVSEYIPCLAWIDQIRGLYNRAEEVSKIFGDLMDKVVQEHLDATNKPTKDFVDILLSFERQSKDGIEVRRSDIKFIILDIFLGGTTTTNSLLEWTMTELIRHPECMKKLQDEIRGDATNLTIYRSHEEVEDMKYLKAVIKEGLRLHPPFPLLVLRLLTQDVKLKGYDIAAGTQVITNAWAIQRDIVTWGIDAEEFRPERHLDSPLDFRGTNFEYIPFGSGRRICPGIGFAMALVEVTLANLVNRFNWRMDARLSGDEYDLAEATGIDVCRKFPLIVFPSNA

SEQ ID NO: 80191 - protein, 408 aa, Arabidopsis thaliana
  peptide (1)..(408): Ceres Seq. ID no. 12654776
  misc_feature (1)..(408): Homolog of NCBI NO: 15238652 NR Description: cytochrome p450 family; protein id: At5g24950.1
  misc_feature (1)..(408): Homolog of NCBI NO: 15238664 NR Description: cytochrome P450-like protein; protein id: [Arabidopsis thaliana] >gi|13878366|sp|P58045|C71E_ARATH
  misc_feature (1)..(407): Homolog of NCBI NO: 15224570 NR Description: cytochrome p450 family; protein id: At2g30770.1
  misc_feature (1)..(407): Homolog of NCBI NO: 22329490 NR Description: cytochrome P450, putative; protein id: [Arabidopsis thaliana] >gi|13878394|sp|Q9SAB6|C71I_ARATH
  misc_feature (1)..(407): Homolog of NCBI NO: 13878362 NR Description: Cytochrome P450 71A12 >gi|25282591|pir||C84712
  misc_feature (1)..(407): Homolog of NCBI NO: 30684709 NR Description: cytochrome p450 71A12 [Arabidopsis thaliana] At2g30750/T11J7.14 [Arabidopsis thaliana]
  misc_feature (1)..(408): Homolog of NCBI NO: 13878406 NR Description: Cytochrome P450 71A20 >gi|7430641|pir||T06288
  misc_feature (1)..(408): Homolog of NCBI NO: 15239008 NR Description: cytochrome p450, putative; protein id: [Arabidopsis thaliana] >gi|13878374|sp|Q9FH66|C71G_ARATH P450 71A16 >gi|9759017|dbj|BAB09330.1| cytochrome P450
  misc_feature (1)..(407): Homolog of NCBI NO: 25282567 NR Description: hypothetical protein [imported] - Arabidopsis >gi|4835796|gb|AAD30262.1|AC007296_23 Strong similarity to T11J7.14 putative cytochrome P450 from Arabidopsis thaliana and
  misc_feature (1)..(408): Homolog of NCBI NO: 15235661 NR Description: cytochrome p450 family; protein id: At4g13290.1
MKTHDLKVANRPRLKVIETILNGGREVVFSPYGDYWRQIKTVCVVHLLNKKMVQSFAKVREEERSVMMEKVEKASSDSSPLNLSKLLITLTSDVASRVSFGKKHSNEASMSDFKNQVRKITELVGGFPVSEYIPCLAWIDQIRGLYNRAEEVSKIFGDLMDKVVQEHLDATNKPTKDFVDILLSFERQSKDGIEVRRSDIKFIILDIFLGGTTTTNSLLEWTMTELIRHPECMKKLQDEIRGDATNLTIYRSHEEVEDMKYLKAVIKEGLRLHPPFPLLVLRLLTQDVKLKGYDIAAGTQVITNAWAIQRDIVTWGIDAEEFRPERHLDSPLDFRGTNFEYIPFGSGRRICPGIGFAMALVEVTLANLVNRFNWRMDARLSGDEYDLAEATGIDVCRKFPLIVFPSNA

SEQ ID NO: 80192 - DNA, 1153 bp, Arabidopsis thaliana
  misc_feature (1)..(1153): Ceres Seq. ID no. 12654784
  misc_feature: MA Experiment ID: 20000234 Result: Up-regulated in Transcription
  misc_feature: MA Experiment 20000234 PARAMETER Experiment Name: At_Siliques_P Parameter: Age (day) Value: 21
  misc_feature: MA Experiment 20000234 PARAMETER Experiment Name: At_Siliques_P Parameter: Organism Value: A. thaliana
  misc_feature: MA Experiment 20000234 PARAMETER Experiment Name: At_Siliques_P Parameter: Plant Line Value: WS
  misc_feature: MA Experiment 20000234 PARAMETER Experiment Name: At_Siliques_P Parameter: Tissue Value: Less Than 5mm Siliques vs. Whole Plant
  misc_feature: MA Experiment ID: 20000573 Result: Down-regulated in Transcription
  misc_feature: MA Experiment 20000573 PARAMETER Experiment Name: At_100uM_ABA_Mutants__P Parameter: Organism Value: A. thaliana
  misc_feature: MA Experiment 20000573 PARAMETER Experiment Name: At_100uM_ABA_Mutants__P Parameter: Plant Line Value: CS22 vs. Ler wt
  misc_feature: MA Experiment 20000573 PARAMETER Experiment Name: At_100uM_ABA_Mutants__P Parameter: Timepoint (hr) Value: N/A
  misc_feature: MA Experiment 20000573 PARAMETER Experiment Name: At_100uM_ABA_Mutants__P Parameter: Tissue Value: Whole Plant
  misc_feature: MA Experiment 20000573 PARAMETER Experiment Name: At_100uM_ABA_Mutants__P Parameter: Treatment Value: None
  misc_feature: MA Experiment ID: 20000574 Result: Down-regulated in Transcription
  misc_feature: MA Experiment 20000574 PARAMETER Experiment Name: At_100uM_ABA_Mutants__P Parameter: Organism Value: A. thaliana
  misc_feature: MA Experiment 20000574 PARAMETER Experiment Name: At_100uM_ABA_Mutants__P Parameter: Plant Line Value: CS23 vs. Ler wt
  misc_feature: MA Experiment 20000574 PARAMETER Experiment Name: At_100uM_ABA_Mutants__P Parameter: Timepoint (hr) Value: N/A
  misc_feature: MA Experiment 20000574 PARAMETER Experiment Name: At_100uM_ABA_Mutants__P Parameter: Tissue Value: Whole Plant
  misc_feature: MA Experiment 20000574 PARAMETER Experiment Name: At_100uM_ABA_Mutants__P Parameter: Treatment Value: None
  misc_feature: MA Experiment ID: 20001248 Result: Down-regulated in Transcription
  misc_feature: MA Experiment 20001248 PARAMETER Experiment Name: At_Far-red-induction_P Parameter: Age (day) Value: 7
  misc_feature: MA Experiment 20001248 PARAMETER Experiment Name: At_Far-red-induction_P Parameter: Light Value: Far-red vs. White
  misc_feature: MA Experiment 20001248 PARAMETER Experiment Name: At_Far-red-induction_P Parameter: Organism Value: A. thaliana
  misc_feature: MA Experiment 20001248 PARAMETER Experiment Name: At_Far-red-induction_P Parameter: Plant Line Value: Columbia
  misc_feature: MA Experiment 20001248 PARAMETER Experiment Name: At_Far-red-induction_P Parameter: Timepoint (hr) Value: 4
  misc_feature: MA Experiment 20001248 PARAMETER Experiment Name: At_Far-red-induction_P Parameter: Tissue Value: Whole Plant
actcgaaaatagagagtcaaccacagagagagatatcaacaaatcacacacgccatgaaccaaaccaaaactaccaccgacgataacaaaaactccaaaccggccgaaaccgaatcaaccatcaccgtaccggaatggataaccgaaacaatcaacggtggctccttctgccacgtagatctcgagaccggaaccaacggctgggcttcaccaccaggcaacgtgttctctctccgctcacataactacttcaccgccacaaaacaaaaatctcccggcggcgattacctcctctctctcgccgccgtagactggctcaaatccaccacaaagaaactcgatcacatcctctctcgtcccgataaccgtgtaatccacgctttcaaaacatcccaatctcgtagcttcatcttcgccgttaatttccaggtcccagggaaagaacactacaacttggtcttctacttcgcaacacaaaaaccaatcccttccgattcactcctccacaaattcatcaatacagacgaagattcgtttcgcaacgagagattcaaaatcgttagcaatgttgtgaaaggtccttgggttgttaaagcagcagctgggaaatttggtgcatttgttgctgggaaggctatgaagtgtacttattatagaggagataattattttgaggttgatgttgatataagtagctcggcgattatgacggcgcttattaggtttatgttggggtatgttacgtatttaatggttgatattggttttgttgtggaagcgcaaacggcggaggagttgccggagagattgattggtggtgctaggatttgtcatatggagttgtcctcgtcgtttttggttgatgatgacgagaagaagagtttacagccacggcggagaatgatgggtgcggcggaagataacgacgatgagatttgagatttgagtgaaagaaaagcaggctacgtcaaaaaaaataaaaataggtcaaggtttttttttttttttttcatctaaaattaattaaatctcaaaagagtcattcctgaggaaggttgtttacgtaagtgatatggttggacatgaactttacgcggtaaattatccgctttaacatttgcactataagaaattaaagataaagaaaaacttg

SEQ ID NO: 80193 - protein, 294 aa, Arabidopsis thaliana
  peptide (1)..(294): Ceres Seq. ID no. 12654785
  misc_feature (1)..(294): Homolog of NCBI NO: 15238672 NR Description: putative protein; protein id: At5g24990.1, by cDNA: gi_15028368, supported by cDNA: gi_19310654 [Arabidopsis >gi|15028369|gb|AAK76661.1| unknown protein [Arabidopsis
  misc_feature (1)..(136): Homolog of NCBI NO: 15238675 NR Description: putative protein; protein id: At5g25020.1
  misc_feature (163)..(293): Homolog of NCBI NO: 15238675 NR Description: putative protein; protein id: At5g25020.1
  misc_feature (1)..(294): Homolog of NCBI NO: 15238674 NR Description: putative protein; protein id: At5g25010.1
  misc_feature (5)..(293): Homolog of NCBI NO: 15238248 NR Description: putative protein; protein id: At5g10750.1, by cDNA: 2344. [Arabidopsis thaliana] >gi|11358294|pir||T50784
  misc_feature (5)..(293): Homolog of NCBI NO: 22655107 NR Description: putative protein [Arabidopsis thaliana]
  misc_feature (5)..(293): Homolog of NCBI NO: 21592409 NR Description: unknown [Arabidopsis thaliana]
  misc_feature (1)..(135): Homolog of NCBI NO: 26451716 NR Description: unknown protein [Arabidopsis thaliana]
  misc_feature (24)..(270): Homolog of NCBI NO: 18390605 NR Description: expressed protein; protein id: At1g06050.1,
  misc_feature (24)..(270): Homolog of NCBI NO: 25406892 NR Description: hypothetical protein [imported] - Arabidopsis >gi|8810466|gb|AAF80127.1|AC024174_9 Contains similarity to an protein T1B3.16 gi|4432844 from Arabidopsis thaliana BAC from
MNQTKTTTDDNKNSKPAETESTITVPEWITETINGGSFCHVDLETGTNGWASPPGNVFSLRSHNYFTATKQKSPGGDYLLSLAAVDWLKSTTKKLDHILSRPDNRVIHAFKTSQSRSFIFAVNFQVPGKEHYNLVFYFATQKPIPSDSLLHKFINTDEDSFRNERFKIVSNVVKGPWVVKAAAGKFGAFVAGKAMKCTYYRGDNYFEVDVDISSSAIMTALIRFMLGYVTYLMVDIGFVVEAQTAEELPERLIGGARICHMELSSSFLVDDDEKKSLQPRRRMMGAAEDNDDEI

SEQ ID NO: 80194 - DNA, 1704 bp, Arabidopsis thaliana
  misc_feature (1)..(1704): Ceres Seq. ID no. 12654811
  misc_feature: MA Experiment ID: 20000166 Result: Up-regulated in Transcription
  misc_feature: MA Experiment 20000166 PARAMETER Experiment Name: At_100uM_ABA_P Parameter: Age (day) Value: 14
  misc_feature: MA Experiment 20000166 PARAMETER Experiment Name: At_100uM_ABA_P Parameter: Organism Value: A. thaliana
  misc_feature: MA Experiment 20000166 PARAMETER Experiment Name: At_100uM_ABA_P Parameter: Plant Line Value: WS
  misc_feature: MA Experiment 20000166 PARAMETER Experiment Name: At_100uM_ABA_P Parameter: Timepoint (hr) Value: 1
  misc_feature: MA Experiment 20000166 PARAMETER Experiment Name: At_100uM_ABA_P Parameter: Tissue Value: Aerial
  misc_feature: MA Experiment 20000166 PARAMETER Experiment Name: At_100uM_ABA_P Parameter: Treatment Value: 100uM ABA vs. No Treatment
  misc_feature: MA Experiment ID: 20000184 Result: Down-regulated in Transcription
  misc_feature: MA Experiment 20000184 PARAMETER Experiment Name: At_Shoots__P Parameter: Age (day) Value: 7
  misc_feature: MA Experiment 20000184 PARAMETER Experiment Name: At_Shoots__P Parameter: Tissue Value: Shoots vs. Whole Plant
  misc_feature: MA Experiment ID: 20000227 Result: Down-regulated in Transcription
  misc_feature: MA Experiment 20000227 PARAMETER Experiment Name: At_Root-Tips-vs-Tops_P Parameter: Tissue Value: Root Tips vs. Root Tops
  misc_feature: MA Experiment ID: 20000264 Result: Up-regulated in Transcription
  misc_feature: MA Experiment 20000264 PARAMETER Experiment Name: At_Open_Flower_P Parameter: Age (day) Value: 21
  misc_feature: MA Experiment 20000264 PARAMETER Experiment Name: At_Open_Flower_P Parameter: Plant Line Value: WS
  misc_feature: MA Experiment 20000264 PARAMETER Experiment Name: At_Open_Flower_P Parameter: Tissue Value: Open Flower vs. Whole Plant
  misc_feature: MA Experiment ID: 20000267 Result: Up-regulated in Transcription
  misc_feature: MA Experiment 20000267 PARAMETER Experiment Name: At_Drought_P Parameter: Age (day) Value: 7
  misc_feature: MA Experiment 20000267 PARAMETER Experiment Name: At_Drought_P Parameter: Organism Value: A. thaliana
  misc_feature: MA Experiment 20000267 PARAMETER Experiment Name: At_Drought_P Parameter: Plant Line Value: WS
  misc_feature: MA Experiment 20000267 PARAMETER Experiment Name: At_Drought_P Parameter: Timepoint (hr) Value: 6
  misc_feature: MA Experiment 20000267 PARAMETER Experiment Name: At_Drought_P Parameter: Tissue Value: Whole Plant
  misc_feature: MA Experiment 20000267 PARAMETER Experiment Name: At_Drought_P Parameter: Treatment Value: Drought vs. No Drought
  misc_feature: MA Experiment ID: 20000268 Result: Up-regulated in Transcription
  misc_feature: MA Experiment 20000268 PARAMETER Experiment Name: At_100mM_NaCl__P Parameter: Age (day) Value: 14
  misc_feature: MA Experiment 20000268 PARAMETER Experiment Name: At_100mM_NaCl__P Parameter: Organism Value: A. thaliana
  misc_feature: MA Experiment 20000268 PARAMETER Experiment Name: At_100mM_NaCl__P Parameter: Plant Line Value: WS
  misc_feature: MA Experiment 20000268 PARAMETER Experiment Name: At_100mM_NaCl__P Parameter: Timepoint (hr) Value: 6
  misc_feature: MA Experiment 20000268 PARAMETER Experiment Name: At_100mM_NaCl__P Parameter: Tissue Value: Whole Plant
  misc_feature: MA Experiment 20000268 PARAMETER Experiment Name: At_100mM_NaCl__P Parameter: Treatment Value: 100mM NaCl vs. No Treatment
  misc_feature: MA Experiment ID: 20000286 Result: Up-regulated in Transcription
  misc_feature: MA Experiment 20000286 PARAMETER Experiment Name: At_Open_Flower_P Parameter: Age (day) Value: 21
  misc_feature: MA Experiment 20000286 PARAMETER Experiment Name: At_Open_Flower_P Parameter: Plant Line Value: WS
  misc_feature: MA Experiment 20000286 PARAMETER Experiment Name: At_Open_Flower_P Parameter: Tissue Value: Half Open vs. Whole Plant
  misc_feature: MA Experiment ID: 20000436 Result: Up-regulated in Transcription
  misc_feature: MA Experiment 20000436 PARAMETER Experiment Name: At_Drought_P Parameter: Age (day) Value: 7
  misc_feature: MA Experiment 20000436 PARAMETER Experiment Name: At_Drought_P Parameter: Organism Value: A. thaliana
  misc_feature: MA Experiment 20000436 PARAMETER Experiment Name: At_Drought_P Parameter: Plant Line Value: WS
  misc_feature: MA Experiment 20000436 PARAMETER Experiment Name: At_Drought_P Parameter: Timepoint (hr) Value: 12
  misc_feature: MA Experiment 20000436 PARAMETER Experiment Name: At_Drought_P Parameter: Tissue Value: Whole Plant
  misc_feature: MA Experiment 20000436 PARAMETER Experiment Name: At_Drought_P Parameter: Treatment Value: Drought vs. No Drought
  misc_feature: MA Experiment ID: 20000437 Result: Up-regulated in Transcription
  misc_feature: MA Experiment 20000437 PARAMETER Experiment Name: At_Drought_P Parameter: Age (day) Value: 8
  misc_feature: MA Experiment 20000437 PARAMETER Experiment Name: At_Drought_P Parameter: Organism Value: A. thaliana
  misc_feature: MA Experiment 20000437 PARAMETER Experiment Name: At_Drought_P Parameter: Plant Line Value: WS
  misc_feature: MA Experiment 20000437 PARAMETER Experiment Name: At_Drought_P Parameter: Timepoint (hr) Value: 24
  misc_feature: MA Experiment 20000437 PARAMETER Experiment Name: At_Drought_P Parameter: Tissue Value: Whole Plant
  misc_feature: MA Experiment 20000437 PARAMETER Experiment Name: At_Drought_P Parameter: Treatment Value: Drought vs. No Drought
  misc_feature: MA Experiment ID: 20000439 Result: Up-regulated in Transcription
  misc_feature: MA Experiment 20000439 PARAMETER Experiment Name: At_Roots__P Parameter: Age (day) Value: 14 vs. 21
  misc_feature: MA Experiment 20000439 PARAMETER Experiment Name: At_Roots__P Parameter: Organism Value: A. thaliana
  misc_feature: MA Experiment 20000439 PARAMETER Experiment Name: At_Roots__P Parameter: Tissue Value: Roots vs. Whole Plant
  misc_feature: MA Experiment ID: 20000453 Result: Up-regulated in Transcription
  misc_feature: MA Experiment 20000453 PARAMETER Experiment Name: At_100uM_ABA_P Parameter: Age (day) Value: 15
  misc_feature: MA Experiment 20000453 PARAMETER Experiment Name: At_100uM_ABA_P Parameter: Organism Value: A. thaliana
  misc_feature: MA Experiment 20000453 PARAMETER Experiment Name: At_100uM_ABA_P Parameter: Plant Line Value: WS
  misc_feature: MA Experiment 20000453 PARAMETER Experiment Name: At_100uM_ABA_P Parameter: Timepoint (hr) Value: 24
  misc_feature: MA Experiment 20000453 PARAMETER Experiment Name: At_100uM_ABA_P Parameter: Tissue Value: Aerial
  misc_feature: MA Experiment 20000453 PARAMETER Experiment Name: At_100uM_ABA_P Parameter: Treatment Value: 100uM ABA vs. No Treatment
  misc_feature: MA Experiment ID: 20000506 Result: Up-regulated in Transcription
  misc_feature: MA Experiment 20000506 PARAMETER Experiment Name: At_Wounding_P Parameter: Organism Value: A. thaliana
  misc_feature: MA Experiment 20000506 PARAMETER Experiment Name: At_Wounding_P Parameter: Plant Line Value: WS
  misc_feature: MA Experiment 20000506 PARAMETER Experiment Name: At_Wounding_P Parameter: Timepoint (hr) Value: 6
  misc_feature: MA Experiment 20000506 PARAMETER Experiment Name: At_Wounding_P Parameter: Tissue Value: Aerial
  misc_feature: MA Experiment 20000506 PARAMETER Experiment Name: At_Wounding_P Parameter: Treatment Value: Wounding vs. No Wounding
  misc_feature: MA Experiment ID: 20000573 Result: Down-regulated in Transcription
  misc_feature: MA Experiment 20000573 PARAMETER Experiment Name: At_100uM_ABA_Mutants__P Parameter: Organism Value: A. thaliana
  misc_feature: MA Experiment 20000573 PARAMETER Experiment Name: At_100uM_ABA_Mutants__P Parameter: Plant Line Value: CS22 vs. Ler wt
  misc_feature: MA Experiment 20000573 PARAMETER Experiment Name: At_100uM_ABA_Mutants__P Parameter: Timepoint (hr) Value: N/A
  misc_feature: MA Experiment 20000573 PARAMETER Experiment Name: At_100uM_ABA_Mutants__P Parameter: Tissue Value: Whole Plant
  misc_feature: MA Experiment 20000573 PARAMETER Experiment Name: At_100uM_ABA_Mutants__P Parameter: Treatment Value: None
  misc_feature: MA Experiment ID: 20000576 Result: Up-regulated in Transcription
  misc_feature: MA Experiment 20000576 PARAMETER Experiment Name: At_100uM_ABA_Mutants__P Parameter: Organism Value: A. thaliana
  misc_feature: MA Experiment 20000576 PARAMETER Experiment Name: At_100uM_ABA_Mutants__P Parameter: Plant Line Value: CS23
  misc_feature: MA Experiment 20000576 PARAMETER Experiment Name: At_100uM_ABA_Mutants__P Parameter: Timepoint (hr) Value: 6
  misc_feature: MA Experiment 20000576 PARAMETER Experiment Name: At_100uM_ABA_Mutants__P Parameter: Tissue Value: Whole Plant
  misc_feature: MA Experiment 20000576 PARAMETER Experiment Name: At_100uM_ABA_Mutants__P Parameter: Treatment Value: 1uM ABA vs. No Treatment
  misc_feature: MA Experiment ID: 20000709 Result: Down-regulated in Transcription
  misc_feature: MA Experiment 20000709 PARAMETER Experiment Name: At_15mM_NH4NO3_L-to-H_P Parameter: Age (hr) Value: 14
  misc_feature: MA Experiment 20000709 PARAMETER Experiment Name: At_15mM_NH4NO3_L-to-H_P Parameter: Organism Value: A. thaliana
  misc_feature: MA Experiment 20000709 PARAMETER Experiment Name: At_15mM_NH4NO3_L-to-H_P Parameter: Plant Line Value: WS
  misc_feature: MA Experiment 20000709 PARAMETER Experiment Name: At_15mM_NH4NO3_L-to-H_P Parameter: Timepoint (hr) Value: 4
  misc_feature: MA Experiment 20000709 PARAMETER Experiment Name: At_15mM_NH4NO3_L-to-H_P Parameter: Tissue Value: Aerial
  misc_feature: MA Experiment 20000709 PARAMETER Experiment Name: At_15mM_NH4NO3_L-to-H_P Parameter: Treatment Value: 15mM NH4NO3 vs. 30mM Mannitol
  misc_feature: MA Experiment ID: 20000794 Result: Up-regulated in Transcription
  misc_feature: MA Experiment 20000794 PARAMETER Experiment Name: At_Petals_P Parameter: Age (day) Value: 23-25 days
  misc_feature: MA Experiment 20000794 PARAMETER Experiment Name: At_Petals_P Parameter: Plant Line Value: WS
  misc_feature: MA Experiment 20000794 PARAMETER Experiment Name: At_Petals_P Parameter: Tissue Value: Petals vs. Whole plant
  misc_feature: MA Experiment ID: 20001554 Result: Up-regulated in Transcription
  misc_feature: MA Experiment 20001554 PARAMETER Experiment Name: At_Drought_Soil_Dry_P Parameter: Age (day) Value: 21
  misc_feature: MA Experiment 20001554 PARAMETER Experiment Name: At_Drought_Soil_Dry_P Parameter: Organism Value: A. thaliana
  misc_feature: MA Experiment 20001554 PARAMETER Experiment Name: At_Drought_Soil_Dry_P Parameter: Plant Line Value: WS
  misc_feature: MA Experiment 20001554 PARAMETER Experiment Name: At_Drought_Soil_Dry_P Parameter: Post Timepoint (hr) Value: None
  misc_feature: MA Experiment 20001554 PARAMETER Experiment Name: At_Drought_Soil_Dry_P Parameter: Post-Treatment Value: None
  misc_feature: MA Experiment 20001554 PARAMETER Experiment Name: At_Drought_Soil_Dry_P Parameter: Timepoint (day) Value: 7
  misc_feature: MA Experiment 20001554 PARAMETER Experiment Name: At_Drought_Soil_Dry_P Parameter: Treatment Value: Drought vs. No Drought
  misc_feature: MA Experiment ID: 20001555 Result: Up-regulated in Transcription
  misc_feature: MA Experiment 20001555 PARAMETER Experiment Name: At_Drought_Soil_Dry_P Parameter: Age (day) Value: 24
  misc_feature: MA Experiment 20001555 PARAMETER Experiment Name: At_Drought_Soil_Dry_P Parameter: Organism Value: A. thaliana
  misc_feature: MA Experiment 20001555 PARAMETER Experiment Name: At_Drought_Soil_Dry_P Parameter: Plant Line Value: WS
  misc_feature: MA Experiment 20001555 PARAMETER Experiment Name: At_Drought_Soil_Dry_P Parameter: Post Timepoint (hr) Value: None
  misc_feature: MA Experiment 20001555 PARAMETER Experiment Name: At_Drought_Soil_Dry_P Parameter: Post-Treatment Value: None
  misc_feature: MA Experiment 20001555 PARAMETER Experiment Name: At_Drought_Soil_Dry_P Parameter: Timepoint (day) Value: 10
  misc_feature: MA Experiment 20001555 PARAMETER Experiment Name: At_Drought_Soil_Dry_P Parameter: Treatment Value: Drought vs. No Drought
  misc_feature: MA Experiment ID: 20001558 Result: Down-regulated in Transcription
  misc_feature: MA Experiment 20001558 PARAMETER Experiment Name: At_Drought_Soil_Dry_P Parameter: Age (day) Value: 27
  misc_feature: MA Experiment 20001558 PARAMETER Experiment Name: At_Drought_Soil_Dry_P Parameter: Organism Value: A. thaliana
  misc_feature: MA Experiment 20001558 PARAMETER Experiment Name: At_Drought_Soil_Dry_P Parameter: Plant Line Value: WS
  misc_feature: MA Experiment 20001558 PARAMETER Experiment Name: At_Drought_Soil_Dry_P Parameter: Post Timepoint (hr) Value: 6
  misc_feature: MA Experiment 20001558 PARAMETER Experiment Name: At_Drought_Soil_Dry_P Parameter: Post-Treatment Value: Re-Water vs. No Drought
  misc_feature: MA Experiment 20001558 PARAMETER Experiment Name: At_Drought_Soil_Dry_P Parameter: Timepoint (day) Value: 13
  misc_feature: MA Experiment 20001558 PARAMETER Experiment Name: At_Drought_Soil_Dry_P Parameter: Treatment Value: Drought vs. No Drought
  misc_feature: MA Experiment ID: 20001559 Result: Up-regulated in Transcription
  misc_feature: MA Experiment 20001559 PARAMETER Experiment Name: At_Drought_Soil_Dry_P Parameter: Age (day) Value: 28
  misc_feature: MA Experiment 20001559 PARAMETER Experiment Name: At_Drought_Soil_Dry_P Parameter: Organism Value: A. thaliana
  misc_feature: MA Experiment 20001559 PARAMETER Experiment Name: At_Drought_Soil_Dry_P Parameter: Plant Line Value: WS
  misc_feature: MA Experiment 20001559 PARAMETER Experiment Name: At_Drought_Soil_Dry_P Parameter: Post Timepoint (hr) Value: 29
  misc_feature: MA Experiment 20001559 PARAMETER Experiment Name: At_Drought_Soil_Dry_P Parameter: Post-Treatment Value: Re-Water vs. No Drought
  misc_feature: MA Experiment 20001559 PARAMETER Experiment Name: At_Drought_Soil_Dry_P Parameter: Timepoint (day) Value: 14
  misc_feature: MA Experiment 20001559 PARAMETER Experiment Name: At_Drought_Soil_Dry_P Parameter: Treatment Value: Drought vs. No Drought
  misc_feature: MA Experiment ID: 20001560 Result: Down-regulated in Transcription
  misc_feature: MA Experiment 20001560 PARAMETER Experiment Name: At_Drought_Soil_Dry_P Parameter: Age (day) Value: 28
  misc_feature: MA Experiment 20001560 PARAMETER Experiment Name: At_Drought_Soil_Dry_P Parameter: Organism Value: A. thaliana
  misc_feature: MA Experiment 20001560 PARAMETER Experiment Name: At_Drought_Soil_Dry_P Parameter: Plant Line Value: WS
  misc_feature: MA Experiment 20001560 PARAMETER Experiment Name: At_Drought_Soil_Dry_P Parameter: Post Timepoint (hr) Value: None
  misc_feature: MA Experiment 20001560 PARAMETER Experiment Name: At_Drought_Soil_Dry_P Parameter: Post-Treatment Value: None
  misc_feature: MA Experiment 20001560 PARAMETER Experiment Name: At_Drought_Soil_Dry_P Parameter: Timepoint (day) Value: 14
  misc_feature: MA Experiment 20001560 PARAMETER Experiment Name: At_Drought_Soil_Dry_P Parameter: Treatment Value: Drought vs. No Drought
  misc_feature: MA Experiment ID: 20001757 Result: Down-regulated in Transcription
  misc_feature: MA Experiment 20001757 PARAMETER Experiment Name: At_50mM_NH4NO3_L-to-H_P Parameter: Timepoint (hr) Value: 6
  misc_feature: MA Experiment 20001757 PARAMETER Experiment Name: At_50mM_NH4NO3_L-to-H_P Parameter: Tissue Value: Leaf
  misc_feature: MA Experiment 20001757 PARAMETER Experiment Name: At_50mM_NH4NO3_L-to-H_P Parameter: Treatment Value: 50mM NH4NO3 vs 100mM Mannitol
  misc_feature: MA Experiment ID: 20001904 Result: Up-regulated in Transcription
  misc_feature: MA Experiment 20001904 PARAMETER Experiment Name: At_Drought_Reproduction_P Parameter: Age (day) Value: 37
  misc_feature: MA Experiment 20001904 PARAMETER Experiment Name: At_Drought_Reproduction_P Parameter: Organism Value: A. thaliana
  misc_feature: MA Experiment 20001904 PARAMETER Experiment Name: At_Drought_Reproduction_P Parameter: Plant Line Value: WS
  misc_feature: MA Experiment 20001904 PARAMETER Experiment Name: At_Drought_Reproduction_P Parameter: Timepoint (day) Value: 7
  misc_feature: MA Experiment 20001904 PARAMETER Experiment Name: At_Drought_Reproduction_P Parameter: Tissue Value: Rosettes
  misc_feature: MA Experiment 20001904 PARAMETER Experiment Name: At_Drought_Reproduction_P Parameter: Treatment Value: Drought vs. No Drought
  misc_feature: MA Experiment ID: 20001905 Result: Up-regulated in Transcription
  misc_feature: MA Experiment 20001905 PARAMETER Experiment Name: At_Drought_Reproduction_P Parameter: Age (day) Value: 40
  misc_feature: MA Experiment 20001905 PARAMETER Experiment Name: At_Drought_Reproduction_P Parameter: Organism Value: A. thaliana
  misc_feature: MA Experiment 20001905 PARAMETER Experiment Name: At_Drought_Reproduction_P Parameter: Plant Line Value: WS
  misc_feature: MA Experiment 20001905 PARAMETER Experiment Name: At_Drought_Reproduction_P Parameter: Timepoint (day) Value: 10
  misc_feature: MA Experiment 20001905 PARAMETER Experiment Name: At_Drought_Reproduction_P Parameter: Tissue Value: Rosettes
  misc_feature: MA Experiment 20001905 PARAMETER Experiment Name: At_Drought_Reproduction_P Parameter: Treatment Value: Drought vs. No Drought
  misc_feature: MA Experiment ID: 20001906 Result: Up-regulated in Transcription
  misc_feature: MA Experiment 20001906 PARAMETER Experiment Name: At_Drought_Reproduction_P Parameter: Age (day) Value: 35
  misc_feature: MA Experiment 20001906 PARAMETER Experiment Name: At_Drought_Reproduction_P Parameter: Organism Value: A. thaliana
  misc_feature: MA Experiment 20001906 PARAMETER Experiment Name: At_Drought_Reproduction_P Parameter: Plant Line Value: WS
  misc_feature: MA Experiment 20001906 PARAMETER Experiment Name: At_Drought_Reproduction_P Parameter: Timepoint (day) Value: 5
  misc_feature: MA Experiment 20001906 PARAMETER Experiment Name: At_Drought_Reproduction_P Parameter: Tissue Value: Siliques
  misc_feature: MA Experiment 20001906 PARAMETER Experiment Name: At_Drought_Reproduction_P Parameter: Treatment Value: Drought vs. No Drought
  misc_feature: MA Experiment ID: 20001907 Result: Up-regulated in Transcription
  misc_feature: MA Experiment 20001907 PARAMETER Experiment Name: At_Drought_Reproduction_P Parameter: Age (day) Value: 37
  misc_feature: MA Experiment 20001907 PARAMETER Experiment Name: At_Drought_Reproduction_P Parameter: Organism Value: A. thaliana
  misc_feature: MA Experiment 20001907 PARAMETER Experiment Name: At_Drought_Reproduction_P Parameter: Plant Line Value: WS
  misc_feature: MA Experiment 20001907 PARAMETER Experiment Name: At_Drought_Reproduction_P Parameter: Timepoint (day) Value: 7
  misc_feature: MA Experiment 20001907 PARAMETER Experiment Name: At_Drought_Reproduction_P Parameter: Tissue Value: Siliques
  misc_feature: MA Experiment 20001907 PARAMETER Experiment Name: At_Drought_Reproduction_P Parameter: Treatment Value: Drought vs. No Drought
  misc_feature: MA Experiment ID: 20001908 Result: Up-regulated in Transcription
  misc_feature: MA Experiment 20001908 PARAMETER Experiment Name: At_Drought_Reproduction_P Parameter: Age (day) Value: 40
  misc_feature: MA Experiment 20001908 PARAMETER Experiment Name: At_Drought_Reproduction_P Parameter: Organism Value: A. thaliana
  misc_feature: MA Experiment 20001908 PARAMETER Experiment Name: At_Drought_Reproduction_P Parameter: Plant Line Value: WS
  misc_feature: MA Experiment 20001908 PARAMETER Experiment Name: At_Drought_Reproduction_P Parameter: Timepoint (day) Value: 10
  misc_feature: MA Experiment 20001908 PARAMETER Experiment Name: At_Drought_Reproduction_P Parameter: Tissue Value: Siliques
  misc_feature: MA Experiment 20001908 PARAMETER Experiment Name: At_Drought_Reproduction_P Parameter: Treatment Value: Drought vs. No Drought
  misc_feature: MA Experiment ID: 20001911 Result: Up-regulated in Transcription
  misc_feature: MA Experiment 20001911 PARAMETER Experiment Name: At_Drought_Reproduction_P Parameter: Age (day) Value: 40
  misc_feature: MA Experiment 20001911 PARAMETER Experiment Name: At_Drought_Reproduction_P Parameter: Organism Value: A. thaliana
  misc_feature: MA Experiment 20001911 PARAMETER Experiment Name: At_Drought_Reproduction_P Parameter: Plant Line Value: WS
  misc_feature: MA Experiment 20001911 PARAMETER Experiment Name: At_Drought_Reproduction_P Parameter: Timepoint (day) Value: 10
  misc_feature: MA Experiment 20001911 PARAMETER Experiment Name: At_Drought_Reproduction_P Parameter: Tissue Value: Flowers
  misc_feature: MA Experiment 20001911 PARAMETER Experiment Name: At_Drought_Reproduction_P Parameter: Treatment Value: Drought vs. No Drought
aagtcctttgcttcatttcttataaaactaaaccaccttcttcttcatcattcatcaccaatctatctcatattccatatactgaatatggactcattctacttctgtatatacacatgggatccaaacttaaactttaccctctcttaaatcactcatccgtttttcacccagacagtcgttaccaatcggcccctacaatggaggaagagcaacaacaacttcgtgttctcttcgcgaaatacgagatgggaaggttactaggcaaaggaacattcggaaaagtttattacggcaaagagataacaaccggagaaagcgttgcaatcaaaatcatcaacaaagatcaagtcaaacgtgaaggtatgatggaacaaatcaaacgagagatctcaatcatgagacttgttcgtcatccaaacatcgttgagttaaaagaagtcatggctacaaaaacaaagatcttctttatcatggaatacgttaaaggcggtgaacttttctccaagatcgttaaaggaaagcttaaagaagactctgctcgtaagtatttccaacaattaatctcagccgttgatttttgtcatagtagaggcgtttctcaccgagatctaaaaccggagaatctcttagttgacgagaacggagatcttaaggtttcagattttggtctctctgctttaccggaacagattttacaagacggtttgcttcatactcagtgtggaactccggcgtatgttgcaccggaggttttgaggaagaaaggttacgacggagctaaaggtgatatttggtcgtgtggtattatcttgtacgtgcttctcgctggattcttaccgtttcaagatgagaacctaatgaaaatgtatcggaagatcttcaaatcggagtttgagtatccgccgtggttttcaccggagtccaagaggttgatttcaaagcttttagttgttgatcctaacaaacggatctcgataccggcgattatgcgaacaccgtggtttcgtaaaaacatcaactctccgatcgagttcaagatcgatgagctcgagatccaaaacgtagaagacgaaacaccaacaacaacagcaacaacagcaacaacaacaacaacaccggtctcgccgaagttctttaacgcgtttgaattcatctcttctatgtcatcaggatttgatctatcaagtttgttcgagagtaagaggaagctgagatctatgtttacgtcacggtggtcggcgtcggagataatggggaagcttgaagggatagggaaagagatgaatatgaaggtgaagaggactaaagactttaaggtgaagttgtttgggaaaacggaagggaggaaaggacagatcgcggtgactgctgaggttttcgaggttgcgccggaagtcgccgtcgttgagttgtgtaagtcggcgggagatactttggagtataataggttgtatgaagaacatgtccggccagcgttggaggagatagtgtggtcgtggcacggtgataatcataataataatattgttaagagtaatggtaattatgttagtgatgaaaattctggtagtgactgctaagagaatgtaatgatagttatgtaaattaaactgtgtatttttgttaatcagttgttagattcaaggaagtttttgtatattgtgtatatagaagttgaggtttattttattctctttgagc

SEQ ID NO: 80195 - protein, 526 aa, Arabidopsis thaliana
  peptide (1)..(526): Ceres Seq. ID no. 12654812
  misc_feature (81)..(335): Pfam Name: Protein kinase domain Pfam Description: Protein kinase domain
  misc_feature (39)..(526): Homolog of NCBI NO: 18420882 NR Description: serine/threonine protein kinase-like protein; id: At5g25110.1, supported by cDNA: gi_15215663, supported by
  misc_feature (39)..(526): Homolog of NCBI NO: 15215664 NR Description: AT5g25110/T11H3_120 [Arabidopsis thaliana]
  misc_feature (67)..(508): Homolog of NCBI NO: 30683398 NR Description: CBL-interacting protein kinase 5 [Arabidopsis
  misc_feature (67)..(499): Homolog of NCBI NO: 24899813 NR Description: serine/threonine protein kinase-like protein
  misc_feature (67)..(521): Homolog of NCBI NO: 15224679 NR Description: putative protein kinase; protein id: At2g25090.1, by cDNA: gi_14009297 [Arabidopsis thaliana]
  misc_feature (76)..(508): Homolog of NCBI NO: 15242509 NR Description: serine threonine protein kinase; protein id: supported by cDNA: gi_14486383 [Arabidopsis thaliana]
  misc_feature (76)..(503): Homolog of NCBI NO: 23428550 NR Description: Serine/threonine Kinase [Persea americana]
  misc_feature (71)..(503): Homolog of NCBI NO: 33146431 NR Description: putative Serine/threonine Kinase [Oryza sativa
  misc_feature (71)..(513): Homolog of NCBI NO: 34903780 NR Description: unnamed protein product [Oryza sativa (japonica group)] >gi|7340882|dbj|BAA92972.1| unnamed protein product
  misc_feature (76)..(508): Homolog of NCBI NO: 34907870 NR Description: putative serine/threonine protein kinase [Oryza
VLCFISYKTKPPSSSSFITNLSHIPYTEYGLILLLYIHMGSKLKLYPLLNHSSVFHPDSRYQSAPTMEEEQQQLRVLFAKYEMGRLLGKGTFGKVYYGKEITTGESVAIKIINKDQVKREGMMEQIKREISIMRLVRHPNIVELKEVMATKTKIFFIMEYVKGGELFSKIVKGKLKEDSARKYFQQLISAVDFCHSRGVSHRDLKPENLLVDENGDLKVSDFGLSALPEQILQDGLLHTQCGTPAYVAPEVLRKKGYDGAKGDIWSCGIILYVLLAGFLPFQDENLMKMYRKIFKSEFEYPPWFSPESKRLISKLLVVDPNKRISIPAIMRTPWFRKNINSPIEFKIDELEIQNVEDETPTTTATTATTTTTPVSPKFFNAFEFISSMSSGFDLSSLFESKRKLRSMFTSRWSASEIMGKLEGIGKEMNMKVKRTKDFKVKLFGKTEGRKGQIAVTAEVFEVAPEVAVVELCKSAGDTLEYNRLYEEHVRPALEEIVWSWHGDNHNNNIVKSNGNYVSDENSGSDC

SEQ ID NO: 80196 - protein, 488 aa, Arabidopsis thaliana
  peptide (1)..(488): Ceres Seq. ID no. 12654813
  misc_feature (43)..(297): Pfam Name: Protein kinase domain Pfam Description: Protein kinase domain
  misc_feature (1)..(488): Homolog of NCBI NO: 18420882 NR Description: serine/threonine protein kinase-like protein; id: At5g25110.1, supported by cDNA: gi_15215663, supported by
  misc_feature (1)..(488): Homolog of NCBI NO: 15215664 NR Description: AT5g25110/T11H3_120 [Arabidopsis thaliana]
  misc_feature (29)..(470): Homolog of NCBI NO: 30683398 NR Description: CBL-interacting protein kinase 5 [Arabidopsis
  misc_feature (29)..(461): Homolog of NCBI NO: 24899813 NR Description: serine/threonine protein kinase-like protein
  misc_feature (29)..(483): Homolog of NCBI NO: 15224679 NR Description: putative protein kinase; protein id: At2g25090.1, by cDNA: gi_14009297 [Arabidopsis thaliana]
  misc_feature (38)..(470): Homolog of NCBI NO: 15242509 NR Description: serine threonine protein kinase; protein id: supported by cDNA: gi_14486383 [Arabidopsis thaliana]
  misc_feature (38)..(465): Homolog of NCBI NO: 23428550 NR Description: Serine/threonine Kinase [Persea americana]
  misc_feature (33)..(465): Homolog of NCBI NO: 33146431 NR Description: putative Serine/threonine Kinase [Oryza sativa
  misc_feature (33)..(475): Homolog of NCBI NO: 34903780 NR Description: unnamed protein product [Oryza sativa (japonica group)] >gi|7340882|dbj|BAA92972.1| unnamed protein product
  misc_feature (38)..(470): Homolog of NCBI NO: 34907870 NR Description: putative serine/threonine protein kinase [Oryza
MGSKLKLYPLLNHSSVFHPDSRYQSAPTMEEEQQQLRVLFAKYEMGRLLGKGTFGKVYYGKEITTGESVAIKIINKDQVKREGMMEQIKREISIMRLVRHPNIVELKEVMATKTKIFFIMEYVKGGELFSKIVKGKLKEDSARKYFQQLISAVDFCHSRGVSHRDLKPENLLVDENGDLKVSDFGLSALPEQILQDGLLHTQCGTPAYVAPEVLRKKGYDGAKGDIWSCGIILYVLLAGFLPFQDENLMKMYRKIFKSEFEYPPWFSPESKRLISKLLVVDPNKRISIPAIMRTPWFRKNINSPIEFKIDELEIQNVEDETPTTTATTATTTTTPVSPKFFNAFEFISSMSSGFDLSSLFESKRKLRSMFTSRWSASEIMGKLEGIGKEMNMKVKRTKDFKVKLFGKTEGRKGQIAVTAEVFEVAPEVAVVELCKSAGDTLEYNRLYEEHVRPALEEIVWSWHGDNHNNNIVKSNGNYVSDENSGSDC

SEQ ID NO: 80197 - protein, 460 aa, Arabidopsis thaliana
  peptide (1)..(460): Ceres Seq. ID no. 12654814
  misc_feature (15)..(269): Pfam Name: Protein kinase domain Pfam Description: Protein kinase domain
  misc_feature (1)..(460): Homolog of NCBI NO: 18420882 NR Description: serine/threonine protein kinase-like protein; id: At5g25110.1, supported by cDNA: gi_15215663, supported by
  misc_feature (1)..(460): Homolog of NCBI NO: 15215664 NR Description: AT5g25110/T11H3_120 [Arabidopsis thaliana]
  misc_feature (1)..(442): Homolog of NCBI NO: 30683398 NR Description: CBL-interacting protein kinase 5 [Arabidopsis
  misc_feature (1)..(433): Homolog of NCBI NO: 24899813 NR Description: serine/threonine protein kinase-like protein
  misc_feature (1)..(455): Homolog of NCBI NO: 15224679 NR Description: putative protein kinase; protein id: At2g25090.1, by cDNA: gi_14009297 [Arabidopsis thaliana]
  misc_feature (10)..(442): Homolog of NCBI NO: 15242509 NR Description: serine threonine protein kinase; protein id: supported by cDNA: gi_14486383 [Arabidopsis thaliana]
  misc_feature (10)..(437): Homolog of NCBI NO: 23428550 NR Description: Serine/threonine Kinase [Persea americana]
  misc_feature (5)..(437): Homolog of NCBI NO: 33146431 NR Description: putative Serine/threonine Kinase [Oryza sativa
  misc_feature (5)..(447): Homolog of NCBI NO: 34903780 NR Description: unnamed protein product [Oryza sativa (japonica group)] >gi|7340882|dbj|BAA92972.1| unnamed protein product
  misc_feature (10)..(442): Homolog of NCBI NO: 34907870 NR Description: putative serine/threonine protein kinase [Oryza
MEEEQQQLRVLFAKYEMGRLLGKGTFGKVYYGKEITTGESVAIKIINKDQVKREGMMEQIKREISIMRLVRHPNIVELKEVMATKTKIFFIMEYVKGGELFSKIVKGKLKEDSARKYFQQLISAVDFCHSRGVSHRDLKPENLLVDENGDLKVSDFGLSALPEQILQDGLLHTQCGTPAYVAPEVLRKKGYDGAKGDIWSCGIILYVLLAGFLPFQDENLMKMYRKIFKSEFEYPPWFSPESKRLISKLLVVDPNKRISIPAIMRTPWFRKNINSPIEFKIDELEIQNVEDETPTTTATTATTTTTPVSPKFFNAFEFISSMSSGFDLSSLFESKRKLRSMFTSRWSASEIMGKLEGIGKEMNMKVKRTKDFKVKLFGKTEGRKGQIAVTAEVFEVAPEVAVVELCKSAGDTLEYNRLYEEHVRPALEEIVWSWHGDNHNNNIVKSNGNYVSDENSGSDC

SEQ ID NO: 80198 - DNA, 1491 bp, Arabidopsis thaliana
  misc_feature (1)..(1491): Ceres Seq. ID no. 12654815
  misc_feature: MA Experiment ID: 20000171 Result: Down-regulated in Transcription
  misc_feature: MA Experiment 20000171 PARAMETER Experiment Name: At_42deg_Heat_P Parameter: Age (day) Value: 14
  misc_feature: MA Experiment 20000171 PARAMETER Experiment Name: At_42deg_Heat_P Parameter: Organism Value: A. thaliana
  misc_feature: MA Experiment 20000171 PARAMETER Experiment Name: At_42deg_Heat_P Parameter: Plant Line Value: WS
  misc_feature: MA Experiment 20000171 PARAMETER Experiment Name: At_42deg_Heat_P Parameter: Temperature (deg C) Value: 42 vs. 22
  misc_feature: MA Experiment 20000171 PARAMETER Experiment Name: At_42deg_Heat_P Parameter: Timepoint (hr) Value: 1
  misc_feature: MA Experiment 20000171 PARAMETER Experiment Name: At_42deg_Heat_P Parameter: Tissue Value: Aerial
  misc_feature: MA Experiment ID: 20000173 Result: Down-regulated in Transcription
  misc_feature: MA Experiment 20000173 PARAMETER Experiment Name: At_42deg_Heat_P Parameter: Age (day) Value: 14
  misc_feature: MA Experiment 20000173 PARAMETER Experiment Name: At_42deg_Heat_P Parameter: Organism Value: A. thaliana
  misc_feature: MA Experiment 20000173 PARAMETER Experiment Name: At_42deg_Heat_P Parameter: Plant Line Value: WS
  misc_feature: MA Experiment 20000173 PARAMETER Experiment Name: At_42deg_Heat_P Parameter: Temperature (deg C) Value: 42 vs. 22
  misc_feature: MA Experiment 20000173 PARAMETER Experiment Name: At_42deg_Heat_P Parameter: Timepoint (hr) Value: 6
  misc_feature: MA Experiment 20000173 PARAMETER Experiment Name: At_42deg_Heat_P Parameter: Tissue Value: Aerial
  misc_feature: MA Experiment ID: 20000227 Result: Down-regulated in Transcription
  misc_feature: MA Experiment 20000227 PARAMETER Experiment Name: At_Root-Tips-vs-Tops_P Parameter: Tissue Value: Root Tips vs. Root Tops
  misc_feature: MA Experiment ID: 20000235 Result: Down-regulated in Transcription
  misc_feature: MA Experiment 20000235 PARAMETER Experiment Name: At_Siliques_P Parameter: Age (day) Value: 21
  misc_feature: MA Experiment 20000235 PARAMETER Experiment Name: At_Siliques_P Parameter: Organism Value: A. thaliana
  misc_feature: MA Experiment 20000235 PARAMETER Experiment Name: At_Siliques_P Parameter: Plant Line Value: WS
  misc_feature: MA Experiment 20000235 PARAMETER Experiment Name: At_Siliques_P Parameter: Tissue Value: 5-10mm Siliques vs. Whole Plant
  misc_feature: MA Experiment ID: 20000264 Result: Down-regulated in Transcription
  misc_feature: MA Experiment 20000264 PARAMETER Experiment Name: At_Open_Flower_P Parameter: Age (day) Value: 21
  misc_feature: MA Experiment 20000264 PARAMETER Experiment Name: At_Open_Flower_P Parameter: Plant Line Value: WS
  misc_feature: MA Experiment 20000264 PARAMETER Experiment Name: At_Open_Flower_P Parameter: Tissue Value: Open Flower vs. Whole Plant
  misc_feature: MA Experiment ID: 20000265 Result: Down-regulated in Transcription
  misc_feature: MA Experiment 20000265 PARAMETER Experiment Name: At_Open_Flower_P Parameter: Age (day) Value: 21
  misc_feature: MA Experiment 20000265 PARAMETER Experiment Name: At_Open_Flower_P Parameter: Plant Line Value: WS
  misc_feature: MA Experiment 20000265 PARAMETER Experiment Name: At_Open_Flower_P Parameter: Tissue Value: Closed Flower vs. Whole Plant
  misc_feature: MA Experiment ID: 20000439 Result: Up-regulated in Transcription
  misc_feature: MA Experiment 20000439 PARAMETER Experiment Name: At_Roots__P Parameter: Age (day) Value: 14 vs. 21
  misc_feature: MA Experiment 20000439 PARAMETER Experiment Name: At_Roots__P Parameter: Organism Value: A. thaliana
  misc_feature: MA Experiment 20000439 PARAMETER Experiment Name: At_Roots__P Parameter: Tissue Value: Roots vs. Whole Plant
  misc_feature: MA Experiment ID: 20000495 Result: Down-regulated in Transcription
  misc_feature: MA Experiment 20000495 PARAMETER Experiment Name: At_Guard_Cells_P Parameter: Harvest Date Value: 8/2/2002
  misc_feature: MA Experiment 20000495 PARAMETER Experiment Name: At_Guard_Cells_P Parameter: Organism Value: A. thaliana
  misc_feature: MA Experiment 20000495 PARAMETER Experiment Name: At_Guard_Cells_P Parameter: Tissue Value: Guard Cells vs. Leaves
  misc_feature: MA Experiment ID: 20000794 Result: Down-regulated in Transcription
  misc_feature: MA Experiment 20000794 PARAMETER Experiment Name: At_Petals_P Parameter: Age (day) Value: 23-25 days
  misc_feature: MA Experiment 20000794 PARAMETER Experiment Name: At_Petals_P Parameter: Plant Line Value: WS
  misc_feature: MA Experiment 20000794 PARAMETER Experiment Name: At_Petals_P Parameter: Tissue Value: Petals vs. Whole plant
  misc_feature: MA Experiment ID: 20001248 Result: Down-regulated in Transcription
  misc_feature: MA Experiment 20001248 PARAMETER Experiment Name: At_Far-red-induction_P Parameter: Age (day) Value: 7
  misc_feature: MA Experiment 20001248 PARAMETER Experiment Name: At_Far-red-induction_P Parameter: Light Value: Far-red vs. White
  misc_feature: MA Experiment 20001248 PARAMETER Experiment Name: At_Far-red-induction_P Parameter: Organism Value: A. thaliana
  misc_feature: MA Experiment 20001248 PARAMETER Experiment Name: At_Far-red-induction_P Parameter: Plant Line Value: Columbia
  misc_feature: MA Experiment 20001248 PARAMETER Experiment Name: At_Far-red-induction_P Parameter: Timepoint (hr) Value: 4
  misc_feature: MA Experiment 20001248 PARAMETER Experiment Name: At_Far-red-induction_P Parameter: Tissue Value: Whole Plant
  misc_feature: MA Experiment ID: 20001559 Result: Down-regulated in Transcription
  misc_feature: MA Experiment 20001559 PARAMETER Experiment Name: At_Drought_Soil_Dry_P Parameter: Age (day) Value: 28
  misc_feature: MA Experiment 20001559 PARAMETER Experiment Name: At_Drought_Soil_Dry_P Parameter: Organism Value: A. thaliana
  misc_feature: MA Experiment 20001559 PARAMETER Experiment Name: At_Drought_Soil_Dry_P Parameter: Plant Line Value: WS
  misc_feature: MA Experiment 20001559 PARAMETER Experiment Name: At_Drought_Soil_Dry_P Parameter: Post Timepoint (hr) Value: 29
  misc_feature: MA Experiment 20001559 PARAMETER Experiment Name: At_Drought_Soil_Dry_P Parameter: Post-Treatment Value: Re-Water vs. No Drought
  misc_feature: MA Experiment 20001559 PARAMETER Experiment Name: At_Drought_Soil_Dry_P Parameter: Timepoint (day) Value: 14
  misc_feature: MA Experiment 20001559 PARAMETER Experiment Name: At_Drought_Soil_Dry_P Parameter: Treatment Value: Drought vs. No Drought
  misc_feature: MA Experiment ID: 20001560 Result: Down-regulated in Transcription
  misc_feature: MA Experiment 20001560 PARAMETER Experiment Name: At_Drought_Soil_Dry_P Parameter: Age (day) Value: 28
  misc_feature: MA Experiment 20001560 PARAMETER Experiment Name: At_Drought_Soil_Dry_P Parameter: Organism Value: A. thaliana
  misc_feature: MA Experiment 20001560 PARAMETER Experiment Name: At_Drought_Soil_Dry_P Parameter: Plant Line Value: WS
  misc_feature: MA Experiment 20001560 PARAMETER Experiment Name: At_Drought_Soil_Dry_P Parameter: Post Timepoint (hr) Value: None
  misc_feature: MA Experiment 20001560 PARAMETER Experiment Name: At_Drought_Soil_Dry_P Parameter: Post-Treatment Value: None
  misc_feature: MA Experiment 20001560 PARAMETER Experiment Name: At_Drought_Soil_Dry_P Parameter: Timepoint (day) Value: 14
  misc_feature: MA Experiment 20001560 PARAMETER Experiment Name: At_Drought_Soil_Dry_P Parameter: Treatment Value: Drought vs. No Drought
  misc_feature: MA Experiment ID: 20001757 Result: Up-regulated in Transcription
  misc_feature: MA Experiment 20001757 PARAMETER Experiment Name: At_50mM_NH4NO3_L-to-H_P Parameter: Timepoint (hr) Value: 6
  misc_feature: MA Experiment 20001757 PARAMETER Experiment Name: At_50mM_NH4NO3_L-to-H_P Parameter: Tissue Value: Leaf
  misc_feature: MA Experiment 20001757 PARAMETER Experiment Name: At_50mM_NH4NO3_L-to-H_P Parameter: Treatment Value: 50mM NH4NO3 vs 100mM Mannitol
atgagtttgtggtatatcattgttgcattcgtcttcttttcaactataatcattgtaaggaacactagaaagacaaagaagaatctacctcccggacccccaagacttcctattattggaaacttgcaccaattgggatctaaacctcatagttcaatgttcaaattatccgaaaaatatggacctctaatggctctaaggtttggaagtgtgtctactgttgtggcttctacaccagagacagtaaaggaagttttaaaaacatttgacgcagaatgttgttcgcggccttatatgacttatcctgcaagacttacatacaatttaaaagatattggcttttgtccctacaccaaatattggagggaggtacgaaagatgacagttgttgaactctacactgcaaaaagggtacaatcatttcaacatacaagaaaagaagaagttgcatcactcgttgatttcatcacacaagctgcgtcattggagaaaccggttaacttgaacacgaagttaatgaaactatcaggaagtgtgatttgtagagttgtatttggtatcaatcttaaaggaagtaaacttgagaatctttatgaggaagttattcaaggaaccatggaggtggtggggagttttgcagcagcagattacttcccgatcattggtagaatcatcgataggatcacagggttacatagcaaatgtgagaagattttcaaggcaatggatgcattttttgatcaatctataaagcatcatctagaagatgagagtattaaggatgatatcattgacttgctcctcaagatggaaaggggagagattgaacttggggagtttcaacttactcgagacaacaccaaaggaattcttttcaatattcttaacgctggaatagacacttctgcacaagttatgacatgggtgatgacatatttgatttcaaacccaagagttatgaagaaagcgcaagccgaggtgagagaagttataaaaaacaaagacgatatcattgaggaagatatagaacgactcgaatatctgaaaatggtagttaaagaaacgtttagggtattaccgctcgttccacttctaattccaagagaggcttcaaaagatgtaaagattggaggttatgacattccaaagaaaacatggatccatgtcaacatatgggctattcataggaatccaaacgtttggaaagatccagaagctttcatccccgagaggtttatggataaccagattgattataagggtttgaactttgagtttttgccgtttggtagcggaaggagaatgtgccctggtatagggatgggtatggctttggtacacttgactcttatcaatcttctttaccgatttgattggaagcttccggaaggaatggaggtagaagatgttgatcttgaagaatcatatggacttgtctgtcctaagaaagttccacttcagcttatcccggtccttacccaatggagttga

SEQ ID NO: 80199 - protein, 496 aa, Arabidopsis thaliana
  peptide (1)..(496): Ceres Seq. ID no. 12654816
  misc_feature (1)..(496): Homolog of NCBI NO: 15238701 NR Description: cytochrome p450 family; protein id: At5g25120.1
  misc_feature (1)..(496): Homolog of NCBI NO: 15238717 NR Description: cytochrome p450 family; protein id: At5g25130.1 thaliana] >gi|13878407|sp|Q9ZU07|C72C_ARATH Cytochrome P450 71B12
  misc_feature (1)..(496): Homolog of NCBI NO: 15238720 NR Description: cytochrome p450 family; protein id: At5g25140.1
  misc_feature (1)..(496): Homolog of NCBI NO: 15238726 NR Description: cytochrome p450 family; protein id: At5g25180.1
  misc_feature (1)..(496): Homolog of NCBI NO: 1345641 NR Description: Cytochrome P450 71B1 (CYPLXXIB1)
  misc_feature (2)..(490): Homolog of NCBI NO: 15231538 NR Description: cytochrome p450 family; protein id: At3g26300.1 thaliana] >gi|13878379|sp|Q9LIP6|C72V_ARATH Cytochrome P450 71B34
  misc_feature (3)..(490): Homolog of NCBI NO: 15231539 NR Description: cytochrome p450 family; protein id: At3g26310.1 thaliana] >gi|13878378|sp|Q9LIP5|C72W_ARATH Cytochrome P450 71B35
  misc_feature (2)..(491): Homolog of NCBI NO: 15231537 NR Description: cytochrome p450 family; protein id: At3g26290.1 thaliana] >gi|13878380|sp|Q9LTL0|C72Q_ARATH Cytochrome P450 71B26
  misc_feature (3)..(491): Homolog of NCBI NO: 13878390 NR Description: Cytochrome P450 71B10 >gi|8777359|dbj|BAA96949.1|
  misc_feature (3)..(491): Homolog of NCBI NO: 30696845 NR Description: cytochrome P450 71B10 [Arabidopsis thaliana]
MSLWYIIVAFVFFSTIIIVRNTRKTKKNLPPGPPRLPIIGNLHQLGSKPHSSMFKLSEKYGPLMALRFGSVSTVVASTPETVKEVLKTFDAECCSRPYMTYPARLTYNLKDIGFCPYTKYWREVRKMTVVELYTAKRVQSFQHTRKEEVASLVDFITQAASLEKPVNLNTKLMKLSGSVICRVVFGINLKGSKLENLYEEVIQGTMEVVGSFAAADYFPIIGRIIDRITGLHSKCEKIFKAMDAFFDQSIKHHLEDESIKDDIIDLLLKMERGEIELGEFQLTRDNTKGILFNILNAGIDTSAQVMTWVMTYLISNPRVMKKAQAEVREVIKNKDDIIEEDIERLEYLKMVVKETFRVLPLVPLLIPREASKDVKIGGYDIPKKTWIHVNIWAIHRNPNVWKDPEAFIPERFMDNQIDYKGLNFEFLPFGSGRRMCPGIGMGMALVHLTLINLLYRFDWKLPEGMEVEDVDLEESYGLVCPKKVPLQLIPVLTQWS

SEQ ID NO: 80200 - protein, 444 aa, Arabidopsis thaliana
  peptide (1)..(444): Ceres Seq. ID no. 12654817
  misc_feature (1)..(444): Homolog of NCBI NO: 15238701 NR Description: cytochrome p450 family; protein id: At5g25120.1
  misc_feature (1)..(444): Homolog of NCBI NO: 15238717 NR Description: cytochrome p450 family; protein id: At5g25130.1 thaliana] >gi|13878407|sp|Q9ZU07|C72C_ARATH Cytochrome P450 71B12
  misc_feature (1)..(444): Homolog of NCBI NO: 15238720 NR Description: cytochrome p450 family; protein id: At5g25140.1
  misc_feature (1)..(444): Homolog of NCBI NO: 15238726 NR Description: cytochrome p450 family; protein id: At5g25180.1
  misc_feature (1)..(444): Homolog of NCBI NO: 1345641 NR Description: Cytochrome P450 71B1 (CYPLXXIB1)
  misc_feature (1)..(438): Homolog of NCBI NO: 15231538 NR Description: cytochrome p450 family; protein id: At3g26300.1 thaliana] >gi|13878379|sp|Q9LIP6|C72V_ARATH Cytochrome P450 71B34
  misc_feature (1)..(438): Homolog of NCBI NO: 15231539 NR Description: cytochrome p450 family; protein id: At3g26310.1 thaliana] >gi|13878378|sp|Q9LIP5|C72W_ARATH Cytochrome P450 71B35
  misc_feature (1)..(439): Homolog of NCBI NO: 15231537 NR Description: cytochrome p450 family; protein id: At3g26290.1 thaliana] >gi|13878380|sp|Q9LTL0|C72Q_ARATH Cytochrome P450 71B26
  misc_feature (1)..(439): Homolog of NCBI NO: 13878390 NR Description: Cytochrome P450 71B10 >gi|8777359|dbj|BAA96949.1|
  misc_feature (1)..(439): Homolog of NCBI NO: 30696845 NR Description: cytochrome P450 71B10 [Arabidopsis thaliana]
MFKLSEKYGPLMALRFGSVSTVVASTPETVKEVLKTFDAECCSRPYMTYPARLTYNLKDIGFCPYTKYWREVRKMTVVELYTAKRVQSFQHTRKEEVASLVDFITQAASLEKPVNLNTKLMKLSGSVICRVVFGINLKGSKLENLYEEVIQGTMEVVGSFAAADYFPIIGRIIDRITGLHSKCEKIFKAMDAFFDQSIKHHLEDESIKDDIIDLLLKMERGEIELGEFQLTRDNTKGILFNILNAGIDTSAQVMTWVMTYLISNPRVMKKAQAEVREVIKNKDDIIEEDIERLEYLKMVVKETFRVLPLVPLLIPREASKDVKIGGYDIPKKTWIHVNIWAIHRNPNVWKDPEAFIPERFMDNQIDYKGLNFEFLPFGSGRRMCPGIGMGMALVHLTLINLLYRFDWKLPEGMEVEDVDLEESYGLVCPKKVPLQLIPVLTQWS

SEQ ID NO: 80201 - protein, 433 aa, Arabidopsis thaliana
  peptide (1)..(433): Ceres Seq. ID no. 12654818
  misc_feature (1)..(433): Homolog of NCBI NO: 15238701 NR Description: cytochrome p450 family; protein id: At5g25120.1
  misc_feature (1)..(433): Homolog of NCBI NO: 15238717 NR Description: cytochrome p450 family; protein id: At5g25130.1 thaliana] >gi|13878407|sp|Q9ZU07|C72C_ARATH Cytochrome P450 71B12
  misc_feature (1)..(433): Homolog of NCBI NO: 15238720 NR Description: cytochrome p450 family; protein id: At5g25140.1
  misc_feature (1)..(433): Homolog of NCBI NO: 15238726 NR Description: cytochrome p450 family; protein id: At5g25180.1
  misc_feature (1)..(433): Homolog of NCBI NO: 1345641 NR Description: Cytochrome P450 71B1 (CYPLXXIB1)
  misc_feature (1)..(427): Homolog of NCBI NO: 15231538 NR Description: cytochrome p450 family; protein id: At3g26300.1 thaliana] >gi|13878379|sp|Q9LIP6|C72V_ARATH Cytochrome P450 71B34
  misc_feature (1)..(427): Homolog of NCBI NO: 15231539 NR Description: cytochrome p450 family; protein id: At3g26310.1 thaliana] >gi|13878378|sp|Q9LIP5|C72W_ARATH Cytochrome P450 71B35
  misc_feature (1)..(428): Homolog of NCBI NO: 15231537 NR Description: cytochrome p450 family; protein id: At3g26290.1 thaliana] >gi|13878380|sp|Q9LTL0|C72Q_ARATH Cytochrome P450 71B26
  misc_feature (1)..(428): Homolog of NCBI NO: 13878390 NR Description: Cytochrome P450 71B10 >gi|8777359|dbj|BAA96949.1|
  misc_feature (1)..(428): Homolog of NCBI NO: 30696845 NR Description: cytochrome P450 71B10 [Arabidopsis thaliana]
MALRFGSVSTVVASTPETVKEVLKTFDAECCSRPYMTYPARLTYNLKDIGFCPYTKYWREVRKMTVVELYTAKRVQSFQHTRKEEVASLVDFITQAASLEKPVNLNTKLMKLSGSVICRVVFGINLKGSKLENLYEEVIQGTMEVVGSFAAADYFPIIGRIIDRITGLHSKCEKIFKAMDAFFDQSIKHHLEDESIKDDIIDLLLKMERGEIELGEFQLTRDNTKGILFNILNAGIDTSAQVMTWVMTYLISNPRVMKKAQAEVREVIKNKDDIIEEDIERLEYLKMVVKETFRVLPLVPLLIPREASKDVKIGGYDIPKKTWIHVNIWAIHRNPNVWKDPEAFIPERFMDNQIDYKGLNFEFLPFGSGRRMCPGIGMGMALVHLTLINLLYRFDWKLPEGMEVEDVDLEESYGLVCPKKVPLQLIPVLTQWS

SEQ ID NO: 80202 - DNA, 1491 bp, Arabidopsis thaliana
  misc_feature (1)..(1491): Ceres Seq. ID no. 12654819
  misc_feature: MA Experiment ID: 20000227 Result: Down-regulated in Transcription
  misc_feature: MA Experiment 20000227 PARAMETER Experiment Name: At_Root-Tips-vs-Tops_P Parameter: Tissue Value: Root Tips vs. Root Tops
  misc_feature: MA Experiment ID: 20000264 Result: Down-regulated in Transcription
  misc_feature: MA Experiment 20000264 PARAMETER Experiment Name: At_Open_Flower_P Parameter: Age (day) Value: 21
  misc_feature: MA Experiment 20000264 PARAMETER Experiment Name: At_Open_Flower_P Parameter: Plant Line Value: WS
  misc_feature: MA Experiment 20000264 PARAMETER Experiment Name: At_Open_Flower_P Parameter: Tissue Value: Open Flower vs. Whole Plant
  misc_feature: MA Experiment ID: 20000455 Result: Up-regulated in Transcription
  misc_feature: MA Experiment 20000455 PARAMETER Experiment Name: At_100uM_ABA_P Parameter: Age (day) Value: 16
  misc_feature: MA Experiment 20000455 PARAMETER Experiment Name: At_100uM_ABA_P Parameter: Organism Value: A. thaliana
  misc_feature: MA Experiment 20000455 PARAMETER Experiment Name: At_100uM_ABA_P Parameter: Plant Line Value: WS
  misc_feature: MA Experiment 20000455 PARAMETER Experiment Name: At_100uM_ABA_P Parameter: Timepoint (hr) Value: 48
  misc_feature: MA Experiment 20000455 PARAMETER Experiment Name: At_100uM_ABA_P Parameter: Tissue Value: Aerial
  misc_feature: MA Experiment 20000455 PARAMETER Experiment Name: At_100uM_ABA_P Parameter: Treatment Value: 100uM ABA vs. No Treatment
  misc_feature: MA Experiment ID: 20000495 Result: Down-regulated in Transcription
  misc_feature: MA Experiment 20000495 PARAMETER Experiment Name: At_Guard_Cells_P Parameter: Harvest Date Value: 8/2/2002
  misc_feature: MA Experiment 20000495 PARAMETER Experiment Name: At_Guard_Cells_P Parameter: Organism Value: A. thaliana
  misc_feature: MA Experiment 20000495 PARAMETER Experiment Name: At_Guard_Cells_P Parameter: Tissue Value: Guard Cells vs. Leaves
  misc_feature: MA Experiment ID: 20000794 Result: Down-regulated in Transcription
  misc_feature: MA Experiment 20000794 PARAMETER Experiment Name: At_Petals_P Parameter: Age (day) Value: 23-25 days
  misc_feature: MA Experiment 20000794 PARAMETER Experiment Name: At_Petals_P Parameter: Plant Line Value: WS
  misc_feature: MA Experiment 20000794 PARAMETER Experiment Name: At_Petals_P Parameter: Tissue Value: Petals vs. Whole plant
  misc_feature: MA Experiment ID: 20001248 Result: Down-regulated in Transcription
  misc_feature: MA Experiment 20001248 PARAMETER Experiment Name: At_Far-red-induction_P Parameter: Age (day) Value: 7
  misc_feature: MA Experiment 20001248 PARAMETER Experiment Name: At_Far-red-induction_P Parameter: Light Value: Far-red vs. White
  misc_feature: MA Experiment 20001248 PARAMETER Experiment Name: At_Far-red-induction_P Parameter: Organism Value: A. thaliana
  misc_feature: MA Experiment 20001248 PARAMETER Experiment Name: At_Far-red-induction_P Parameter: Plant Line Value: Columbia
  misc_feature: MA Experiment 20001248 PARAMETER Experiment Name: At_Far-red-induction_P Parameter: Timepoint (hr) Value: 4
  misc_feature: MA Experiment 20001248 PARAMETER Experiment Name: At_Far-red-induction_P Parameter: Tissue Value: Whole Plant
  misc_feature: MA Experiment ID: 20001450 Result: Down-regulated in Transcription
  misc_feature: MA Experiment 20001450 PARAMETER Experiment Name: At_Far-red-induction_P Parameter: Age (day) Value: 7
  misc_feature: MA Experiment 20001450 PARAMETER Experiment Name: At_Far-red-induction_P Parameter: Light Value: Far-red vs. White
  misc_feature: MA Experiment 20001450 PARAMETER Experiment Name: At_Far-red-induction_P Parameter: Organism Value: A. thaliana
  misc_feature: MA Experiment 20001450 PARAMETER Experiment Name: At_Far-red-induction_P Parameter: Plant Line Value: Columbia
  misc_feature: MA Experiment 20001450 PARAMETER Experiment Name: At_Far-red-induction_P Parameter: Timepoint (hr) Value: 8
  misc_feature: MA Experiment 20001450 PARAMETER Experiment Name: At_Far-red-induction_P Parameter: Tissue Value: Whole Plant
  misc_feature: MA Experiment ID: 20001451 Result: Down-regulated in Transcription
  misc_feature: MA Experiment 20001451 PARAMETER Experiment Name: At_Far-red-induction_P Parameter: Age (day) Value: 7
  misc_feature: MA Experiment 20001451 PARAMETER Experiment Name: At_Far-red-induction_P Parameter: Light Value: Far-red vs. White
  misc_feature: MA Experiment 20001451 PARAMETER Experiment Name: At_Far-red-induction_P Parameter: Organism Value: A. thaliana
  misc_feature: MA Experiment 20001451 PARAMETER Experiment Name: At_Far-red-induction_P Parameter: Plant Line Value: Columbia
  misc_feature: MA Experiment 20001451 PARAMETER Experiment Name: At_Far-red-induction_P Parameter: Timepoint (hr) Value: 24
  misc_feature: MA Experiment 20001451 PARAMETER Experiment Name: At_Far-red-induction_P Parameter: Tissue Value: Whole Plant
  misc_feature: MA Experiment ID: 20001757 Result: Up-regulated in Transcription
  misc_feature: MA Experiment 20001757 PARAMETER Experiment Name: At_50mM_NH4NO3_L-to-H_P Parameter: Timepoint (hr) Value: 6
  misc_feature: MA Experiment 20001757 PARAMETER Experiment Name: At_50mM_NH4NO3_L-to-H_P Parameter: Tissue Value: Leaf
  misc_feature: MA Experiment 20001757 PARAMETER Experiment Name: At_50mM_NH4NO3_L-to-H_P Parameter: Treatment Value: 50mM NH4NO3 vs 100mM Mannitol
atgagtttgtggtatatcattgttgcattcgtcttcttttcatctatgatcattgtaaggatcattagaaagacaaagaagaatctaccacccggacccccaagacttcctataattggaaacttgcaccaactaggatcaaaacctcatcgttcgatgttcaaattatccgaaacatatggacctctaatgtccctaaagtttggaagcgtgtctactgtggtggcatctacaccagagacagtgaaggaagtcttaaaaacatttgacgtagaatgttgttcgcgaccaaatatgacctatcccgcaagagttacgtacaatttaaaagatctatgcttttctccttatagcaaatattggagggaggtacgaaagatgacagttgttgaactctacaccgcaaaaagggtgcaatcatttcaacatacaagaaaagaagaagttgcagccctcgttgatttcatcaaacaagctgcttcattggagaaaccagttaacttgaacaagaagttaatgaaactatcaggaagtgtgatttgtagagttgcatttggtatcaatcttcaaggaagtaaacttgagaatacttatgaggaagtcattcaaggaactgtggagttggtggggagttttgcagcagcagattactttccggttgttggtagaatcatcgataggatcacagggttacatagcaaatgtgagaagcttttcaaggcaatggatgcattttttgatcaatctataaagcatcacctagaagatgagattattaaagatgatataattgacttgcttctcaagatggaaaggggagagactacacttggggagtttcaacttactcgcgaccacaccaaaggaattcttgccaatattctcaacgctggaatagacacttctgcacaagttatgacatgggtgatgacatatttgatttcaaacccaagagttttgaagaaagcgcaggccgaggtgagagaagtgataaaacacaaagatgatatcatagaagaagatatagaacgactccaatatctgaaaatggtaattaaagaaacgtttaggataaacccacttgtgccacttctaattccaagagaggcttcaaaagatgtaaagatcggaggttataatattccaaagaaaacatggatccatgttaatatatgggctattcataggaatccaaacgtttggaaagatccagaagctttcattcccgagaggtttatggatagccagattgactataaagggttgaactttgagttgttgccgtttggtagcggaaggagaatatgccctggtattggaatgggtatggccttggttcacttgactcttatcaatcttctttatcgattcgattggaagcttccagaaggaatgaaggtagcagatgttgatcttgaagaatcatatggacttgtttgtcctaagaaaatcccacttcagcttatcccggtccttacccaatggacttga

SEQ ID NO: 80203 - protein, 496 aa, Arabidopsis thaliana
  peptide (1)..(496): Ceres Seq. ID no. 12654820
  misc_feature (1)..(496): Homolog of NCBI NO: 15238717 NR Description: cytochrome p450 family; protein id: At5g25130.1 thaliana] >gi|13878407|sp|Q9ZU07|C72C_ARATH Cytochrome P450 71B12
  misc_feature (1)..(496): Homolog of NCBI NO: 15238701 NR Description: cytochrome p450 family; protein id: At5g25120.1
  misc_feature (1)..(496): Homolog of NCBI NO: 15238720 NR Description: cytochrome p450 family; protein id: At5g25140.1
  misc_feature (1)..(496): Homolog of NCBI NO: 15238726 NR Description: cytochrome p450 family; protein id: At5g25180.1
  misc_feature (1)..(496): Homolog of NCBI NO: 1345641 NR Description: Cytochrome P450 71B1 (CYPLXXIB1)
  misc_feature (2)..(490): Homolog of NCBI NO: 15231538 NR Description: cytochrome p450 family; protein id: At3g26300.1 thaliana] >gi|13878379|sp|Q9LIP6|C72V_ARATH Cytochrome P450 71B34
  misc_feature (2)..(491): Homolog of NCBI NO: 15231537 NR Description: cytochrome p450 family; protein id: At3g26290.1 thaliana] >gi|13878380|sp|Q9LTL0|C72Q_ARATH Cytochrome P450 71B26
  misc_feature (3)..(490): Homolog of NCBI NO: 15231539 NR Description: cytochrome p450 family; protein id: At3g26310.1 thaliana] >gi|13878378|sp|Q9LIP5|C72W_ARATH Cytochrome P450 71B35
  misc_feature (3)..(491): Homolog of NCBI NO: 13878390 NR Description: Cytochrome P450 71B10 >gi|8777359|dbj|BAA96949.1|
  misc_feature (3)..(491): Homolog of NCBI NO: 30696845 NR Description: cytochrome P450 71B10 [Arabidopsis thaliana]
MSLWYIIVAFVFFSSMIIVRIIRKTKKNLPPGPPRLPIIGNLHQLGSKPHRSMFKLSETYGPLMSLKFGSVSTVVASTPETVKEVLKTFDVECCSRPNMTYPARVTYNLKDLCFSPYSKYWREVRKMTVVELYTAKRVQSFQHTRKEEVAALVDFIKQAASLEKPVNLNKKLMKLSGSVICRVAFGINLQGSKLENTYEEVIQGTVELVGSFAAADYFPVVGRIIDRITGLHSKCEKLFKAMDAFFDQSIKHHLEDEIIKDDIIDLLLKMERGETTLGEFQLTRDHTKGILANILNAGIDTSAQVMTWVMTYLISNPRVLKKAQAEVREVIKHKDDIIEEDIERLQYLKMVIKETFRINPLVPLLIPREASKDVKIGGYNIPKKTWIHVNIWAIHRNPNVWKDPEAFIPERFMDSQIDYKGLNFELLPFGSGRRICPGIGMGMALVHLTLINLLYRFDWKLPEGMKVADVDLEESYGLVCPKKIPLQLIPVLTQWT

SEQ ID NO: 80204 - protein, 481 aa, Arabidopsis thaliana
  peptide (1)..(481): Ceres Seq. ID no. 12654821
  misc_feature (1)..(481): Homolog of NCBI NO: 15238717 NR Description: cytochrome p450 family; protein id: At5g25130.1 thaliana] >gi|13878407|sp|Q9ZU07|C72C_ARATH Cytochrome P450 71B12
  misc_feature (1)..(481): Homolog of NCBI NO: 15238701 NR Description: cytochrome p450 family; protein id: At5g25120.1
  misc_feature (1)..(481): Homolog of NCBI NO: 15238720 NR Description: cytochrome p450 family; protein id: At5g25140.1
  misc_feature (1)..(481): Homolog of NCBI NO: 15238726 NR Description: cytochrome p450 family; protein id: At5g25180.1
  misc_feature (1)..(481): Homolog of NCBI NO: 1345641 NR Description: Cytochrome P450 71B1 (CYPLXXIB1)
  misc_feature (1)..(475): Homolog of NCBI NO: 15231538 NR Description: cytochrome p450 family; protein id: At3g26300.1 thaliana] >gi|13878379|sp|Q9LIP6|C72V_ARATH Cytochrome P450 71B34
  misc_feature (1)..(476): Homolog of NCBI NO: 15231537 NR Description: cytochrome p450 family; protein id: At3g26290.1 thaliana] >gi|13878380|sp|Q9LTL0|C72Q_ARATH Cytochrome P450 71B26
  misc_feature (1)..(475): Homolog of NCBI NO: 15231539 NR Description: cytochrome p450 family; protein id: At3g26310.1 thaliana] >gi|13878378|sp|Q9LIP5|C72W_ARATH Cytochrome P450 71B35
  misc_feature (1)..(476): Homolog of NCBI NO: 13878390 NR Description: Cytochrome P450 71B10 >gi|8777359|dbj|BAA96949.1|
  misc_feature (1)..(476): Homolog of NCBI NO: 30696845 NR Description: cytochrome P450 71B10 [Arabidopsis thaliana]
MIIVRIIRKTKKNLPPGPPRLPIIGNLHQLGSKPHRSMFKLSETYGPLMSLKFGSVSTVVASTPETVKEVLKTFDVECCSRPNMTYPARVTYNLKDLCFSPYSKYWREVRKMTVVELYTAKRVQSFQHTRKEEVAALVDFIKQAASLEKPVNLNKKLMKLSGSVICRVAFGINLQGSKLENTYEEVIQGTVELVGSFAAADYFPVVGRIIDRITGLHSKCEKLFKAMDAFFDQSIKHHLEDEIIKDDIIDLLLKMERGETTLGEFQLTRDHTKGILANILNAGIDTSAQVMTWVMTYLISNPRVLKKAQAEVREVIKHKDDIIEEDIERLQYLKMVIKETFRINPLVPLLIPREASKDVKIGGYNIPKKTWIHVNIWAIHRNPNVWKDPEAFIPERFMDSQIDYKGLNFELLPFGSGRRICPGIGMGMALVHLTLINLLYRFDWKLPEGMKVADVDLEESYGLVCPKKIPLQLIPVLTQWT

SEQ ID NO: 80205 - protein, 444 aa, Arabidopsis thaliana
  peptide (1)..(444): Ceres Seq. ID no. 12654822
  misc_feature (1)..(444): Homolog of NCBI NO: 15238717 NR Description: cytochrome p450 family; protein id: At5g25130.1 thaliana] >gi|13878407|sp|Q9ZU07|C72C_ARATH Cytochrome P450 71B12
  misc_feature (1)..(444): Homolog of NCBI NO: 15238701 NR Description: cytochrome p450 family; protein id: At5g25120.1
  misc_feature (1)..(444): Homolog of NCBI NO: 15238720 NR Description: cytochrome p450 family; protein id: At5g25140.1
  misc_feature (1)..(444): Homolog of NCBI NO: 15238726 NR Description: cytochrome p450 family; protein id: At5g25180.1
  misc_feature (1)..(444): Homolog of NCBI NO: 1345641 NR Description: Cytochrome P450 71B1 (CYPLXXIB1)
  misc_feature (1)..(438): Homolog of NCBI NO: 15231538 NR Description: cytochrome p450 family; protein id: At3g26300.1 thaliana] >gi|13878379|sp|Q9LIP6|C72V_ARATH Cytochrome P450 71B34
  misc_feature (1)..(439): Homolog of NCBI NO: 15231537 NR Description: cytochrome p450 family; protein id: At3g26290.1 thaliana] >gi|13878380|sp|Q9LTL0|C72Q_ARATH Cytochrome P450 71B26
  misc_feature (1)..(438): Homolog of NCBI NO: 15231539 NR Description: cytochrome p450 family; protein id: At3g26310.1 thaliana] >gi|13878378|sp|Q9LIP5|C72W_ARATH Cytochrome P450 71B35
  misc_feature (1)..(439): Homolog of NCBI NO: 13878390 NR Description: Cytochrome P450 71B10 >gi|8777359|dbj|BAA96949.1|
  misc_feature (1)..(439): Homolog of NCBI NO: 30696845 NR Description: cytochrome P450 71B10 [Arabidopsis thaliana]
MFKLSETYGPLMSLKFGSVSTVVASTPETVKEVLKTFDVECCSRPNMTYPARVTYNLKDLCFSPYSKYWREVRKMTVVELYTAKRVQSFQHTRKEEVAALVDFIKQAASLEKPVNLNKKLMKLSGSVICRVAFGINLQGSKLENTYEEVIQGTVELVGSFAAADYFPVVGRIIDRITGLHSKCEKLFKAMDAFFDQSIKHHLEDEIIKDDIIDLLLKMERGETTLGEFQLTRDHTKGILANILNAGIDTSAQVMTWVMTYLISNPRVLKKAQAEVREVIKHKDDIIEEDIERLQYLKMVIKETFRINPLVPLLIPREASKDVKIGGYNIPKKTWIHVNIWAIHRNPNVWKDPEAFIPERFMDSQIDYKGLNFELLPFGSGRRICPGIGMGMALVHLTLINLLYRFDWKLPEGMKVADVDLEESYGLVCPKKIPLQLIPVLTQWT

SEQ ID NO: 80206 - DNA, 1491 bp, Arabidopsis thaliana
  misc_feature (1)..(1491): Ceres Seq. ID no. 12654823
  misc_feature: MA Experiment ID: 20000185 Result: Down-regulated in Transcription
  misc_feature: MA Experiment 20000185 PARAMETER Experiment Name: At_Roots__P Parameter: Age (day) Value: 7 vs. 21
  misc_feature: MA Experiment 20000185 PARAMETER Experiment Name: At_Roots__P Parameter: Organism Value: A. thaliana
  misc_feature: MA Experiment 20000185 PARAMETER Experiment Name: At_Roots__P Parameter: Tissue Value: Roots vs. Whole Plant
  misc_feature: MA Experiment ID: 20000437 Result: Down-regulated in Transcription
  misc_feature: MA Experiment 20000437 PARAMETER Experiment Name: At_Drought_P Parameter: Age (day) Value: 8
  misc_feature: MA Experiment 20000437 PARAMETER Experiment Name: At_Drought_P Parameter: Organism Value: A. thaliana
  misc_feature: MA Experiment 20000437 PARAMETER Experiment Name: At_Drought_P Parameter: Plant Line Value: WS
  misc_feature: MA Experiment 20000437 PARAMETER Experiment Name: At_Drought_P Parameter: Timepoint (hr) Value: 24
  misc_feature: MA Experiment 20000437 PARAMETER Experiment Name: At_Drought_P Parameter: Tissue Value: Whole Plant
  misc_feature: MA Experiment 20000437 PARAMETER Experiment Name: At_Drought_P Parameter: Treatment Value: Drought vs. No Drought
  misc_feature: MA Experiment ID: 20000438 Result: Down-regulated in Transcription
  misc_feature: MA Experiment 20000438 PARAMETER Experiment Name: At_Shoots__P Parameter: Age (day) Value: 14
  misc_feature: MA Experiment 20000438 PARAMETER Experiment Name: At_Shoots__P Parameter: Tissue Value: Shoots vs. Whole Plant
  misc_feature: MA Experiment ID: 20001248 Result: Down-regulated in Transcription
  misc_feature: MA Experiment 20001248 PARAMETER Experiment Name: At_Far-red-induction_P Parameter: Age (day) Value: 7
  misc_feature: MA Experiment 20001248 PARAMETER Experiment Name: At_Far-red-induction_P Parameter: Light Value: Far-red vs. White
  misc_feature: MA Experiment 20001248 PARAMETER Experiment Name: At_Far-red-induction_P Parameter: Organism Value: A. thaliana
  misc_feature: MA Experiment 20001248 PARAMETER Experiment Name: At_Far-red-induction_P Parameter: Plant Line Value: Columbia
  misc_feature: MA Experiment 20001248 PARAMETER Experiment Name: At_Far-red-induction_P Parameter: Timepoint (hr) Value: 4
  misc_feature: MA Experiment 20001248 PARAMETER Experiment Name: At_Far-red-induction_P Parameter: Tissue Value: Whole Plant
  misc_feature: MA Experiment ID: 20001556 Result: Down-regulated in Transcription
  misc_feature: MA Experiment 20001556 PARAMETER Experiment Name: At_Drought_Soil_Dry_P Parameter: Age (day) Value: 26
  misc_feature: MA Experiment 20001556 PARAMETER Experiment Name: At_Drought_Soil_Dry_P Parameter: Organism Value: A. thaliana
  misc_feature: MA Experiment 20001556 PARAMETER Experiment Name: At_Drought_Soil_Dry_P Parameter: Plant Line Value: WS
  misc_feature: MA Experiment 20001556 PARAMETER Experiment Name: At_Drought_Soil_Dry_P Parameter: Post Timepoint (hr) Value: None
  misc_feature: MA Experiment 20001556 PARAMETER Experiment Name: At_Drought_Soil_Dry_P Parameter: Post-Treatment Value: None
  misc_feature: MA Experiment 20001556 PARAMETER Experiment Name: At_Drought_Soil_Dry_P Parameter: Timepoint (day) Value: 12
  misc_feature: MA Experiment 20001556 PARAMETER Experiment Name: At_Drought_Soil_Dry_P Parameter: Treatment Value: Drought vs. No Drought
  misc_feature: MA Experiment ID: 20001560 Result: Down-regulated in Transcription
  misc_feature: MA Experiment 20001560 PARAMETER Experiment Name: At_Drought_Soil_Dry_P Parameter: Age (day) Value: 28
  misc_feature: MA Experiment 20001560 PARAMETER Experiment Name: At_Drought_Soil_Dry_P Parameter: Organism Value: A. thaliana
  misc_feature: MA Experiment 20001560 PARAMETER Experiment Name: At_Drought_Soil_Dry_P Parameter: Plant Line Value: WS
  misc_feature: MA Experiment 20001560 PARAMETER Experiment Name: At_Drought_Soil_Dry_P Parameter: Post Timepoint (hr) Value: None
  misc_feature: MA Experiment 20001560 PARAMETER Experiment Name: At_Drought_Soil_Dry_P Parameter: Post-Treatment Value: None
  misc_feature: MA Experiment 20001560 PARAMETER Experiment Name: At_Drought_Soil_Dry_P Parameter: Timepoint (day) Value: 14
  misc_feature: MA Experiment 20001560 PARAMETER Experiment Name: At_Drought_Soil_Dry_P Parameter: Treatment Value: Drought vs. No Drought
  misc_feature: MA Experiment ID: 20001904 Result: Down-regulated in Transcription
  misc_feature: MA Experiment 20001904 PARAMETER Experiment Name: At_Drought_Reproduction_P Parameter: Age (day) Value: 37
  misc_feature: MA Experiment 20001904 PARAMETER Experiment Name: At_Drought_Reproduction_P Parameter: Organism Value: A. thaliana
  misc_feature: MA Experiment 20001904 PARAMETER Experiment Name: At_Drought_Reproduction_P Parameter: Plant Line Value: WS
  misc_feature: MA Experiment 20001904 PARAMETER Experiment Name: At_Drought_Reproduction_P Parameter: Timepoint (day) Value: 7
  misc_feature: MA Experiment 20001904 PARAMETER Experiment Name: At_Drought_Reproduction_P Parameter: Tissue Value: Rosettes
  misc_feature: MA Experiment 20001904 PARAMETER Experiment Name: At_Drought_Reproduction_P Parameter: Treatment Value: Drought vs. No Drought
atgagtttgtggtatatcatagttgtgttcgtcttctttgcatctatattcattgcaaagaacacaagaaagacaaagaagaatctacctcccggaccaccaagacttcctataattggtaacttgcaccaattgggatcaaaacctcaccgttcgatgttcaaattatctgaaaaatatggacctctagtgtacctaaagcttggaaaggtaccgtctgttgtggcctcaactccagagacagtgaaggatgtcttgaaaacgtttgacaaagattgttgttcgcgagcttttttgacatatcctgcaagaatttcatacaatttgaaagatcttgcgtttgctccctatagcaaatattggaaggcggtacgaaagatgacggttgtcgaactctacaccgcgaaaagggtaaaatcgtttcgaaatataagagaagaagaagttgcctccttcgtcgagttcatcaaacattccgcttcgttggaggaaatagttaacttgaaccaaacgttagtgaaactctctgggagtgtaatttgtagagttggttttggaatcaatcttgaagggagcaaacttgagaatacttatgaggaagtcattcatggaaccatggaggtgctagggagttttgcagcatcagattacttcccggttattggtggaataatcgataggatcacggggttacataacaaatgtgagaaggtttttaagggaacagattcatttttcgaccattgtataaagcatcacctagaagatggtggtagtaaagatgatatagttgacttgctgctcaaggtagaaaggggagagattggacttggagagtttcaatttactcgaaaccacaccaaaggaattcttctagacattcttcttgctggagtagacacttctggccacacaataacatgggtgatgacacatttgattaaaaacccaagagttatgaagaaagcacaagccgaggtgagagaagtgataaaaaacaaagacaatatcacagaagaagatatagaaggactcgagtatctgaaaatggtggttaaagaaacattaaggataaacccacttgtgccacttctaactccaagagaggcttcaaaagatgtaaagatcggaggttataatattccaaagaaaacatggatccatgttaatatatgggctattcataggaatccaaacgtttggaaagatccagaagctttcattcccgagaggtttatggataaccagattgactataaagggttgaactttgagttgttgccgtttggtagcggaaggagaatatgccctggtattggaatgggtatggccttgatacacttgactcttatcaatcttctttatcgatttgattggaagcttccagaaggaatggaggttgaagatgttgatcttgaagaatcatatggacttgtctgtcctaagaaagttccacttgagctgatcccggtcctcactcaatggacttga

SEQ ID NO: 80207 - protein, 496 aa, Arabidopsis thaliana
  peptide (1)..(496): Ceres Seq. ID no. 12654824
  misc_feature (1)..(496): Homolog of NCBI NO: 15238720 NR Description: cytochrome p450 family; protein id: At5g25140.1
  misc_feature (1)..(496): Homolog of NCBI NO: 15238701 NR Description: cytochrome p450 family; protein id: At5g25120.1
  misc_feature (1)..(496): Homolog of NCBI NO: 15238717 NR Description: cytochrome p450 family; protein id: At5g25130.1 thaliana] >gi|13878407|sp|Q9ZU07|C72C_ARATH Cytochrome P450 71B12
  misc_feature (1)..(496): Homolog of NCBI NO: 15238726 NR Description: cytochrome p450 family; protein id: At5g25180.1
  misc_feature (1)..(496): Homolog of NCBI NO: 1345641 NR Description: Cytochrome P450 71B1 (CYPLXXIB1)
  misc_feature (2)..(490): Homolog of NCBI NO: 15231538 NR Description: cytochrome p450 family; protein id: At3g26300.1 thaliana] >gi|13878379|sp|Q9LIP6|C72V_ARATH Cytochrome P450 71B34
  misc_feature (3)..(491): Homolog of NCBI NO: 13878390 NR Description: Cytochrome P450 71B10 >gi|8777359|dbj|BAA96949.1|
  misc_feature (3)..(491): Homolog of NCBI NO: 30696845 NR Description: cytochrome P450 71B10 [Arabidopsis thaliana]
  misc_feature (3)..(490): Homolog of NCBI NO: 15231539 NR Description: cytochrome p450 family; protein id: At3g26310.1 thaliana] >gi|13878378|sp|Q9LIP5|C72W_ARATH Cytochrome P450 71B35
  misc_feature (3)..(491): Homolog of NCBI NO: 28393289 NR Description: putative cytochrome p450 [Arabidopsis thaliana]
MSLWYIIVVFVFFASIFIAKNTRKTKKNLPPGPPRLPIIGNLHQLGSKPHRSMFKLSEKYGPLVYLKLGKVPSVVASTPETVKDVLKTFDKDCCSRAFLTYPARISYNLKDLAFAPYSKYWKAVRKMTVVELYTAKRVKSFRNIREEEVASFVEFIKHSASLEEIVNLNQTLVKLSGSVICRVGFGINLEGSKLENTYEEVIHGTMEVLGSFAASDYFPVIGGIIDRITGLHNKCEKVFKGTDSFFDHCIKHHLEDGGSKDDIVDLLLKVERGEIGLGEFQFTRNHTKGILLDILLAGVDTSGHTITWVMTHLIKNPRVMKKAQAEVREVIKNKDNITEEDIEGLEYLKMVVKETLRINPLVPLLTPREASKDVKIGGYNIPKKTWIHVNIWAIHRNPNVWKDPEAFIPERFMDNQIDYKGLNFELLPFGSGRRICPGIGMGMALIHLTLINLLYRFDWKLPEGMEVEDVDLEESYGLVCPKKVPLELIPVLTQWT

SEQ ID NO: 80208 - protein, 444 aa, Arabidopsis thaliana
  peptide (1)..(444): Ceres Seq. ID no. 12654825
  misc_feature (1)..(444): Homolog of NCBI NO: 15238720 NR Description: cytochrome p450 family; protein id: At5g25140.1
  misc_feature (1)..(444): Homolog of NCBI NO: 15238701 NR Description: cytochrome p450 family; protein id: At5g25120.1
  misc_feature (1)..(444): Homolog of NCBI NO: 15238717 NR Description: cytochrome p450 family; protein id: At5g25130.1 thaliana] >gi|13878407|sp|Q9ZU07|C72C_ARATH Cytochrome P450 71B12
  misc_feature (1)..(444): Homolog of NCBI NO: 15238726 NR Description: cytochrome p450 family; protein id: At5g25180.1
  misc_feature (1)..(444): Homolog of NCBI NO: 1345641 NR Description: Cytochrome P450 71B1 (CYPLXXIB1)
  misc_feature (1)..(438): Homolog of NCBI NO: 15231538 NR Description: cytochrome p450 family; protein id: At3g26300.1 thaliana] >gi|13878379|sp|Q9LIP6|C72V_ARATH Cytochrome P450 71B34
  misc_feature (1)..(439): Homolog of NCBI NO: 13878390 NR Description: Cytochrome P450 71B10 >gi|8777359|dbj|BAA96949.1|
  misc_feature (1)..(439): Homolog of NCBI NO: 30696845 NR Description: cytochrome P450 71B10 [Arabidopsis thaliana]
  misc_feature (1)..(438): Homolog of NCBI NO: 15231539 NR Description: cytochrome p450 family; protein id: At3g26310.1 thaliana] >gi|13878378|sp|Q9LIP5|C72W_ARATH Cytochrome P450 71B35
  misc_feature (1)..(439): Homolog of NCBI NO: 28393289 NR Description: putative cytochrome p450 [Arabidopsis thaliana]
MFKLSEKYGPLVYLKLGKVPSVVASTPETVKDVLKTFDKDCCSRAFLTYPARISYNLKDLAFAPYSKYWKAVRKMTVVELYTAKRVKSFRNIREEEVASFVEFIKHSASLEEIVNLNQTLVKLSGSVICRVGFGINLEGSKLENTYEEVIHGTMEVLGSFAASDYFPVIGGIIDRITGLHNKCEKVFKGTDSFFDHCIKHHLEDGGSKDDIVDLLLKVERGEIGLGEFQFTRNHTKGILLDILLAGVDTSGHTITWVMTHLIKNPRVMKKAQAEVREVIKNKDNITEEDIEGLEYLKMVVKETLRINPLVPLLTPREASKDVKIGGYNIPKKTWIHVNIWAIHRNPNVWKDPEAFIPERFMDNQIDYKGLNFELLPFGSGRRICPGIGMGMALIHLTLINLLYRFDWKLPEGMEVEDVDLEESYGLVCPKKVPLELIPVLTQWT

SEQ ID NO: 80209 - protein, 370 aa, Arabidopsis thaliana
  peptide (1)..(370): Ceres Seq. ID no. 12654826
  misc_feature (1)..(370): Homolog of NCBI NO: 15238720 NR Description: cytochrome p450 family; protein id: At5g25140.1
  misc_feature (1)..(370): Homolog of NCBI NO: 15238701 NR Description: cytochrome p450 family; protein id: At5g25120.1
  misc_feature (1)..(370): Homolog of NCBI NO: 15238717 NR Description: cytochrome p450 family; protein id: At5g25130.1 thaliana] >gi|13878407|sp|Q9ZU07|C72C_ARATH Cytochrome P450 71B12
  misc_feature (1)..(370): Homolog of NCBI NO: 15238726 NR Description: cytochrome p450 family; protein id: At5g25180.1
  misc_feature (1)..(370): Homolog of NCBI NO: 1345641 NR Description: Cytochrome P450 71B1 (CYPLXXIB1)
  misc_feature (1)..(364): Homolog of NCBI NO: 15231538 NR Description: cytochrome p450 family; protein id: At3g26300.1 thaliana] >gi|13878379|sp|Q9LIP6|C72V_ARATH Cytochrome P450 71B34
  misc_feature (1)..(365): Homolog of NCBI NO: 13878390 NR Description: Cytochrome P450 71B10 >gi|8777359|dbj|BAA96949.1|
  misc_feature (1)..(365): Homolog of NCBI NO: 30696845 NR Description: cytochrome P450 71B10 [Arabidopsis thaliana]
  misc_feature (1)..(364): Homolog of NCBI NO: 15231539 NR Description: cytochrome p450 family; protein id: At3g26310.1 thaliana] >gi|13878378|sp|Q9LIP5|C72W_ARATH Cytochrome P450 71B35
  misc_feature (1)..(365): Homolog of NCBI NO: 28393289 NR Description: putative cytochrome p450 [Arabidopsis thaliana]
MTVVELYTAKRVKSFRNIREEEVASFVEFIKHSASLEEIVNLNQTLVKLSGSVICRVGFGINLEGSKLENTYEEVIHGTMEVLGSFAASDYFPVIGGIIDRITGLHNKCEKVFKGTDSFFDHCIKHHLEDGGSKDDIVDLLLKVERGEIGLGEFQFTRNHTKGILLDILLAGVDTSGHTITWVMTHLIKNPRVMKKAQAEVREVIKNKDNITEEDIEGLEYLKMVVKETLRINPLVPLLTPREASKDVKIGGYNIPKKTWIHVNIWAIHRNPNVWKDPEAFIPERFMDNQIDYKGLNFELLPFGSGRRICPGIGMGMALIHLTLINLLYRFDWKLPEGMEVEDVDLEESYGLVCPKKVPLELIPVLTQWT

SEQ ID NO: 80210 - DNA, 1101 bp, Arabidopsis thaliana
  misc_feature (1)..(1101): Ceres Seq. ID no. 12654855
  misc_feature: MA Experiment ID: 20001906 Result: Up-regulated in Transcription
  misc_feature: MA Experiment 20001906 PARAMETER Experiment Name: At_Drought_Reproduction_P Parameter: Age (day) Value: 35
  misc_feature: MA Experiment 20001906 PARAMETER Experiment Name: At_Drought_Reproduction_P Parameter: Organism Value: A. thaliana
  misc_feature: MA Experiment 20001906 PARAMETER Experiment Name: At_Drought_Reproduction_P Parameter: Plant Line Value: WS
  misc_feature: MA Experiment 20001906 PARAMETER Experiment Name: At_Drought_Reproduction_P Parameter: Timepoint (day) Value: 5
  misc_feature: MA Experiment 20001906 PARAMETER Experiment Name: At_Drought_Reproduction_P Parameter: Tissue Value: Siliques
  misc_feature: MA Experiment 20001906 PARAMETER Experiment Name: At_Drought_Reproduction_P Parameter: Treatment Value: Drought vs. No Drought
atgttggccttatatttcattctactcgtctgcgtgcccttaggtgtcatcatgaccgtgacgagtcctcgactagccatcactgtggccgtcactcagccggcggtcttaataatacaaaatcccaataataacctcacatctcctcaagtaattacatctcagccactggatcacgatgagttactccttcgtcaagcttctaaagccaacccaaacccttcacctaaatttcccaaaaaactagctttcatgttcttaacaacgaactctcttccacttgcaccactttgggagctttttttcaaccaaagctctcatcacaagtctctttacaatgtctacgtccatgtagacccgactcaaaaacacaaaccgggttctcacggcacatttcaaaaccggatcataccatcctcaaaaccggcttacaggcacaccccaaccctcatctcagccgcacgtcgtttactagcccatgcgcttctcgaggacccgtctaattacatgtttatccttctctccccttcttgcattcctttgcactcctttaacttcacttacaagacactagtctcctccacaaagagcttcatcgaaattctcaaagacgaaccagggtggtacgaaaggtgggcagcgcgtggaccctacgcgatgttccccgaggtaccacccgaggagttccgaataggatcacagttctggacgttgacacgagcccatgcgctgatggtggtgagtgacgtggagatatggtccaagtttaacaagtcatgcgtaagagaagacatatgttaccccgaagaacattacttccctactctccttaacatgcgagacccacaagggtgtgtatccgctacggtcacgcacgttgattggagcgtcaacgaccatggtcatcctcggacatataaaccgttggaggttagggctgagcttatacaaaagctgagaagtgcacggcctaggtatggggacggcaaccgaacgaggaaagatccatttcttttcgcccggaaattttctccggccgggatcaatcagttgatgaacataactcgaagtgtcatctttaacgattcggctcttgtgtaa

SEQ ID NO: 80211 - protein, 366 aa, Arabidopsis thaliana
  peptide (1)..(366): Ceres Seq. ID no. 12654856
  misc_feature (120)..(236): Pfam Name: Arabidopsis protein of unknown function, DUF266 Pfam Description: Arabidopsis protein of unknown function, DUF266
  misc_feature (1)..(366): Homolog of NCBI NO: 15239393 NR Description: putative protein; protein id: At5g25330.1
  misc_feature (1)..(364): Homolog of NCBI NO: 15236739 NR Description: putative protein; protein id: At4g32290.1
  misc_feature (25)..(362): Homolog of NCBI NO: 15231121 NR Description: putative protein; protein id: At3g52060.1, by cDNA: gi_13430781, supported by cDNA: gi_13877702, supported cDNA: gi_15293266 [Arabidopsis thaliana] >gi|11281887|pir||T49085
  misc_feature (81)..(362): Homolog of NCBI NO: 34394888 NR Description: unknown protein [Oryza sativa (japonica
  misc_feature (5)..(352): Homolog of NCBI NO: 26452247 NR Description: unknown protein [Arabidopsis thaliana]
  misc_feature (6)..(359): Homolog of NCBI NO: 18402952 NR Description: expressed protein; protein id: At3g21310.1,
  misc_feature (6)..(359): Homolog of NCBI NO: 21554566 NR Description: unknown [Arabidopsis thaliana]
  misc_feature (61)..(353): Homolog of NCBI NO: 38346557 NR Description: OSJNBa0035M09.18 [Oryza sativa (japonica
  misc_feature (1)..(360): Homolog of NCBI NO: 15221384 NR Description: hypothetical protein; protein id: At1g68380.1
  misc_feature (40)..(359): Homolog of NCBI NO: 15221386 NR Description: hypothetical protein; protein id: At1g68390.1
MLALYFILLVCVPLGVIMTVTSPRLAITVAVTQPAVLIIQNPNNNLTSPQVITSQPLDHDELLLRQASKANPNPSPKFPKKLAFMFLTTNSLPLAPLWELFFNQSSHHKSLYNVYVHVDPTQKHKPGSHGTFQNRIIPSSKPAYRHTPTLISAARRLLAHALLEDPSNYMFILLSPSCIPLHSFNFTYKTLVSSTKSFIEILKDEPGWYERWAARGPYAMFPEVPPEEFRIGSQFWTLTRAHALMVVSDVEIWSKFNKSCVREDICYPEEHYFPTLLNMRDPQGCVSATVTHVDWSVNDHGHPRTYKPLEVRAELIQKLRSARPRYGDGNRTRKDPFLFARKFSPAGINQLMNITRSVIFNDSALV

SEQ ID NO: 80212 - protein, 349 aa, Arabidopsis thaliana
  peptide (1)..(349): Ceres Seq. ID no. 12654857
  misc_feature (103)..(219): Pfam Name: Arabidopsis protein of unknown function, DUF266 Pfam Description: Arabidopsis protein of unknown function, DUF266
  misc_feature (1)..(349): Homolog of NCBI NO: 15239393 NR Description: putative protein; protein id: At5g25330.1
  misc_feature (1)..(347): Homolog of NCBI NO: 15236739 NR Description: putative protein; protein id: At4g32290.1
  misc_feature (8)..(345): Homolog of NCBI NO: 15231121 NR Description: putative protein; protein id: At3g52060.1, by cDNA: gi_13430781, supported by cDNA: gi_13877702, supported cDNA: gi_15293266 [Arabidopsis thaliana] >gi|11281887|pir||T49085
  misc_feature (64)..(345): Homolog of NCBI NO: 34394888 NR Description: unknown protein [Oryza sativa (japonica
  misc_feature (1)..(335): Homolog of NCBI NO: 26452247 NR Description: unknown protein [Arabidopsis thaliana]
  misc_feature (1)..(342): Homolog of NCBI NO: 18402952 NR Description: expressed protein; protein id: At3g21310.1,
  misc_feature (1)..(342): Homolog of NCBI NO: 21554566 NR Description: unknown [Arabidopsis thaliana]
  misc_feature (44)..(336): Homolog of NCBI NO: 38346557 NR Description: OSJNBa0035M09.18 [Oryza sativa (japonica
  misc_feature (1)..(343): Homolog of NCBI NO: 15221384 NR Description: hypothetical protein; protein id: At1g68380.1
  misc_feature (23)..(342): Homolog of NCBI NO: 15221386 NR Description: hypothetical protein; protein id: At1g68390.1
MTVTSPRLAITVAVTQPAVLIIQNPNNNLTSPQVITSQPLDHDELLLRQASKANPNPSPKFPKKLAFMFLTTNSLPLAPLWELFFNQSSHHKSLYNVYVHVDPTQKHKPGSHGTFQNRIIPSSKPAYRHTPTLISAARRLLAHALLEDPSNYMFILLSPSCIPLHSFNFTYKTLVSSTKSFIEILKDEPGWYERWAARGPYAMFPEVPPEEFRIGSQFWTLTRAHALMVVSDVEIWSKFNKSCVREDICYPEEHYFPTLLNMRDPQGCVSATVTHVDWSVNDHGHPRTYKPLEVRAELIQKLRSARPRYGDGNRTRKDPFLFARKFSPAGINQLMNITRSVIFNDSALV

SEQ ID NO: 80213 - protein, 282 aa, Arabidopsis thaliana
  peptide (1)..(282): Ceres Seq. ID no. 12654858
  misc_feature (36)..(152): Pfam Name: Arabidopsis protein of unknown function, DUF266 Pfam Description: Arabidopsis protein of unknown function, DUF266
  misc_feature (1)..(282): Homolog of NCBI NO: 15239393 NR Description: putative protein; protein id: At5g25330.1
  misc_feature (1)..(280): Homolog of NCBI NO: 15236739 NR Description: putative protein; protein id: At4g32290.1
  misc_feature (1)..(278): Homolog of NCBI NO: 15231121 NR Description: putative protein; protein id: At3g52060.1, by cDNA: gi_13430781, supported by cDNA: gi_13877702, supported cDNA: gi_15293266 [Arabidopsis thaliana] >gi|11281887|pir||T49085
  misc_feature (1)..(278): Homolog of NCBI NO: 34394888 NR Description: unknown protein [Oryza sativa (japonica
  misc_feature (1)..(268): Homolog of NCBI NO: 26452247 NR Description: unknown protein [Arabidopsis thaliana]
  misc_feature (1)..(275): Homolog of NCBI NO: 18402952 NR Description: expressed protein; protein id: At3g21310.1,
  misc_feature (1)..(275): Homolog of NCBI NO: 21554566 NR Description: unknown [Arabidopsis thaliana]
  misc_feature (1)..(269): Homolog of NCBI NO: 38346557 NR Description: OSJNBa0035M09.18 [Oryza sativa (japonica
  misc_feature (1)..(276): Homolog of NCBI NO: 15221384 NR Description: hypothetical protein; protein id: At1g68380.1
  misc_feature (1)..(275): Homolog of NCBI NO: 15221386 NR Description: hypothetical protein; protein id: At1g68390.1
MFLTTNSLPLAPLWELFFNQSSHHKSLYNVYVHVDPTQKHKPGSHGTFQNRIIPSSKPAYRHTPTLISAARRLLAHALLEDPSNYMFILLSPSCIPLHSFNFTYKTLVSSTKSFIEILKDEPGWYERWAARGPYAMFPEVPPEEFRIGSQFWTLTRAHALMVVSDVEIWSKFNKSCVREDICYPEEHYFPTLLNMRDPQGCVSATVTHVDWSVNDHGHPRTYKPLEVRAELIQKLRSARPRYGDGNRTRKDPFLFARKFSPAGINQLMNITRSVIFNDSALV

SEQ ID NO: 80214 - DNA, 570 bp, Arabidopsis thaliana
  misc_feature (1)..(570): Ceres Seq. ID no. 12654871
  misc_feature: MA Experiment ID: 20000184 Result: Down-regulated in Transcription
  misc_feature: MA Experiment 20000184 PARAMETER Experiment Name: At_Shoots__P Parameter: Age (day) Value: 7
  misc_feature: MA Experiment 20000184 PARAMETER Experiment Name: At_Shoots__P Parameter: Tissue Value: Shoots vs. Whole Plant
  misc_feature: MA Experiment ID: 20000234 Result: Up-regulated in Transcription
  misc_feature: MA Experiment 20000234 PARAMETER Experiment Name: At_Siliques_P Parameter: Age (day) Value: 21
  misc_feature: MA Experiment 20000234 PARAMETER Experiment Name: At_Siliques_P Parameter: Organism Value: A. thaliana
  misc_feature: MA Experiment 20000234 PARAMETER Experiment Name: At_Siliques_P Parameter: Plant Line Value: WS
  misc_feature: MA Experiment 20000234 PARAMETER Experiment Name: At_Siliques_P Parameter: Tissue Value: Less Than 5mm Siliques vs. Whole Plant
  misc_feature: MA Experiment ID: 20000438 Result: Down-regulated in Transcription
  misc_feature: MA Experiment 20000438 PARAMETER Experiment Name: At_Shoots__P Parameter: Age (day) Value: 14
  misc_feature: MA Experiment 20000438 PARAMETER Experiment Name: At_Shoots__P Parameter: Tissue Value: Shoots vs. Whole Plant
  misc_feature: MA Experiment ID: 20000527 Result: Down-regulated in Transcription
  misc_feature: MA Experiment 20000527 PARAMETER Experiment Name: At_10percent_PEG_P Parameter: Age (day) Value: 20
  misc_feature: MA Experiment 20000527 PARAMETER Experiment Name: At_10percent_PEG_P Parameter: Organism Value: A. thaliana
  misc_feature: MA Experiment 20000527 PARAMETER Experiment Name: At_10percent_PEG_P Parameter: Plant Line Value: WS
  misc_feature: MA Experiment 20000527 PARAMETER Experiment Name: At_10percent_PEG_P Parameter: Timepoint (day) Value: 20
  misc_feature: MA Experiment 20000527 PARAMETER Experiment Name: At_10percent_PEG_P Parameter: Tissue Value: Whole Plant
  misc_feature: MA Experiment 20000527 PARAMETER Experiment Name: At_10percent_PEG_P Parameter: Treatment Value: 10percent PEG vs. No Treatment
  misc_feature: MA Experiment ID: 20000794 Result: Down-regulated in Transcription
  misc_feature: MA Experiment 20000794 PARAMETER Experiment Name: At_Petals_P Parameter: Age (day) Value: 23-25 days
  misc_feature: MA Experiment 20000794 PARAMETER Experiment Name: At_Petals_P Parameter: Plant Line Value: WS
  misc_feature: MA Experiment 20000794 PARAMETER Experiment Name: At_Petals_P Parameter: Tissue Value: Petals vs. Whole plant
  misc_feature: MA Experiment ID: 20001554 Result: Up-regulated in Transcription
  misc_feature: MA Experiment 20001554 PARAMETER Experiment Name: At_Drought_Soil_Dry_P Parameter: Age (day) Value: 21
  misc_feature: MA Experiment 20001554 PARAMETER Experiment Name: At_Drought_Soil_Dry_P Parameter: Organism Value: A. thaliana
  misc_feature: MA Experiment 20001554 PARAMETER Experiment Name: At_Drought_Soil_Dry_P Parameter: Plant Line Value: WS
  misc_feature: MA Experiment 20001554 PARAMETER Experiment Name: At_Drought_Soil_Dry_P Parameter: Post Timepoint (hr) Value: None
  misc_feature: MA Experiment 20001554 PARAMETER Experiment Name: At_Drought_Soil_Dry_P Parameter: Post-Treatment Value: None
  misc_feature: MA Experiment 20001554 PARAMETER Experiment Name: At_Drought_Soil_Dry_P Parameter: Timepoint (day) Value: 7
  misc_feature: MA Experiment 20001554 PARAMETER Experiment Name: At_Drought_Soil_Dry_P Parameter: Treatment Value: Drought vs. No Drought
  misc_feature: MA Experiment ID: 20001555 Result: Up-regulated in Transcription
  misc_feature: MA Experiment 20001555 PARAMETER Experiment Name: At_Drought_Soil_Dry_P Parameter: Age (day) Value: 24
  misc_feature: MA Experiment 20001555 PARAMETER Experiment Name: At_Drought_Soil_Dry_P Parameter: Organism Value: A. thaliana
  misc_feature: MA Experiment 20001555 PARAMETER Experiment Name: At_Drought_Soil_Dry_P Parameter: Plant Line Value: WS
  misc_feature: MA Experiment 20001555 PARAMETER Experiment Name: At_Drought_Soil_Dry_P Parameter: Post Timepoint (hr) Value: None
  misc_feature: MA Experiment 20001555 PARAMETER Experiment Name: At_Drought_Soil_Dry_P Parameter: Post-Treatment Value: None
  misc_feature: MA Experiment 20001555 PARAMETER Experiment Name: At_Drought_Soil_Dry_P Parameter: Timepoint (day) Value: 10
  misc_feature: MA Experiment 20001555 PARAMETER Experiment Name: At_Drought_Soil_Dry_P Parameter: Treatment Value: Drought vs. No Drought
  misc_feature: MA Experiment ID: 20001556 Result: Up-regulated in Transcription
  misc_feature: MA Experiment 20001556 PARAMETER Experiment Name: At_Drought_Soil_Dry_P Parameter: Age (day) Value: 26
  misc_feature: MA Experiment 20001556 PARAMETER Experiment Name: At_Drought_Soil_Dry_P Parameter: Organism Value: A. thaliana
  misc_feature: MA Experiment 20001556 PARAMETER Experiment Name: At_Drought_Soil_Dry_P Parameter: Plant Line Value: WS
  misc_feature: MA Experiment 20001556 PARAMETER Experiment Name: At_Drought_Soil_Dry_P Parameter: Post Timepoint (hr) Value: None
  misc_feature: MA Experiment 20001556 PARAMETER Experiment Name: At_Drought_Soil_Dry_P Parameter: Post-Treatment Value: None
  misc_feature: MA Experiment 20001556 PARAMETER Experiment Name: At_Drought_Soil_Dry_P Parameter: Timepoint (day) Value: 12
  misc_feature: MA Experiment 20001556 PARAMETER Experiment Name: At_Drought_Soil_Dry_P Parameter: Treatment Value: Drought vs. No Drought
  misc_feature: MA Experiment ID: 20001768 Result: Up-regulated in Transcription
  misc_feature: MA Experiment 20001768 PARAMETER Experiment Name: At_Far-red-enriched-adult_P Parameter: Age (day) Value: 28
  misc_feature: MA Experiment 20001768 PARAMETER Experiment Name: At_Far-red-enriched-adult_P Parameter: Light Value: Far-red enriched vs. White
  misc_feature: MA Experiment 20001768 PARAMETER Experiment Name: At_Far-red-enriched-adult_P Parameter: Organism Value: A. thaliana
  misc_feature: MA Experiment 20001768 PARAMETER Experiment Name: At_Far-red-enriched-adult_P Parameter: Plant Line Value: Columbia
  misc_feature: MA Experiment 20001768 PARAMETER Experiment Name: At_Far-red-enriched-adult_P Parameter: Timepoint (hr) Value: 1
  misc_feature: MA Experiment 20001768 PARAMETER Experiment Name: At_Far-red-enriched-adult_P Parameter: Tissue Value: Aerial
  misc_feature: MA Experiment ID: 20001771 Result: Up-regulated in Transcription
  misc_feature: MA Experiment 20001771 PARAMETER Experiment Name: At_Far-red-enriched-adult_P Parameter: Age (day) Value: 28
  misc_feature: MA Experiment 20001771 PARAMETER Experiment Name: At_Far-red-enriched-adult_P Parameter: Light Value: Far-red enriched vs. White
  misc_feature: MA Experiment 20001771 PARAMETER Experiment Name: At_Far-red-enriched-adult_P Parameter: Organism Value: A. thaliana
  misc_feature: MA Experiment 20001771 PARAMETER Experiment Name: At_Far-red-enriched-adult_P Parameter: Plant Line Value: Columbia
  misc_feature: MA Experiment 20001771 PARAMETER Experiment Name: At_Far-red-enriched-adult_P Parameter: Timepoint (hr) Value: 16
  misc_feature: MA Experiment 20001771 PARAMETER Experiment Name: At_Far-red-enriched-adult_P Parameter: Tissue Value: Aerial
  misc_feature: MA Experiment ID: 20001773 Result: Up-regulated in Transcription
  misc_feature: MA Experiment 20001773 PARAMETER Experiment Name: At_Far-red-enriched-adult_P Parameter: Age (day) Value: 30
  misc_feature: MA Experiment 20001773 PARAMETER Experiment Name: At_Far-red-enriched-adult_P Parameter: Light Value: Far-red enriched vs. White
  misc_feature: MA Experiment 20001773 PARAMETER Experiment Name: At_Far-red-enriched-adult_P Parameter: Organism Value: A. thaliana
  misc_feature: MA Experiment 20001773 PARAMETER Experiment Name: At_Far-red-enriched-adult_P Parameter: Plant Line Value: Columbia
  misc_feature: MA Experiment 20001773 PARAMETER Experiment Name: At_Far-red-enriched-adult_P Parameter: Timepoint (hr) Value: 48
  misc_feature: MA Experiment 20001773 PARAMETER Experiment Name: At_Far-red-enriched-adult_P Parameter: Tissue Value: Aerial
  misc_feature: MA Experiment ID: 20001904 Result: Up-regulated in Transcription
  misc_feature: MA Experiment 20001904 PARAMETER Experiment Name: At_Drought_Reproduction_P Parameter: Age (day) Value: 37
  misc_feature: MA Experiment 20001904 PARAMETER Experiment Name: At_Drought_Reproduction_P Parameter: Organism Value: A. thaliana
  misc_feature: MA Experiment 20001904 PARAMETER Experiment Name: At_Drought_Reproduction_P Parameter: Plant Line Value: WS
  misc_feature: MA Experiment 20001904 PARAMETER Experiment Name: At_Drought_Reproduction_P Parameter: Timepoint (day) Value: 7
  misc_feature: MA Experiment 20001904 PARAMETER Experiment Name: At_Drought_Reproduction_P Parameter: Tissue Value: Rosettes
  misc_feature: MA Experiment 20001904 PARAMETER Experiment Name: At_Drought_Reproduction_P Parameter: Treatment Value: Drought vs. No Drought
  misc_feature: MA Experiment ID: 20001906 Result: Down-regulated in Transcription
  misc_feature: MA Experiment 20001906 PARAMETER Experiment Name: At_Drought_Reproduction_P Parameter: Age (day) Value: 35
  misc_feature: MA Experiment 20001906 PARAMETER Experiment Name: At_Drought_Reproduction_P Parameter: Organism Value: A. thaliana
  misc_feature: MA Experiment 20001906 PARAMETER Experiment Name: At_Drought_Reproduction_P Parameter: Plant Line Value: WS
  misc_feature: MA Experiment 20001906 PARAMETER Experiment Name: At_Drought_Reproduction_P Parameter: Timepoint (day) Value: 5
  misc_feature: MA Experiment 20001906 PARAMETER Experiment Name: At_Drought_Reproduction_P Parameter: Tissue Value: Siliques
  misc_feature: MA Experiment 20001906 PARAMETER Experiment Name: At_Drought_Reproduction_P Parameter: Treatment Value: Drought vs. No Drought
  misc_feature: MA Experiment ID: 20001908 Result: Down-regulated in Transcription
  misc_feature: MA Experiment 20001908 PARAMETER Experiment Name: At_Drought_Reproduction_P Parameter: Age (day) Value: 40
  misc_feature: MA Experiment 20001908 PARAMETER Experiment Name: At_Drought_Reproduction_P Parameter: Organism Value: A. thaliana
  misc_feature: MA Experiment 20001908 PARAMETER Experiment Name: At_Drought_Reproduction_P Parameter: Plant Line Value: WS
  misc_feature: MA Experiment 20001908 PARAMETER Experiment Name: At_Drought_Reproduction_P Parameter: Timepoint (day) Value: 10
  misc_feature: MA Experiment 20001908 PARAMETER Experiment Name: At_Drought_Reproduction_P Parameter: Tissue Value: Siliques
  misc_feature: MA Experiment 20001908 PARAMETER Experiment Name: At_Drought_Reproduction_P Parameter: Treatment Value: Drought vs. No Drought
atggtacattcgaagaagttccgaggtgtccgccagcgtcagtggggttcttgggtttctgagattcgtcatcctctcttgaagagaagagtgtggctaggaacattcgacacggcggaaacagcggctagagcctacgaccaagccgcggttctaatgaacggccagagcgcgaagactaacttccccgtcatcaaatcgaacggttcaaattccttggagattaactctgcgttaaggtctcccaaatcattatcggaactattgaacgctaagctaaggaagaactgtaaagaccagacaccgtatctgacgtgtctccgcctcgacaacgacagctcacacatcggcgtctggcagaaacgcgccgggtcaaaaacgagtccaaactgggtcaagcttgttgaactaggtgacaaagttaacgcacgtcccggtggtgatattgagactaataagatgaaggtacgaaacgaagacgttcaggaagatgatcaaatggcgatgcagatgatcgaggagttgcttaactggacctgtcctggatctggatccattgcacaggtctaa

SEQ ID NO: 80215 - protein, 189 aa, Arabidopsis thaliana
  peptide (1)..(189): Ceres Seq. ID no. 12654872
  misc_feature (4)..(67): Pfam Name: AP2 domain Pfam Description: AP2 domain
  misc_feature (1)..(189): Homolog of NCBI NO: 15239413 NR Description: AP2 domain containing protein; protein id:
  misc_feature (1)..(189): Homolog of NCBI NO: 30689846 NR Description: AP2 domain transcription factor, putative thaliana] >gi|26452577|dbj|BAC43373.1| putative AP2 domain protein [Arabidopsis thaliana] >gi|28973113|gb|AAO63881.1|
  misc_feature (1)..(179): Homolog of NCBI NO: 15238976 NR Description: putative protein; protein id: At5g11190.1 thaliana] >gi|8953381|emb|CAB96654.1| putative protein
  misc_feature (1)..(138): Homolog of NCBI NO: 15218134 NR Description: putative ethylene responsive element; protein id:
  misc_feature (1)..(138): Homolog of NCBI NO: 21553845 NR Description: putative ethylene responsive element [Arabidopsis
  misc_feature (5)..(178): Homolog of NCBI NO: 15238727 NR Description: ethylene-responsive element - like protein; id: At5g25190.1, supported by cDNA: gi_15010715, supported by gi_16974344 [Arabidopsis thaliana] >gi|15010716|gb|AAK74017.1|
  misc_feature (6)..(97): Homolog of NCBI NO: 38343976 NR Description: OSJNBb0022F16.15 [Oryza sativa (japonica
  misc_feature (5)..(95): Homolog of NCBI NO: 18650662 NR Description: ethylene response factor 1 [Lycopersicon
  misc_feature (5)..(168): Homolog of NCBI NO: 131754 NR Description: PPLZ02 PROTEIN >gi|99973|pir||S11881 hypothetical
  misc_feature (4)..(98): Homolog of NCBI NO: 6573771 NR Description: F28K19.29 [Arabidopsis thaliana]
MVHSKKFRGVRQRQWGSWVSEIRHPLLKRRVWLGTFDTAETAARAYDQAAVLMNGQSAKTNFPVIKSNGSNSLEINSALRSPKSLSELLNAKLRKNCKDQTPYLTCLRLDNDSSHIGVWQKRAGSKTSPNWVKLVELGDKVNARPGGDIETNKMKVRNEDVQEDDQMAMQMIEELLNWTCPGSGSIAQV

SEQ ID NO: 80216 - protein, 137 aa, Arabidopsis thaliana
  peptide (1)..(137): Ceres Seq. ID no. 12654873
  misc_feature (1)..(137): Homolog of NCBI NO: 15239413 NR Description: AP2 domain containing protein; protein id:
  misc_feature (1)..(137): Homolog of NCBI NO: 30689846 NR Description: AP2 domain transcription factor, putative thaliana] >gi|26452577|dbj|BAC43373.1| putative AP2 domain protein [Arabidopsis thaliana] >gi|28973113|gb|AAO63881.1|
  misc_feature (1)..(127): Homolog of NCBI NO: 15238976 NR Description: putative protein; protein id: At5g11190.1 thaliana] >gi|8953381|emb|CAB96654.1| putative protein
  misc_feature (1)..(86): Homolog of NCBI NO: 15218134 NR Description: putative ethylene responsive element; protein id:
  misc_feature (1)..(86): Homolog of NCBI NO: 21553845 NR Description: putative ethylene responsive element [Arabidopsis
  misc_feature (1)..(126): Homolog of NCBI NO: 15238727 NR Description: ethylene-responsive element - like protein; id: At5g25190.1, supported by cDNA: gi_15010715, supported by gi_16974344 [Arabidopsis thaliana] >gi|15010716|gb|AAK74017.1|
  misc_feature (1)..(45): Homolog of NCBI NO: 38343976 NR Description: OSJNBb0022F16.15 [Oryza sativa (japonica
  misc_feature (1)..(43): Homolog of NCBI NO: 18650662 NR Description: ethylene response factor 1 [Lycopersicon
  misc_feature (1)..(116): Homolog of NCBI NO: 131754 NR Description: PPLZ02 PROTEIN >gi|99973|pir||S11881 hypothetical
  misc_feature (1)..(46): Homolog of NCBI NO: 6573771 NR Description: F28K19.29 [Arabidopsis thaliana]
MNGQSAKTNFPVIKSNGSNSLEINSALRSPKSLSELLNAKLRKNCKDQTPYLTCLRLDNDSSHIGVWQKRAGSKTSPNWVKLVELGDKVNARPGGDIETNKMKVRNEDVQEDDQMAMQMIEELLNWTCPGSGSIAQV

SEQ ID NO: 80217 - DNA, 2471 bp, Arabidopsis thaliana
  misc_feature (1)..(2471): Ceres Seq. ID no. 12654901
  misc_feature: MA Experiment ID: 20000179 Result: Up-regulated in Transcription
  misc_feature: MA Experiment 20000179 PARAMETER Experiment Name: At_Germinating_Seeds_P Parameter: Age (hr) Value: 6 vs. 0
  misc_feature: MA Experiment 20000179 PARAMETER Experiment Name: At_Germinating_Seeds_P Parameter: Tissue Value: Germinating Seeds
  misc_feature: MA Experiment ID: 20000227 Result: Up-regulated in Transcription
  misc_feature: MA Experiment 20000227 PARAMETER Experiment Name: At_Root-Tips-vs-Tops_P Parameter: Tissue Value: Root Tips vs. Root Tops
  misc_feature: MA Experiment ID: 20000234 Result: Up-regulated in Transcription
  misc_feature: MA Experiment 20000234 PARAMETER Experiment Name: At_Siliques_P Parameter: Age (day) Value: 21
  misc_feature: MA Experiment 20000234 PARAMETER Experiment Name: At_Siliques_P Parameter: Organism Value: A. thaliana
  misc_feature: MA Experiment 20000234 PARAMETER Experiment Name: At_Siliques_P Parameter: Plant Line Value: WS
  misc_feature: MA Experiment 20000234 PARAMETER Experiment Name: At_Siliques_P Parameter: Tissue Value: Less Than 5mm Siliques vs. Whole Plant
  misc_feature: MA Experiment ID: 20000265 Result: Up-regulated in Transcription
  misc_feature: MA Experiment 20000265 PARAMETER Experiment Name: At_Open_Flower_P Parameter: Age (day) Value: 21
  misc_feature: MA Experiment 20000265 PARAMETER Experiment Name: At_Open_Flower_P Parameter: Plant Line Value: WS
  misc_feature: MA Experiment 20000265 PARAMETER Experiment Name: At_Open_Flower_P Parameter: Tissue Value: Closed Flower vs. Whole Plant
  misc_feature: MA Experiment ID: 20000286 Result: Up-regulated in Transcription
  misc_feature: MA Experiment 20000286 PARAMETER Experiment Name: At_Open_Flower_P Parameter: Age (day) Value: 21
  misc_feature: MA Experiment 20000286 PARAMETER Experiment Name: At_Open_Flower_P Parameter: Plant Line Value: WS
  misc_feature: MA Experiment 20000286 PARAMETER Experiment Name: At_Open_Flower_P Parameter: Tissue Value: Half Open vs. Whole Plant
  misc_feature: MA Experiment ID: 20000438 Result: Up-regulated in Transcription
  misc_feature: MA Experiment 20000438 PARAMETER Experiment Name: At_Shoots__P Parameter: Age (day) Value: 14
  misc_feature: MA Experiment 20000438 PARAMETER Experiment Name: At_Shoots__P Parameter: Tissue Value: Shoots vs. Whole Plant
  misc_feature: MA Experiment ID: 20000495 Result: Up-regulated in Transcription
  misc_feature: MA Experiment 20000495 PARAMETER Experiment Name: At_Guard_Cells_P Parameter: Harvest Date Value: 8/2/2002
  misc_feature: MA Experiment 20000495 PARAMETER Experiment Name: At_Guard_Cells_P Parameter: Organism Value: A. thaliana
  misc_feature: MA Experiment 20000495 PARAMETER Experiment Name: At_Guard_Cells_P Parameter: Tissue Value: Guard Cells vs. Leaves
  misc_feature: MA Experiment ID: 20001556 Result: Up-regulated in Transcription
  misc_feature: MA Experiment 20001556 PARAMETER Experiment Name: At_Drought_Soil_Dry_P Parameter: Age (day) Value: 26
  misc_feature: MA Experiment 20001556 PARAMETER Experiment Name: At_Drought_Soil_Dry_P Parameter: Organism Value: A. thaliana
  misc_feature: MA Experiment 20001556 PARAMETER Experiment Name: At_Drought_Soil_Dry_P Parameter: Plant Line Value: WS
  misc_feature: MA Experiment 20001556 PARAMETER Experiment Name: At_Drought_Soil_Dry_P Parameter: Post Timepoint (hr) Value: None
  misc_feature: MA Experiment 20001556 PARAMETER Experiment Name: At_Drought_Soil_Dry_P Parameter: Post-Treatment Value: None
  misc_feature: MA Experiment 20001556 PARAMETER Experiment Name: At_Drought_Soil_Dry_P Parameter: Timepoint (day) Value: 12
  misc_feature: MA Experiment 20001556 PARAMETER Experiment Name: At_Drought_Soil_Dry_P Parameter: Treatment Value: Drought vs. No Drought
  misc_feature: MA Experiment ID: 20001560 Result: Up-regulated in Transcription
  misc_feature: MA Experiment 20001560 PARAMETER Experiment Name: At_Drought_Soil_Dry_P Parameter: Age (day) Value: 28
  misc_feature: MA Experiment 20001560 PARAMETER Experiment Name: At_Drought_Soil_Dry_P Parameter: Organism Value: A. thaliana
  misc_feature: MA Experiment 20001560 PARAMETER Experiment Name: At_Drought_Soil_Dry_P Parameter: Plant Line Value: WS
  misc_feature: MA Experiment 20001560 PARAMETER Experiment Name: At_Drought_Soil_Dry_P Parameter: Post Timepoint (hr) Value: None
  misc_feature: MA Experiment 20001560 PARAMETER Experiment Name: At_Drought_Soil_Dry_P Parameter: Post-Treatment Value: None
  misc_feature: MA Experiment 20001560 PARAMETER Experiment Name: At_Drought_Soil_Dry_P Parameter: Timepoint (day) Value: 14
  misc_feature: MA Experiment 20001560 PARAMETER Experiment Name: At_Drought_Soil_Dry_P Parameter: Treatment Value: Drought vs. No Drought
ctctgctgcatttttgttcccttcattatcaatctctctctcccaaacaaaaaaaaagcctcactttttacaaatgggttgtgctcaatctagggttgataacgaagaagcagtagctagatgcaaagaacgacgaaacgtaatcaaagaagcagtttccgcaagcaaagcattcgccgccggtcatttcgcttacgctattgctttgaaaaacactggtgctgctttaagtgactatggccatggcgaatctgatcaaaaagctttagacgatgtgttgttagatcaacaacattacgagaaacagagtcgtaacaatgtagatccggcttctcctcagccacctcctccaccgcctattgagaatcttcctcctccgcctcctcctttgcctaaattctctccttctccgattaaacgtgcgattagtttgccttctatggcggttagaggtcgaaaggttcagactttagatggtatggcgattgaggaagaggaagaagatgaagaggaggaagaggaagttaagggtagtggtagagacactgctcaggaggaggaggaaccgagaacgccggagaatgttgggaagagtaatgggaggaagagattggagaaaacaacgccggagattgtgagtgcttctccggcaaatagtatggcttgggattattttttcatggtggagaatatgcctggacctaatttagatgatagagaggttaggaatggttatgagaatcagagtagtcattttcagtttaatgaagaggatgatgaagaagaagaggaagaggaaagatctgggatatatcggaagaagtctggttctggtaaagtagttgaggagatggagcctaagacgccggagaaagttgaagaagaagaggaggaagatgaggaagaggatgaggaagaggaagaggaggaggaagaagaagtggtggtggaggtaaagaagaagaagaaagggaaagctaagattgagcattcgagtactgctccaccggagtttcggcgtgcggttgctaagactagtgctgctgcatcatcaagtgtgaatttgatgaagattcttgatgagattgatgatagattccttaaggcttcagaatgtgctcaagaggtttctaagatgcttgaagctacaaggttacattaccactcgaattttgcagataaccgaggatatgttgatcattcagctagagtaatgcgggttataacttggaataaatcgttaagaggcatttcgaatggagaaggtggaaaagatgatcaagaatcagatgagcatgaaactcatgctacggtgttggataaattgttagcatgggagaagaaactctatgatgaagtgaagcaaggtgagcttatgaagatagagtatcagaagaaggtatctttactcaacaggcataagaaacgaggtgcgagtgcagagaccgtggagaaaacaaaggcggctgtaagtcatctacacacaagatatattgttgacatgcaatccatggattcaacggtttctgaagtaaaccgtttaagggatgatcaattgtatccaagacttgttgccttagttgaagggatggcgaagatgtggacaaacatgtgtatacaccacgacacccaactaggtattgttggagagctaaaggcccttgaaatctcaacttctctcaaagaaaccacaaaacagcatcaccatcagactcgccagttctgcaccgtcttggaagaatggcatgttcagttcgatacacttgtcacccatcagaagcagtacattaactctctcaacaactggctgaagctaaatctaatccccatcgagagtagtcttaaagagaaagtttcatcacctccaaggcctcagcgcccgccaatccaagctcttctccactcatggcatgaccgtcttgagaaacttcccgatgaagtcgccaaatcagctatctcctctttcgcggcagtcatcaaaaccatcttgctgcaccaggaagaggagatgaaactgaaagagaaatgcgaagaaacacgaagagagtttatacggaagaagcaaggttttgaggattggtatcaaaaacatttgcaaaagagagggccaacagaggaagctgaaggcggggacgacgcaacaacaagctccagagatcatgtcacagagaggagaattgctgtggagacactgaagaaaaggcttgaagaagaagaagaagctcaccagagacattgtgttcaggtgagggagaaatctctaaacagtttgaagatcagattgcctgagatcttcagggcactgtctgattatgctcacgcttgtgctgactcatatgagaagctcagaatcatatcgcagagtcagaaatcaaacggtggagccactgaatcttcttgaaccagttttagttctatttaacctatgtaatatgttgtattatgatgggaacattaagcatagttttgtg

SEQ ID NO: 80218 - protein, 799 aa, Arabidopsis thaliana
  peptide (1)..(799): Ceres Seq. ID no. 12654902
  misc_feature (339)..(663): Pfam Name: Protein of unknown function (DUF632) Pfam Description: Protein of unknown function (DUF632)
  misc_feature (285)..(792): Homolog of NCBI NO: 25405541 NR Description: probable bZIP protein, 48652-45869 [imported] -
  misc_feature (25)..(329): Homolog of NCBI NO: 25405541 NR Description: probable bZIP protein, 48652-45869 [imported] -
  misc_feature (433)..(783): Homolog of NCBI NO: 34914464 NR Description: putative bZIP (leucine zipper) protein [Oryza
  misc_feature (165)..(428): Homolog of NCBI NO: 34914464 NR Description: putative bZIP (leucine zipper) protein [Oryza
  misc_feature (25)..(188): Homolog of NCBI NO: 34914464 NR Description: putative bZIP (leucine zipper) protein [Oryza
  misc_feature (285)..(780): Homolog of NCBI NO: 34900048 NR Description: bZIP protein-like [Oryza sativa (japonica >gi|23237834|dbj|BAC16409.1| putative bZIP protein [Oryza sativa
  misc_feature (25)..(192): Homolog of NCBI NO: 34900048 NR Description: bZIP protein-like [Oryza sativa (japonica >gi|23237834|dbj|BAC16409.1| putative bZIP protein [Oryza sativa
  misc_feature (405)..(792): Homolog of NCBI NO: 18403972 NR Description: bZIP protein, putative; protein id: At1g52320.1, by cDNA: gi_15450410 [Arabidopsis thaliana] At1g52320/F19K6_7 [Arabidopsis thaliana]
  misc_feature (236)..(780): Homolog of NCBI NO: 37536878 NR Description: putative leucine zipper protein [Oryza sativa
  misc_feature (25)..(137): Homolog of NCBI NO: 37536878 NR Description: putative leucine zipper protein [Oryza sativa
SAAFLFPSLSISLSQTKKKPHFLQMGCAQSRVDNEEAVARCKERRNVIKEAVSASKAFAAGHFAYAIALKNTGAALSDYGHGESDQKALDDVLLDQQHYEKQSRNNVDPASPQPPPPPPIENLPPPPPPLPKFSPSPIKRAISLPSMAVRGRKVQTLDGMAIEEEEEDEEEEEEVKGSGRDTAQEEEEPRTPENVGKSNGRKRLEKTTPEIVSASPANSMAWDYFFMVENMPGPNLDDREVRNGYENQSSHFQFNEEDDEEEEEEERSGIYRKKSGSGKVVEEMEPKTPEKVEEEEEEDEEEDEEEEEEEEEEVVVEVKKKKKGKAKIEHSSTAPPEFRRAVAKTSAAASSSVNLMKILDEIDDRFLKASECAQEVSKMLEATRLHYHSNFADNRGYVDHSARVMRVITWNKSLRGISNGEGGKDDQESDEHETHATVLDKLLAWEKKLYDEVKQGELMKIEYQKKVSLLNRHKKRGASAETVEKTKAAVSHLHTRYIVDMQSMDSTVSEVNRLRDDQLYPRLVALVEGMAKMWTNMCIHHDTQLGIVGELKALEISTSLKETTKQHHHQTRQFCTVLEEWHVQFDTLVTHQKQYINSLNNWLKLNLIPIESSLKEKVSSPPRPQRPPIQALLHSWHDRLEKLPDEVAKSAISSFAAVIKTILLHQEEEMKLKEKCEETRREFIRKKQGFEDWYQKHLQKRGPTEEAEGGDDATTSSRDHVTERRIAVETLKKRLEEEEEAHQRHCVQVREKSLNSLKIRLPEIFRALSDYAHACADSYEKLRIISQSQKSNGGATESS

SEQ ID NO: 80219 - protein, 775 aa, Arabidopsis thaliana
  peptide (1)..(775): Ceres Seq. ID no. 12654903
  misc_feature (315)..(639): Pfam Name: Protein of unknown function (DUF632) Pfam Description: Protein of unknown function (DUF632)
  misc_feature (261)..(768): Homolog of NCBI NO: 25405541 NR Description: probable bZIP protein, 48652-45869 [imported] -
  misc_feature (1)..(305): Homolog of NCBI NO: 25405541 NR Description: probable bZIP protein, 48652-45869 [imported] -
  misc_feature (409)..(759): Homolog of NCBI NO: 34914464 NR Description: putative bZIP (leucine zipper) protein [Oryza
  misc_feature (141)..(404): Homolog of NCBI NO: 34914464 NR Description: putative bZIP (leucine zipper) protein [Oryza
  misc_feature (1)..(164): Homolog of NCBI NO: 34914464 NR Description: putative bZIP (leucine zipper) protein [Oryza
  misc_feature (261)..(756): Homolog of NCBI NO: 34900048 NR Description: bZIP protein-like [Oryza sativa (japonica >gi|23237834|dbj|BAC16409.1| putative bZIP protein [Oryza sativa
  misc_feature (1)..(168): Homolog of NCBI NO: 34900048 NR Description: bZIP protein-like [Oryza sativa (japonica >gi|23237834|dbj|BAC16409.1| putative bZIP protein [Oryza sativa
  misc_feature (381)..(768): Homolog of NCBI NO: 18403972 NR Description: bZIP protein, putative; protein id: At1g52320.1, by cDNA: gi_15450410 [Arabidopsis thaliana] At1g52320/F19K6_7 [Arabidopsis thaliana]
  misc_feature (212)..(756): Homolog of NCBI NO: 37536878 NR Description: putative leucine zipper protein [Oryza sativa
  misc_feature (1)..(113): Homolog of NCBI NO: 37536878 NR Description: putative leucine zipper protein [Oryza sativa
MGCAQSRVDNEEAVARCKERRNVIKEAVSASKAFAAGHFAYAIALKNTGAALSDYGHGESDQKALDDVLLDQQHYEKQSRNNVDPASPQPPPPPPIENLPPPPPPLPKFSPSPIKRAISLPSMAVRGRKVQTLDGMAIEEEEEDEEEEEEVKGSGRDTAQEEEEPRTPENVGKSNGRKRLEKTTPEIVSASPANSMAWDYFFMVENMPGPNLDDREVRNGYENQSSHFQFNEEDDEEEEEEERSGIYRKKSGSGKVVEEMEPKTPEKVEEEEEEDEEEDEEEEEEEEEEVVVEVKKKKKGKAKIEHSSTAPPEFRRAVAKTSAAASSSVNLMKILDEIDDRFLKASECAQEVSKMLEATRLHYHSNFADNRGYVDHSARVMRVITWNKSLRGISNGEGGKDDQESDEHETHATVLDKLLAWEKKLYDEVKQGELMKIEYQKKVSLLNRHKKRGASAETVEKTKAAVSHLHTRYIVDMQSMDSTVSEVNRLRDDQLYPRLVALVEGMAKMWTNMCIHHDTQLGIVGELKALEISTSLKETTKQHHHQTRQFCTVLEEWHVQFDTLVTHQKQYINSLNNWLKLNLIPIESSLKEKVSSPPRPQRPPIQALLHSWHDRLEKLPDEVAKSAISSFAAVIKTILLHQEEEMKLKEKCEETRREFIRKKQGFEDWYQKHLQKRGPTEEAEGGDDATTSSRDHVTERRIAVETLKKRLEEEEEAHQRHCVQVREKSLNSLKIRLPEIFRALSDYAHACADSYEKLRIISQSQKSNGGATESS

SEQ ID NO: 80220 - protein, 653 aa, Arabidopsis thaliana
  peptide (1)..(653): Ceres Seq. ID no. 12654904
  misc_feature (193)..(517): Pfam Name: Protein of unknown function (DUF632) Pfam Description: Protein of unknown function (DUF632)
  misc_feature (139)..(646): Homolog of NCBI NO: 25405541 NR Description: probable bZIP protein, 48652-45869 [imported] -
  misc_feature (1)..(183): Homolog of NCBI NO: 25405541 NR Description: probable bZIP protein, 48652-45869 [imported] -
  misc_feature (287)..(637): Homolog of NCBI NO: 34914464 NR Description: putative bZIP (leucine zipper) protein [Oryza
  misc_feature (19)..(282): Homolog of NCBI NO: 34914464 NR Description: putative bZIP (leucine zipper) protein [Oryza
  misc_feature (1)..(42): Homolog of NCBI NO: 34914464 NR Description: putative bZIP (leucine zipper) protein [Oryza
  misc_feature (139)..(634): Homolog of NCBI NO: 34900048 NR Description: bZIP protein-like [Oryza sativa (japonica >gi|23237834|dbj|BAC16409.1| putative bZIP protein [Oryza sativa
  misc_feature (1)..(46): Homolog of NCBI NO: 34900048 NR Description: bZIP protein-like [Oryza sativa (japonica >gi|23237834|dbj|BAC16409.1| putative bZIP protein [Oryza sativa
  misc_feature (259)..(646): Homolog of NCBI NO: 18403972 NR Description: bZIP protein, putative; protein id: At1g52320.1, by cDNA: gi_15450410 [Arabidopsis thaliana] At1g52320/F19K6_7 [Arabidopsis thaliana]
  misc_feature (90)..(634): Homolog of NCBI NO: 37536878 NR Description: putative leucine zipper protein [Oryza sativa
  misc_feature (339)..(646): Homolog of NCBI NO: 15217620 NR Description: bZIP-like protein; protein id: At1g02110.1
MAVRGRKVQTLDGMAIEEEEEDEEEEEEVKGSGRDTAQEEEEPRTPENVGKSNGRKRLEKTTPEIVSASPANSMAWDYFFMVENMPGPNLDDREVRNGYENQSSHFQFNEEDDEEEEEEERSGIYRKKSGSGKVVEEMEPKTPEKVEEEEEEDEEEDEEEEEEEEEEVVVEVKKKKKGKAKIEHSSTAPPEFRRAVAKTSAAASSSVNLMKILDEIDDRFLKASECAQEVSKMLEATRLHYHSNFADNRGYVDHSARVMRVITWNKSLRGISNGEGGKDDQESDEHETHATVLDKLLAWEKKLYDEVKQGELMKIEYQKKVSLLNRHKKRGASAETVEKTKAAVSHLHTRYIVDMQSMDSTVSEVNRLRDDQLYPRLVALVEGMAKMWTNMCIHHDTQLGIVGELKALEISTSLKETTKQHHHQTRQFCTVLEEWHVQFDTLVTHQKQYINSLNNWLKLNLIPIESSLKEKVSSPPRPQRPPIQALLHSWHDRLEKLPDEVAKSAISSFAAVIKTILLHQEEEMKLKEKCEETRREFIRKKQGFEDWYQKHLQKRGPTEEAEGGDDATTSSRDHVTERRIAVETLKKRLEEEEEAHQRHCVQVREKSLNSLKIRLPEIFRALSDYAHACADSYEKLRIISQSQKSNGGATESS

SEQ ID NO: 80221 - DNA, 2106 bp, Arabidopsis thaliana
  misc_feature (1)..(2106): Ceres Seq. ID no. 12654905
  misc_feature: MA Experiment ID: 20000185 Result: Up-regulated in Transcription
  misc_feature: MA Experiment 20000185 PARAMETER Experiment Name: At_Roots__P Parameter: Age (day) Value: 7 vs. 21
  misc_feature: MA Experiment 20000185 PARAMETER Experiment Name: At_Roots__P Parameter: Organism Value: A. thaliana
  misc_feature: MA Experiment 20000185 PARAMETER Experiment Name: At_Roots__P Parameter: Tissue Value: Roots vs. Whole Plant
  misc_feature: MA Experiment ID: 20000227 Result: Down-regulated in Transcription
  misc_feature: MA Experiment 20000227 PARAMETER Experiment Name: At_Root-Tips-vs-Tops_P Parameter: Tissue Value: Root Tips vs. Root Tops
  misc_feature: MA Experiment ID: 20000234 Result: Up-regulated in Transcription
  misc_feature: MA Experiment 20000234 PARAMETER Experiment Name: At_Siliques_P Parameter: Age (day) Value: 21
  misc_feature: MA Experiment 20000234 PARAMETER Experiment Name: At_Siliques_P Parameter: Organism Value: A. thaliana
  misc_feature: MA Experiment 20000234 PARAMETER Experiment Name: At_Siliques_P Parameter: Plant Line Value: WS
  misc_feature: MA Experiment 20000234 PARAMETER Experiment Name: At_Siliques_P Parameter: Tissue Value: Less Than 5mm Siliques vs. Whole Plant
  misc_feature: MA Experiment ID: 20000235 Result: Up-regulated in Transcription
  misc_feature: MA Experiment 20000235 PARAMETER Experiment Name: At_Siliques_P Parameter: Age (day) Value: 21
  misc_feature: MA Experiment 20000235 PARAMETER Experiment Name: At_Siliques_P Parameter: Organism Value: A. thaliana
  misc_feature: MA Experiment 20000235 PARAMETER Experiment Name: At_Siliques_P Parameter: Plant Line Value: WS
  misc_feature: MA Experiment 20000235 PARAMETER Experiment Name: At_Siliques_P Parameter: Tissue Value: 5-10mm Siliques vs. Whole Plant
  misc_feature: MA Experiment ID: 20000264 Result: Up-regulated in Transcription
  misc_feature: MA Experiment 20000264 PARAMETER Experiment Name: At_Open_Flower_P Parameter: Age (day) Value: 21
  misc_feature: MA Experiment 20000264 PARAMETER Experiment Name: At_Open_Flower_P Parameter: Plant Line Value: WS
  misc_feature: MA Experiment 20000264 PARAMETER Experiment Name: At_Open_Flower_P Parameter: Tissue Value: Open Flower vs. Whole Plant
  misc_feature: MA Experiment ID: 20000439 Result: Up-regulated in Transcription
  misc_feature: MA Experiment 20000439 PARAMETER Experiment Name: At_Roots__P Parameter: Age (day) Value: 14 vs. 21
  misc_feature: MA Experiment 20000439 PARAMETER Experiment Name: At_Roots__P Parameter: Organism Value: A. thaliana
  misc_feature: MA Experiment 20000439 PARAMETER Experiment Name: At_Roots__P Parameter: Tissue Value: Roots vs. Whole Plant
  misc_feature: MA Experiment ID: 20000794 Result: Up-regulated in Transcription
  misc_feature: MA Experiment 20000794 PARAMETER Experiment Name: At_Petals_P Parameter: Age (day) Value: 23-25 days
  misc_feature: MA Experiment 20000794 PARAMETER Experiment Name: At_Petals_P Parameter: Plant Line Value: WS
  misc_feature: MA Experiment 20000794 PARAMETER Experiment Name: At_Petals_P Parameter: Tissue Value: Petals vs. Whole plant
tccggtttacactctcatcaaaacacaaacacaacgcttatctctctcactctctttactcattcttctcatttggataagatctctctctttctctccctccttttcagcagattcaatccaaaccctaacctctttgattccgatctttagagaatatttctcttcaaaaaatccattataaatacttttacttaactaaaacttttttttttaccatctctctttttttttttacttactccatatgccatcaatgtcaaattgttctttctgtcctttgttcttaattagtgtcaccaccaccaccactacttctatactacaaacccttctcgtattctcttaaccaatacgtacttattacaccaaaagtctctttctctctatatatatatagataacagccaagagagagaaccaagaagaagttattttcttgatggatttctgttggaagagagagatggaaggtaaactagcacatgaccaccgcggcatgacgtcaccgcgtcgtatctgcgtcgtcaccggtccggtgatcgtaggcgccggaccgtcgggactagccacggcagcatgtttaaaagagagaggtatcacgtccgtactactagagagatcaaactgtatagcatcactatggcagctcaagacttatgaccgtcttcatcttcaccttcctaaacaattctgtgaacttccgattatacccttccccggagatttccctacctacccgacgaagcaacagttcatcgagtaccttgaggactacgctcggaggtttgacataaagccggagtttaaccaaacggttgagtcggctgcgtttgatgaaaaccttgggatgtggcgcgtgactagcgtgggagaagaaggcacgacggagtatgtttgtcggtggttagtggcggcgacgggggagaatgcggagccggtggtacctaggtttgaggggatggataagtttgcagccgccggggtagttaagcacacgtgtcattataaaaccggtggagatttcgccggaaaaagggttcttgtcgtcggatgtggaaactccggtatggaggtttgtttggatctctgcaacttcggtgctcagccttctctcgttgtcagagacgctgtgcacgtcctaccacgagagatgttgggtacttcaacttttgggctgtccatgttcttactgaaatggctgcccatccggcttgttgaccgtttccttttggttgtttcccggttcatcctcggggatactacccttttaggtcttaacaggccccggttaggtccactcgagctcaaaaatatctccggtaaaactccggttctcgacgttggcacgctagccaaaatcaaaaccggagacattaaggtgtgttcggggataagaaggttaaaacgacatgaagttgagttcgataacggaaaaacagagagatttgacgccattatattagcaactggctacaaaagcaacgtaccctcttggctaaaggagaataaaatgtttagtaagaaagatggatttccaatacaagagttccctgagggatggagaggggaatgtgggctatacgcggtcggattcacaaaacgtgggattagtggagcatcaatggatgcaaagagaatagctgaagacatacacaagtgttggaaacaagacgagcaagtaaaaaaaatctgaatcaaaacttattgactagacagtagagaaaagctaaggttttctatcaagaaaacataacttgccaaatgccggtagcgatcgaaaaaaaattgatggttttgtttcaaaggaggtgatgtaaattaagacttatctccagctgcaatgcaaattggggaaaagaatgaaaaggaaatttagtgagagtgattgtggtgggaattgatgatcatctgccccaaaggagaggaggggaccctcttctctttgcatgcttataacccactttgtaaatctttctataccttctttctatgtttctaatttttctttttctcttttctttcttttatttttgtttttttagatttccatagttaggtatgctctttgtttttcttctcttttttggttcaattttttttggc

SEQ ID NO: 80222 - protein, 417 aa, Arabidopsis thaliana
  peptide (1)..(417): Ceres Seq. ID no. 12654906
  misc_feature (31)..(381): Pfam Name: Pyridine nucleotide-disulphide oxidoreductase Pfam Description: Pyridine nucleotide-disulphide oxidoreductase
  misc_feature (1)..(417): Homolog of NCBI NO: 22327064 NR Description: putative protein; protein id: At5g25620.1, by cDNA: gi_17528989, supported by cDNA: gi_21280978 [Arabidopsis >gi|17528990|gb|AAL38705.1| unknown protein [Arabidopsis
  misc_feature (8)..(404): Homolog of NCBI NO: 15235652 NR Description: putative protein; protein id: At4g13260.1
  misc_feature (3)..(409): Homolog of NCBI NO: 34910176 NR Description: putative dimethylaniline monooxygenase [Oryza
  misc_feature (22)..(417): Homolog of NCBI NO: 15219671 NR Description: putative dimethylaniline monooxygenase; protein At1g04180.1 [Arabidopsis thaliana] >gi|7485875|pir||T00955
  misc_feature (21)..(417): Homolog of NCBI NO: 15240026 NR Description: dimethylaniline monooxygenase-like; protein id: [Arabidopsis thaliana] >gi|8953750|dbj|BAA98069.1|
  misc_feature (25)..(416): Homolog of NCBI NO: 15219767 NR Description: putative dimethylaniline monooxygenase; protein At1g04610.1 [Arabidopsis thaliana] >gi|25406796|pir||G86178
  misc_feature (21)..(408): Homolog of NCBI NO: 15239020 NR Description: putative protein; protein id: At5g11320.1 thaliana] >gi|8953394|emb|CAB96667.1| putative protein
  misc_feature (25)..(417): Homolog of NCBI NO: 15225816 NR Description: putative flavin-containing monooxygenase; protein
  misc_feature (12)..(409): Homolog of NCBI NO: 15235409 NR Description: putative protein; protein id: At4g28720.1
  misc_feature (25)..(408): Homolog of NCBI NO: 33147034 NR Description: putative dimethylaniline monooxygenase [Oryza
MDFCWKREMEGKLAHDHRGMTSPRRICVVTGPVIVGAGPSGLATAACLKERGITSVLLERSNCIASLWQLKTYDRLHLHLPKQFCELPIIPFPGDFPTYPTKQQFIEYLEDYARRFDIKPEFNQTVESAAFDENLGMWRVTSVGEEGTTEYVCRWLVAATGENAEPVVPRFEGMDKFAAAGVVKHTCHYKTGGDFAGKRVLVVGCGNSGMEVCLDLCNFGAQPSLVVRDAVHVLPREMLGTSTFGLSMFLLKWLPIRLVDRFLLVVSRFILGDTTLLGLNRPRLGPLELKNISGKTPVLDVGTLAKIKTGDIKVCSGIRRLKRHEVEFDNGKTERFDAIILATGYKSNVPSWLKENKMFSKKDGFPIQEFPEGWRGECGLYAVGFTKRGISGASMDAKRIAEDIHKCWKQDEQVKKI

SEQ ID NO: 80223 - protein, 409 aa, Arabidopsis thaliana
  peptide (1)..(409): Ceres Seq. ID no. 12654907
  misc_feature (23)..(373): Pfam Name: Pyridine nucleotide-disulphide oxidoreductase Pfam Description: Pyridine nucleotide-disulphide oxidoreductase
  misc_feature (1)..(409): Homolog of NCBI NO: 22327064 NR Description: putative protein; protein id: At5g25620.1, by cDNA: gi_17528989, supported by cDNA: gi_21280978 [Arabidopsis >gi|17528990|gb|AAL38705.1| unknown protein [Arabidopsis
  misc_feature (1)..(396): Homolog of NCBI NO: 15235652 NR Description: putative protein; protein id: At4g13260.1
  misc_feature (1)..(401): Homolog of NCBI NO: 34910176 NR Description: putative dimethylaniline monooxygenase [Oryza
  misc_feature (14)..(409): Homolog of NCBI NO: 15219671 NR Description: putative dimethylaniline monooxygenase; protein At1g04180.1 [Arabidopsis thaliana] >gi|7485875|pir||T00955
  misc_feature (13)..(409): Homolog of NCBI NO: 15240026 NR Description: dimethylaniline monooxygenase-like; protein id: [Arabidopsis thaliana] >gi|8953750|dbj|BAA98069.1|
  misc_feature (17)..(408): Homolog of NCBI NO: 15219767 NR Description: putative dimethylaniline monooxygenase; protein At1g04610.1 [Arabidopsis thaliana] >gi|25406796|pir||G86178
  misc_feature (13)..(400): Homolog of NCBI NO: 15239020 NR Description: putative protein; protein id: At5g11320.1 thaliana] >gi|8953394|emb|CAB96667.1| putative protein
  misc_feature (17)..(409): Homolog of NCBI NO: 15225816 NR Description: putative flavin-containing monooxygenase; protein
  misc_feature (4)..(401): Homolog of NCBI NO: 15235409 NR Description: putative protein; protein id: At4g28720.1
  misc_feature (17)..(400): Homolog of NCBI NO: 33147034 NR Description: putative dimethylaniline monooxygenase [Oryza
MEGKLAHDHRGMTSPRRICVVTGPVIVGAGPSGLATAACLKERGITSVLLERSNCIASLWQLKTYDRLHLHLPKQFCELPIIPFPGDFPTYPTKQQFIEYLEDYARRFDIKPEFNQTVESAAFDENLGMWRVTSVGEEGTTEYVCRWLVAATGENAEPVVPRFEGMDKFAAAGVVKHTCHYKTGGDFAGKRVLVVGCGNSGMEVCLDLCNFGAQPSLVVRDAVHVLPREMLGTSTFGLSMFLLKWLPIRLVDRFLLVVSRFILGDTTLLGLNRPRLGPLELKNISGKTPVLDVGTLAKIKTGDIKVCSGIRRLKRHEVEFDNGKTERFDAIILATGYKSNVPSWLKENKMFSKKDGFPIQEFPEGWRGECGLYAVGFTKRGISGASMDAKRIAEDIHKCWKQDEQVKKI

SEQ ID NO: 80224 - protein, 398 aa, Arabidopsis thaliana
  peptide (1)..(398): Ceres Seq. ID no. 12654908
  misc_feature (12)..(362): Pfam Name: Pyridine nucleotide-disulphide oxidoreductase Pfam Description: Pyridine nucleotide-disulphide oxidoreductase
  misc_feature (1)..(398): Homolog of NCBI NO: 22327064 NR Description: putative protein; protein id: At5g25620.1, by cDNA: gi_17528989, supported by cDNA: gi_21280978 [Arabidopsis >gi|17528990|gb|AAL38705.1| unknown protein [Arabidopsis
  misc_feature (1)..(385): Homolog of NCBI NO: 15235652 NR Description: putative protein; protein id: At4g13260.1
  misc_feature (1)..(390): Homolog of NCBI NO: 34910176 NR Description: putative dimethylaniline monooxygenase [Oryza
  misc_feature (3)..(398): Homolog of NCBI NO: 15219671 NR Description: putative dimethylaniline monooxygenase; protein At1g04180.1 [Arabidopsis thaliana] >gi|7485875|pir||T00955
  misc_feature (2)..(398): Homolog of NCBI NO: 15240026 NR Description: dimethylaniline monooxygenase-like; protein id: [Arabidopsis thaliana] >gi|8953750|dbj|BAA98069.1|
  misc_feature (6)..(397): Homolog of NCBI NO: 15219767 NR Description: putative dimethylaniline monooxygenase; protein At1g04610.1 [Arabidopsis thaliana] >gi|25406796|pir||G86178
  misc_feature (2)..(389): Homolog of NCBI NO: 15239020 NR Description: putative protein; protein id: At5g11320.1 thaliana] >gi|8953394|emb|CAB96667.1| putative protein
  misc_feature (6)..(398): Homolog of NCBI NO: 15225816 NR Description: putative flavin-containing monooxygenase; protein
  misc_feature (1)..(390): Homolog of NCBI NO: 15235409 NR Description: putative protein; protein id: At4g28720.1
  misc_feature (6)..(389): Homolog of NCBI NO: 33147034 NR Description: putative dimethylaniline monooxygenase [Oryza
MTSPRRICVVTGPVIVGAGPSGLATAACLKERGITSVLLERSNCIASLWQLKTYDRLHLHLPKQFCELPIIPFPGDFPTYPTKQQFIEYLEDYARRFDIKPEFNQTVESAAFDENLGMWRVTSVGEEGTTEYVCRWLVAATGENAEPVVPRFEGMDKFAAAGVVKHTCHYKTGGDFAGKRVLVVGCGNSGMEVCLDLCNFGAQPSLVVRDAVHVLPREMLGTSTFGLSMFLLKWLPIRLVDRFLLVVSRFILGDTTLLGLNRPRLGPLELKNISGKTPVLDVGTLAKIKTGDIKVCSGIRRLKRHEVEFDNGKTERFDAIILATGYKSNVPSWLKENKMFSKKDGFPIQEFPEGWRGECGLYAVGFTKRGISGASMDAKRIAEDIHKCWKQDEQVKKI

SEQ ID NO: 80225 - DNA, 1015 bp, Arabidopsis thaliana
  misc_feature (1)..(1015): Ceres Seq. ID no. 12654915
  misc_feature: MA Experiment ID: 20000184 Result: Up-regulated in Transcription
  misc_feature: MA Experiment 20000184 PARAMETER Experiment Name: At_Shoots__P Parameter: Age (day) Value: 7
  misc_feature: MA Experiment 20000184 PARAMETER Experiment Name: At_Shoots__P Parameter: Tissue Value: Shoots vs. Whole Plant
  misc_feature: MA Experiment ID: 20000185 Result: Up-regulated in Transcription
  misc_feature: MA Experiment 20000185 PARAMETER Experiment Name: At_Roots__P Parameter: Age (day) Value: 7 vs. 21
  misc_feature: MA Experiment 20000185 PARAMETER Experiment Name: At_Roots__P Parameter: Organism Value: A. thaliana
  misc_feature: MA Experiment 20000185 PARAMETER Experiment Name: At_Roots__P Parameter: Tissue Value: Roots vs. Whole Plant
  misc_feature: MA Experiment ID: 20000436 Result: Down-regulated in Transcription
  misc_feature: MA Experiment 20000436 PARAMETER Experiment Name: At_Drought_P Parameter: Age (day) Value: 7
  misc_feature: MA Experiment 20000436 PARAMETER Experiment Name: At_Drought_P Parameter: Organism Value: A. thaliana
  misc_feature: MA Experiment 20000436 PARAMETER Experiment Name: At_Drought_P Parameter: Plant Line Value: WS
  misc_feature: MA Experiment 20000436 PARAMETER Experiment Name: At_Drought_P Parameter: Timepoint (hr) Value: 12
  misc_feature: MA Experiment 20000436 PARAMETER Experiment Name: At_Drought_P Parameter: Tissue Value: Whole Plant
  misc_feature: MA Experiment 20000436 PARAMETER Experiment Name: At_Drought_P Parameter: Treatment Value: Drought vs. No Drought
  misc_feature: MA Experiment ID: 20000437 Result: Down-regulated in Transcription
  misc_feature: MA Experiment 20000437 PARAMETER Experiment Name: At_Drought_P Parameter: Age (day) Value: 8
  misc_feature: MA Experiment 20000437 PARAMETER Experiment Name: At_Drought_P Parameter: Organism Value: A. thaliana
  misc_feature: MA Experiment 20000437 PARAMETER Experiment Name: At_Drought_P Parameter: Plant Line Value: WS
  misc_feature: MA Experiment 20000437 PARAMETER Experiment Name: At_Drought_P Parameter: Timepoint (hr) Value: 24
  misc_feature: MA Experiment 20000437 PARAMETER Experiment Name: At_Drought_P Parameter: Tissue Value: Whole Plant
  misc_feature: MA Experiment 20000437 PARAMETER Experiment Name: At_Drought_P Parameter: Treatment Value: Drought vs. No Drought
  misc_feature: MA Experiment ID: 20000439 Result: Up-regulated in Transcription
  misc_feature: MA Experiment 20000439 PARAMETER Experiment Name: At_Roots__P Parameter: Age (day) Value: 14 vs. 21
  misc_feature: MA Experiment 20000439 PARAMETER Experiment Name: At_Roots__P Parameter: Organism Value: A. thaliana
  misc_feature: MA Experiment 20000439 PARAMETER Experiment Name: At_Roots__P Parameter: Tissue Value: Roots vs. Whole Plant
ctgtctctcactttccttcattatttactcattgcccaaaataattcatttatcatatcctcaaacttttttttttctatacctcgaaatccaaaaaaataaatacattggtttagtgtggcattgatgtttttggtataaagctcttcaccaatgatagcttcagagagtaccaagagctgggaagctagcgcagtcagacaagagaatgaagaagagaagaagaaaccggttaaagattccggtaagcatccggtttatcggggtgtccgaaagaggaactggggaaaatgggtgtccgagatacgtgaacctaggaaaaaatcccgaatatggctaggaacgtttccttccccggagatggcggcgcgtgcacacgacgtagccgctcttagcatcaaaggagcctccgctatactcaatttccctgacctagccggctctttcccacgccctagctcgcttagccctcgagacatccaggtcgcggctctcaaagccgcacacatggagacctcacagtctttttcttcttcttcttctttaacgttttcatcttcacagtcttcttcttcgctagagtctctcgtgtcttcctccgcgaccggctccgaggagctaggggagattgtagagctcccaagtttgggatcgagctatgatggtttgactcagctaggtaacgagtttatattctctgactccgcagacttatggccttatccaccgcaatggtcagaaggtgattaccaaatgattcctgcctcgttatcacaagattgggatcttcaaggactgtataattattaagtcataatcataaaaatatactagtaatgctgtgtttaataattactttttaatgacccctttattttgtatagggcggctttaggtttatttgtctttgaatcttcttttctcaatttgtgggtgtgagagagctcgatatatgaatacttgtacatacttctcataacatgtgttttttttttcttaataaatgtggaaactt

SEQ ID NO: 80226 - protein, 218 aa, Arabidopsis thaliana
  peptide (1)..(218): Ceres Seq. ID no. 12654916
  misc_feature (33)..(97): Pfam Name: AP2 domain Pfam Description: AP2 domain
  misc_feature (1)..(218): Homolog of NCBI NO: 15239501 NR Description: transcription factor TINY; protein id: At5g25810.1
  misc_feature (4)..(212): Homolog of NCBI NO: 15239113 NR Description: transcription factor TINY, putative; protein id: [Arabidopsis thaliana] >gi|11282310|pir||T48518 transcription
  misc_feature (24)..(192): Homolog of NCBI NO: 15223860 NR Description: transcription factor TINY, putative; protein id:
  misc_feature (16)..(192): Homolog of NCBI NO: 15228171 NR Description: transcription factor TINY, putative; protein id: [Arabidopsis thaliana] >gi|2062174|gb|AAB63648.1| transcription
  misc_feature (16)..(192): Homolog of NCBI NO: 9279711 NR Description: transcription factor TINY-like protein
  misc_feature (18)..(197): Homolog of NCBI NO: 15233928 NR Description: transcription factor TINY, putative; protein id:
  misc_feature (20)..(205): Homolog of NCBI NO: 14140155 NR Description: putative AP2 domain transcription factor [Oryza
  misc_feature (1)..(188): Homolog of NCBI NO: 15232340 NR Description: transcription factor - like protein; protein id:
  misc_feature (5)..(132): Homolog of NCBI NO: 37536842 NR Description: putative DNA binding protein [Oryza sativa
  misc_feature (4)..(130): Homolog of NCBI NO: 34903650 NR Description: B1015E06.8 [Oryza sativa (japonica
MIASESTKSWEASAVRQENEEEKKKPVKDSGKHPVYRGVRKRNWGKWVSEIREPRKKSRIWLGTFPSPEMAARAHDVAALSIKGASAILNFPDLAGSFPRPSSLSPRDIQVAALKAAHMETSQSFSSSSSLTFSSSQSSSSLESLVSSSATGSEELGEIVELPSLGSSYDGLTQLGNEFIFSDSADLWPYPPQWSEGDYQMIPASLSQDWDLQGLYNY

SEQ ID NO: 80227 - protein, 149 aa, Arabidopsis thaliana
  peptide (1)..(149): Ceres Seq. ID no. 12654917
  misc_feature (1)..(149): Homolog of NCBI NO: 15239501 NR Description: transcription factor TINY; protein id: At5g25810.1
  misc_feature (1)..(143): Homolog of NCBI NO: 15239113 NR Description: transcription factor TINY, putative; protein id: [Arabidopsis thaliana] >gi|11282310|pir||T48518 transcription
  misc_feature (1)..(123): Homolog of NCBI NO: 15223860 NR Description: transcription factor TINY, putative; protein id:
  misc_feature (1)..(123): Homolog of NCBI NO: 15228171 NR Description: transcription factor TINY, putative; protein id: [Arabidopsis thaliana] >gi|2062174|gb|AAB63648.1| transcription
  misc_feature (1)..(123): Homolog of NCBI NO: 9279711 NR Description: transcription factor TINY-like protein
  misc_feature (1)..(128): Homolog of NCBI NO: 15233928 NR Description: transcription factor TINY, putative; protein id:
  misc_feature (1)..(136): Homolog of NCBI NO: 14140155 NR Description: putative AP2 domain transcription factor [Oryza
  misc_feature (1)..(119): Homolog of NCBI NO: 15232340 NR Description: transcription factor - like protein; protein id:
  misc_feature (1)..(63): Homolog of NCBI NO: 37536842 NR Description: putative DNA binding protein [Oryza sativa
  misc_feature (1)..(61): Homolog of NCBI NO: 34903650 NR Description: B1015E06.8 [Oryza sativa (japonica
MAARAHDVAALSIKGASAILNFPDLAGSFPRPSSLSPRDIQVAALKAAHMETSQSFSSSSSLTFSSSQSSSSLESLVSSSATGSEELGEIVELPSLGSSYDGLTQLGNEFIFSDSADLWPYPPQWSEGDYQMIPASLSQDWDLQGLYNY

SEQ ID NO: 80228 - DNA, 996 bp, Arabidopsis thaliana
  misc_feature (1)..(996): Ceres Seq. ID no. 12654922
  misc_feature: MA Experiment ID: 20000180 Result: Up-regulated in Transcription
  misc_feature: MA Experiment 20000180 PARAMETER Experiment Name: At_Germinating_Seeds_P Parameter: Age (hr) Value: 24 vs. 0
  misc_feature: MA Experiment 20000180 PARAMETER Experiment Name: At_Germinating_Seeds_P Parameter: Tissue Value: Germinating Seeds
  misc_feature: MA Experiment ID: 20000438 Result: Down-regulated in Transcription
  misc_feature: MA Experiment 20000438 PARAMETER Experiment Name: At_Shoots__P Parameter: Age (day) Value: 14
  misc_feature: MA Experiment 20000438 PARAMETER Experiment Name: At_Shoots__P Parameter: Tissue Value: Shoots vs. Whole Plant
  misc_feature: MA Experiment ID: 20000527 Result: Up-regulated in Transcription
  misc_feature: MA Experiment 20000527 PARAMETER Experiment Name: At_10percent_PEG_P Parameter: Age (day) Value: 20
  misc_feature: MA Experiment 20000527 PARAMETER Experiment Name: At_10percent_PEG_P Parameter: Organism Value: A. thaliana
  misc_feature: MA Experiment 20000527 PARAMETER Experiment Name: At_10percent_PEG_P Parameter: Plant Line Value: WS
  misc_feature: MA Experiment 20000527 PARAMETER Experiment Name: At_10percent_PEG_P Parameter: Timepoint (day) Value: 20
  misc_feature: MA Experiment 20000527 PARAMETER Experiment Name: At_10percent_PEG_P Parameter: Tissue Value: Whole Plant
  misc_feature: MA Experiment 20000527 PARAMETER Experiment Name: At_10percent_PEG_P Parameter: Treatment Value: 10percent PEG vs. No Treatment
  misc_feature: MA Experiment ID: 20000794 Result: Down-regulated in Transcription
  misc_feature: MA Experiment 20000794 PARAMETER Experiment Name: At_Petals_P Parameter: Age (day) Value: 23-25 days
  misc_feature: MA Experiment 20000794 PARAMETER Experiment Name: At_Petals_P Parameter: Plant Line Value: WS
  misc_feature: MA Experiment 20000794 PARAMETER Experiment Name: At_Petals_P Parameter: Tissue Value: Petals vs. Whole plant
  misc_feature: MA Experiment ID: 20001248 Result: Down-regulated in Transcription
  misc_feature: MA Experiment 20001248 PARAMETER Experiment Name: At_Far-red-induction_P Parameter: Age (day) Value: 7
  misc_feature: MA Experiment 20001248 PARAMETER Experiment Name: At_Far-red-induction_P Parameter: Light Value: Far-red vs. White
  misc_feature: MA Experiment 20001248 PARAMETER Experiment Name: At_Far-red-induction_P Parameter: Organism Value: A. thaliana
  misc_feature: MA Experiment 20001248 PARAMETER Experiment Name: At_Far-red-induction_P Parameter: Plant Line Value: Columbia
  misc_feature: MA Experiment 20001248 PARAMETER Experiment Name: At_Far-red-induction_P Parameter: Timepoint (hr) Value: 4
  misc_feature: MA Experiment 20001248 PARAMETER Experiment Name: At_Far-red-induction_P Parameter: Tissue Value: Whole Plant
  misc_feature: MA Experiment ID: 20001906 Result: Down-regulated in Transcription
  misc_feature: MA Experiment 20001906 PARAMETER Experiment Name: At_Drought_Reproduction_P Parameter: Age (day) Value: 35
  misc_feature: MA Experiment 20001906 PARAMETER Experiment Name: At_Drought_Reproduction_P Parameter: Organism Value: A. thaliana
  misc_feature: MA Experiment 20001906 PARAMETER Experiment Name: At_Drought_Reproduction_P Parameter: Plant Line Value: WS
  misc_feature: MA Experiment 20001906 PARAMETER Experiment Name: At_Drought_Reproduction_P Parameter: Timepoint (day) Value: 5
  misc_feature: MA Experiment 20001906 PARAMETER Experiment Name: At_Drought_Reproduction_P Parameter: Tissue Value: Siliques
  misc_feature: MA Experiment 20001906 PARAMETER Experiment Name: At_Drought_Reproduction_P Parameter: Treatment Value: Drought vs. No Drought
  misc_feature: MA Experiment ID: 20001911 Result: Down-regulated in Transcription
  misc_feature: MA Experiment 20001911 PARAMETER Experiment Name: At_Drought_Reproduction_P Parameter: Age (day) Value: 40
  misc_feature: MA Experiment 20001911 PARAMETER Experiment Name: At_Drought_Reproduction_P Parameter: Organism Value: A. thaliana
  misc_feature: MA Experiment 20001911 PARAMETER Experiment Name: At_Drought_Reproduction_P Parameter: Plant Line Value: WS
  misc_feature: MA Experiment 20001911 PARAMETER Experiment Name: At_Drought_Reproduction_P Parameter: Timepoint (day) Value: 10
  misc_feature: MA Experiment 20001911 PARAMETER Experiment Name: At_Drought_Reproduction_P Parameter: Tissue Value: Flowers
  misc_feature: MA Experiment 20001911 PARAMETER Experiment Name: At_Drought_Reproduction_P Parameter: Treatment Value: Drought vs. No Drought
atggaagatgaagcacatgaattcttccacacatctgattttgccgttgatgaccttttagttgatttctctaacgatgatgacgaagaaaacgatgttgttgctgattccaccactaccaccaccataaccgacagctctaacttctccgctgctgatcttcccagtttccacggtgatgttcaagacggcactagcttctccggtgacctttgtataccttctgatgatttggctgatgagttagagtggctttcgaacattgtggatgaatcattgtcgcctgaagatgtacacaagctcgagctaatatccggttttaagagtcgaccggacccgaaatccgataccggaagcccggaaaacccgaatagcagcagtccgatttttactaccgacgtttctgtaccggccaaagctagaagcaaacgctcacgcgccgctgcgtgtaattgggcctcacgtgggcttctcaaggaaacgttttacgacagtcctttcaccggagaaaccattctctctagccaacaacacttgtctccgccaacctcgccgcctttgttgatggctccgctagggaaaaagcaagccgttgatggaggacaccgacggaagaaggatgtttcttcaccggagtctggtggcgcagaggagagacggtgtctccactgcgccacggataagactccgcaatggcggacaggcccaatgggcccgaagacgttgtgcaacgcttgcggtgttaggtacaaatcgggacgtttagtgccggagtatcggcccgcggcgagtccgacgtttgtgctggcgaaacactcaaattctcatcggaaagttatggagctccggcgacagaaggagatgagtagggcccatcatgagttcatacatcaccatcacggtacggacactgccatgattttcgacgtttcatcggacggtgatgattacttgatccaccacaacgttggcccagatttcagacagcttatttga

SEQ ID NO: 80229 - protein, 331 aa, Arabidopsis thaliana
  peptide (1)..(331): Ceres Seq. ID no. 12654923
  misc_feature (1)..(331): Homolog of NCBI NO: 15239503 NR Description: GATA zinc finger protein; protein id: At5g25830.1
  misc_feature (1)..(155): Homolog of NCBI NO: 15233971 NR Description: GATA zinc finger protein; protein id: At4g32890.1
  misc_feature (207)..(331): Homolog of NCBI NO: 15233971 NR Description: GATA zinc finger protein; protein id: At4g32890.1
  misc_feature (35)..(328): Homolog of NCBI NO: 34909448 NR Description: OSJNBa0014K08.18 [Oryza sativa (japonica
  misc_feature (5)..(287): Homolog of NCBI NO: 15239343 NR Description: GATA zinc finger protein; protein id: At5g66320.1
  misc_feature (66)..(288): Homolog of NCBI NO: 37536778 NR Description: putative transcription factor [Oryza sativa
  misc_feature (120)..(300): Homolog of NCBI NO: 15225399 NR Description: GATA zinc finger protein; protein id: At2g45050.1
  misc_feature (11)..(287): Homolog of NCBI NO: 37572449 NR Description: AG-motif binding protein-4 [Nicotiana tabacum]
  misc_feature (13)..(294): Homolog of NCBI NO: 15230393 NR Description: GATA zinc finger protein; protein id: supported by cDNA: gi_17381183 [Arabidopsis thaliana]
  misc_feature (68)..(291): Homolog of NCBI NO: 15232355 NR Description: GATA zinc finger protein; protein id: supported by cDNA: gi_14190406, supported by cDNA: gi_14517394, by cDNA: gi_15215890 [Arabidopsis thaliana]
MEDEAHEFFHTSDFAVDDLLVDFSNDDDEENDVVADSTTTTTITDSSNFSAADLPSFHGDVQDGTSFSGDLCIPSDDLADELEWLSNIVDESLSPEDVHKLELISGFKSRPDPKSDTGSPENPNSSSPIFTTDVSVPAKARSKRSRAAACNWASRGLLKETFYDSPFTGETILSSQQHLSPPTSPPLLMAPLGKKQAVDGGHRRKKDVSSPESGGAEERRCLHCATDKTPQWRTGPMGPKTLCNACGVRYKSGRLVPEYRPAASPTFVLAKHSNSHRKVMELRRQKEMSRAHHEFIHHHHGTDTAMIFDVSSDGDDYLIHHNVGPDFRQLI

SEQ ID NO: 80230 - DNA, 1960 bp, Arabidopsis thaliana
  misc_feature (1)..(1960): Ceres Seq. ID no. 12654940
  misc_feature: MA Experiment ID: 20000182 Result: Up-regulated in Transcription
  misc_feature: MA Experiment 20000182 PARAMETER Experiment Name: At_2mM_SA_P Parameter: Age (day) Value: 14
  misc_feature: MA Experiment 20000182 PARAMETER Experiment Name: At_2mM_SA_P Parameter: Organism Value: A. thaliana
  misc_feature: MA Experiment 20000182 PARAMETER Experiment Name: At_2mM_SA_P Parameter: Plant Line Value: WS
  misc_feature: MA Experiment 20000182 PARAMETER Experiment Name: At_2mM_SA_P Parameter: Timepoint (hr) Value: 6
  misc_feature: MA Experiment 20000182 PARAMETER Experiment Name: At_2mM_SA_P Parameter: Tissue Value: Aerial
  misc_feature: MA Experiment 20000182 PARAMETER Experiment Name: At_2mM_SA_P Parameter: Treatment Value: 2mM SA vs. No Treatment
  misc_feature: MA Experiment ID: 20000288 Result: Up-regulated in Transcription
  misc_feature: MA Experiment 20000288 PARAMETER Experiment Name: At_Drought_P Parameter: Age (day) Value: 7
  misc_feature: MA Experiment 20000288 PARAMETER Experiment Name: At_Drought_P Parameter: Organism Value: A. thaliana
  misc_feature: MA Experiment 20000288 PARAMETER Experiment Name: At_Drought_P Parameter: Plant Line Value: WS
  misc_feature: MA Experiment 20000288 PARAMETER Experiment Name: At_Drought_P Parameter: Timepoint (hr) Value: 1
  misc_feature: MA Experiment 20000288 PARAMETER Experiment Name: At_Drought_P Parameter: Tissue Value: Whole Plant
  misc_feature: MA Experiment 20000288 PARAMETER Experiment Name: At_Drought_P Parameter: Treatment Value: Drought vs. No Drought
  misc_feature: MA Experiment ID: 20000438 Result: Down-regulated in Transcription
  misc_feature: MA Experiment 20000438 PARAMETER Experiment Name: At_Shoots__P Parameter: Age (day) Value: 14
  misc_feature: MA Experiment 20000438 PARAMETER Experiment Name: At_Shoots__P Parameter: Tissue Value: Shoots vs. Whole Plant
  misc_feature: MA Experiment ID: 20000460 Result: Up-regulated in Transcription
  misc_feature: MA Experiment 20000460 PARAMETER Experiment Name: At_10percent_PEG_P Parameter: Age (day) Value: 12
  misc_feature: MA Experiment 20000460 PARAMETER Experiment Name: At_10percent_PEG_P Parameter: Organism Value: A. thaliana
  misc_feature: MA Experiment 20000460 PARAMETER Experiment Name: At_10percent_PEG_P Parameter: Plant Line Value: WS
  misc_feature: MA Experiment 20000460 PARAMETER Experiment Name: At_10percent_PEG_P Parameter: Timepoint (day) Value: 12
  misc_feature: MA Experiment 20000460 PARAMETER Experiment Name: At_10percent_PEG_P Parameter: Tissue Value: Whole Plant
  misc_feature: MA Experiment 20000460 PARAMETER Experiment Name: At_10percent_PEG_P Parameter: Treatment Value: 10percent PEG vs. No Treatment
  misc_feature: MA Experiment ID: 20000527 Result: Up-regulated in Transcription
  misc_feature: MA Experiment 20000527 PARAMETER Experiment Name: At_10percent_PEG_P Parameter: Age (day) Value: 20
  misc_feature: MA Experiment 20000527 PARAMETER Experiment Name: At_10percent_PEG_P Parameter: Organism Value: A. thaliana
  misc_feature: MA Experiment 20000527 PARAMETER Experiment Name: At_10percent_PEG_P Parameter: Plant Line Value: WS
  misc_feature: MA Experiment 20000527 PARAMETER Experiment Name: At_10percent_PEG_P Parameter: Timepoint (day) Value: 20
  misc_feature: MA Experiment 20000527 PARAMETER Experiment Name: At_10percent_PEG_P Parameter: Tissue Value: Whole Plant
  misc_feature: MA Experiment 20000527 PARAMETER Experiment Name: At_10percent_PEG_P Parameter: Treatment Value: 10percent PEG vs. No Treatment
  misc_feature: MA Experiment ID: 20000573 Result: Down-regulated in Transcription
  misc_feature: MA Experiment 20000573 PARAMETER Experiment Name: At_100uM_ABA_Mutants__P Parameter: Organism Value: A. thaliana
  misc_feature: MA Experiment 20000573 PARAMETER Experiment Name: At_100uM_ABA_Mutants__P Parameter: Plant Line Value: CS22 vs. Ler wt
  misc_feature: MA Experiment 20000573 PARAMETER Experiment Name: At_100uM_ABA_Mutants__P Parameter: Timepoint (hr) Value: N/A
  misc_feature: MA Experiment 20000573 PARAMETER Experiment Name: At_100uM_ABA_Mutants__P Parameter: Tissue Value: Whole Plant
  misc_feature: MA Experiment 20000573 PARAMETER Experiment Name: At_100uM_ABA_Mutants__P Parameter: Treatment Value: None
  misc_feature: MA Experiment ID: 20000574 Result: Down-regulated in Transcription
  misc_feature: MA Experiment 20000574 PARAMETER Experiment Name: At_100uM_ABA_Mutants__P Parameter: Organism Value: A. thaliana
  misc_feature: MA Experiment 20000574 PARAMETER Experiment Name: At_100uM_ABA_Mutants__P Parameter: Plant Line Value: CS23 vs. Ler wt
  misc_feature: MA Experiment 20000574 PARAMETER Experiment Name: At_100uM_ABA_Mutants__P Parameter: Timepoint (hr) Value: N/A
  misc_feature: MA Experiment 20000574 PARAMETER Experiment Name: At_100uM_ABA_Mutants__P Parameter: Tissue Value: Whole Plant
  misc_feature: MA Experiment 20000574 PARAMETER Experiment Name: At_100uM_ABA_Mutants__P Parameter: Treatment Value: None
  misc_feature: MA Experiment ID: 20001557 Result: Up-regulated in Transcription
  misc_feature: MA Experiment 20001557 PARAMETER Experiment Name: At_Drought_Soil_Dry_P Parameter: Age (day) Value: 27
  misc_feature: MA Experiment 20001557 PARAMETER Experiment Name: At_Drought_Soil_Dry_P Parameter: Organism Value: A. thaliana
  misc_feature: MA Experiment 20001557 PARAMETER Experiment Name: At_Drought_Soil_Dry_P Parameter: Plant Line Value: WS
  misc_feature: MA Experiment 20001557 PARAMETER Experiment Name: At_Drought_Soil_Dry_P Parameter: Post Timepoint (hr) Value: 3
  misc_feature: MA Experiment 20001557 PARAMETER Experiment Name: At_Drought_Soil_Dry_P Parameter: Post-Treatment Value: Re-Water vs. No Drought
  misc_feature: MA Experiment 20001557 PARAMETER Experiment Name: At_Drought_Soil_Dry_P Parameter: Timepoint (day) Value: 13
  misc_feature: MA Experiment 20001557 PARAMETER Experiment Name: At_Drought_Soil_Dry_P Parameter: Treatment Value: Drought vs. No Drought
  misc_feature: MA Experiment ID: 20001905 Result: Up-regulated in Transcription
  misc_feature: MA Experiment 20001905 PARAMETER Experiment Name: At_Drought_Reproduction_P Parameter: Age (day) Value: 40
  misc_feature: MA Experiment 20001905 PARAMETER Experiment Name: At_Drought_Reproduction_P Parameter: Organism Value: A. thaliana
  misc_feature: MA Experiment 20001905 PARAMETER Experiment Name: At_Drought_Reproduction_P Parameter: Plant Line Value: WS
  misc_feature: MA Experiment 20001905 PARAMETER Experiment Name: At_Drought_Reproduction_P Parameter: Timepoint (day) Value: 10
  misc_feature: MA Experiment 20001905 PARAMETER Experiment Name: At_Drought_Reproduction_P Parameter: Tissue Value: Rosettes
  misc_feature: MA Experiment 20001905 PARAMETER Experiment Name: At_Drought_Reproduction_P Parameter: Treatment Value: Drought vs. No Drought
acctaaccagaccttcttcgcatcttcgtcttcttccttcgtgatctctcaaattctctcccttttaaagtcctaaatcaaaaccctaaacccataaatccaatccctccattcgaattcttcattctctctctctctctctctcacaattactgatcggttctgaaatttgtagctatgcaggcaacggctttatcatctgggttcaatcctctaacgaaacgtaaagatcacagatttcccaggtcatgctctcagagaaattctctgtctttgattcaatgcgatataaaagagagatctttcggagagtctatgacgatcacgaatcgtggattgagttttaagacgaatgtgtttgagcaagctcgttctgtgactggagactgttcttatgatgaaacttcagctaaagcacgttctcatgttgttgcagaagataagattggtgtcttgcttttgaatttaggtggtcctgaaactcttaacgatgttcaacctttcttgtataatctctttgctgatccggatattataaggcttcctagaccatttcagtttcttcaagggactatagctaagtttatatctgttgttcgtgctccgaaatctaaagaagggtatgctgctattggtggtggctctcctttgcgtaaaataactgatgagcaagcggatgctattaagatgtctttgcaagcgaagaacattgctgctaatgtctatgttggtatgcggtattggtatccgttcactgaggaggctgttcagcagataaagaaggacaaaattactagacttgttgtactgccattgtatcctcagtattctatctctacaacgggttcaagcatacgcgttctccaagatttattcagatccgtacctagctggagtgccggtagctattataaagtcctggtaccaaaggcgaggctatgtcaattctatggctgacctcattgagaaggagcttcaaactttctctgatcctaaggaggttatgatattcttcagtgcccatggtgttccggtcagctacgtagagaatgctggagatccgtaccagaagcagatggaagagtgtattgacttgataatggaagagctaaaagccagaggggttcttaacgaccataaattggcataccagagtcgtgttggccctgttcaatggctgaagccatacaccgatgaggttcttgtcgaccttggtaagagtggtgttaagagtctactagccgttccagtcagtttcgtgagtgagcacattgagacacttgaggagatagacatggagtatagggaattagctcttgagtcaggggtagagaactggggacgggtacccgcgctaggtctcacaccatccttcatcaccgacttagctgatgcagtgatagaatcacttccttcagcagaagcaatgtcaaacccaaatgcagtggttgactcagaagatagcgagtcgtcagatgctttcagttacattgtcaagatgttcttcggttcgattctggctttcgtcctacttctctccccaaagatgttccatgcgttccggaacctatagaatctcgttggttttgtgttaagtcttttcttggagaaatgtcttggttaaattcaatatatatagtccaatctattgaagtactagtacaccagctctaataagctgatgtgggtaagtagttcaatagattggactatgtatattaaatttgactaagagataaactagagaatgggaataaagaatgagaaacggtattagaaagttctttgaggaaatttagatgtattttaaattgaagatgcatttagctataaacatagtggctacgttcctcttagagatgaggagagaattatattctattattatttggtttcttttcttcgtttttgtatggtttcaatacttaattgtcaaaagtatcctataattttgttgttc

SEQ ID NO: 80231 - protein, 259 aa, Arabidopsis thaliana
  peptide (1)..(259): Ceres Seq. ID no. 12654941
  misc_feature (89)..(242): Pfam Name: Ferrochelatase Pfam Description: Ferrochelatase
  misc_feature (1)..(242): Homolog of NCBI NO: 30690097 NR Description: ferrochelatase-I [Arabidopsis thaliana]
  misc_feature (65)..(242): Homolog of NCBI NO: 7437214 NR Description: probable ferrochelatase (EC 4.99.1.1) - barley
  misc_feature (65)..(242): Homolog of NCBI NO: 1170242 NR Description: Ferrochelatase II, chloroplast precursor ferro- lyase) (Heme synthetase) >gi|7437215|pir||T05736 probable
  misc_feature (63)..(234): Homolog of NCBI NO: 1170239 NR Description: Ferrochelatase II, chloroplast precursor
  misc_feature (84)..(234): Homolog of NCBI NO: 3913808 NR Description: Ferrochelatase II, chloroplast precursor ferro- lyase) (Heme synthetase) >gi|2429618|dbj|BAA22284.1|
  misc_feature (76)..(234): Homolog of NCBI NO: 12082085 NR Description: ferrochelatase [Cucumis sativus]
  misc_feature (84)..(234): Homolog of NCBI NO: 7437212 NR Description: probable ferrochelatase (EC 4.99.1.1) - potato
  misc_feature (83)..(234): Homolog of NCBI NO: 15147828 NR Description: ferrochelatase [Nicotiana tabacum]
  misc_feature (76)..(234): Homolog of NCBI NO: 15227742 NR Description: putative ferrochelatase precusor; protein id: [Arabidopsis thaliana] >gi|3913871|sp|O04921|HMZ2_ARATH
  misc_feature (76)..(234): Homolog of NCBI NO: 2623990 NR Description: ferrochelatase [Arabidopsis thaliana]
MQATALSSGFNPLTKRKDHRFPRSCSQRNSLSLIQCDIKERSFGESMTITNRGLSFKTNVFEQARSVTGDCSYDETSAKARSHVVAEDKIGVLLLNLGGPETLNDVQPFLYNLFADPDIIRLPRPFQFLQGTIAKFISVVRAPKSKEGYAAIGGGSPLRKITDEQADAIKMSLQAKNIAANVYVGMRYWYPFTEEAVQQIKKDKITRLVVLPLYPQYSISTTGSSIRVLQDLFRSVPSWSAGSYYKVLVPKARLCQFYG

SEQ ID NO: 80232 - protein, 213 aa, Arabidopsis thaliana
  peptide (1)..(213): Ceres Seq. ID no. 12654942
  misc_feature (43)..(196): Pfam Name: Ferrochelatase Pfam Description: Ferrochelatase
  misc_feature (1)..(196): Homolog of NCBI NO: 30690097 NR Description: ferrochelatase-I [Arabidopsis thaliana]
  misc_feature (19)..(196): Homolog of NCBI NO: 7437214 NR Description: probable ferrochelatase (EC 4.99.1.1) - barley
  misc_feature (19)..(196): Homolog of NCBI NO: 1170242 NR Description: Ferrochelatase II, chloroplast precursor ferro- lyase) (Heme synthetase) >gi|7437215|pir||T05736 probable
  misc_feature (17)..(188): Homolog of NCBI NO: 1170239 NR Description: Ferrochelatase II, chloroplast precursor
  misc_feature (38)..(188): Homolog of NCBI NO: 3913808 NR Description: Ferrochelatase II, chloroplast precursor ferro- lyase) (Heme synthetase) >gi|2429618|dbj|BAA22284.1|
  misc_feature (30)..(188): Homolog of NCBI NO: 12082085 NR Description: ferrochelatase [Cucumis sativus]
  misc_feature (38)..(188): Homolog of NCBI NO: 7437212 NR Description: probable ferrochelatase (EC 4.99.1.1) - potato
  misc_feature (37)..(188): Homolog of NCBI NO: 15147828 NR Description: ferrochelatase [Nicotiana tabacum]
  misc_feature (30)..(188): Homolog of NCBI NO: 15227742 NR Description: putative ferrochelatase precusor; protein id: [Arabidopsis thaliana] >gi|3913871|sp|O04921|HMZ2_ARATH
  misc_feature (30)..(188): Homolog of NCBI NO: 2623990 NR Description: ferrochelatase [Arabidopsis thaliana]
MTITNRGLSFKTNVFEQARSVTGDCSYDETSAKARSHVVAEDKIGVLLLNLGGPETLNDVQPFLYNLFADPDIIRLPRPFQFLQGTIAKFISVVRAPKSKEGYAAIGGGSPLRKITDEQADAIKMSLQAKNIAANVYVGMRYWYPFTEEAVQQIKKDKITRLVVLPLYPQYSISTTGSSIRVLQDLFRSVPSWSAGSYYKVLVPKARLCQFYG

SEQ ID NO: 80233 - protein, 207 aa, Arabidopsis thaliana
  peptide (1)..(207): Ceres Seq. ID no. 12654943
  misc_feature (1)..(154): Pfam Name: Ferrochelatase Pfam Description: Ferrochelatase
  misc_feature (1)..(207): Homolog of NCBI NO: 30690097 NR Description: ferrochelatase-I [Arabidopsis thaliana]
  misc_feature (1)..(206): Homolog of NCBI NO: 7437214 NR Description: probable ferrochelatase (EC 4.99.1.1) - barley
  misc_feature (1)..(206): Homolog of NCBI NO: 1170242 NR Description: Ferrochelatase II, chloroplast precursor ferro- lyase) (Heme synthetase) >gi|7437215|pir||T05736 probable
  misc_feature (1)..(206): Homolog of NCBI NO: 1170239 NR Description: Ferrochelatase II, chloroplast precursor
  misc_feature (1)..(164): Homolog of NCBI NO: 3913808 NR Description: Ferrochelatase II, chloroplast precursor ferro- lyase) (Heme synthetase) >gi|2429618|dbj|BAA22284.1|
  misc_feature (1)..(164): Homolog of NCBI NO: 12082085 NR Description: ferrochelatase [Cucumis sativus]
  misc_feature (1)..(164): Homolog of NCBI NO: 7437212 NR Description: probable ferrochelatase (EC 4.99.1.1) - potato
  misc_feature (1)..(164): Homolog of NCBI NO: 15147828 NR Description: ferrochelatase [Nicotiana tabacum]
  misc_feature (1)..(164): Homolog of NCBI NO: 15227742 NR Description: putative ferrochelatase precusor; protein id: [Arabidopsis thaliana] >gi|3913871|sp|O04921|HMZ2_ARATH
  misc_feature (1)..(164): Homolog of NCBI NO: 2623990 NR Description: ferrochelatase [Arabidopsis thaliana]
MADLIEKELQTFSDPKEVMIFFSAHGVPVSYVENAGDPYQKQMEECIDLIMEELKARGVLNDHKLAYQSRVGPVQWLKPYTDEVLVDLGKSGVKSLLAVPVSFVSEHIETLEEIDMEYRELALESGVENWGRVPALGLTPSFITDLADAVIESLPSAEAMSNPNAVVDSEDSESSDAFSYIVKMFFGSILAFVLLLSPKMFHAFRNL

SEQ ID NO: 80234 - DNA, 2203 bp, Arabidopsis thaliana
  misc_feature (1)..(2203): Ceres Seq. ID no. 12654955
  misc_feature: MA Experiment ID: 20001906 Result: Up-regulated in Transcription
  misc_feature: MA Experiment 20001906 PARAMETER Experiment Name: At_Drought_Reproduction_P Parameter: Age (day) Value: 35
  misc_feature: MA Experiment 20001906 PARAMETER Experiment Name: At_Drought_Reproduction_P Parameter: Organism Value: A. thaliana
  misc_feature: MA Experiment 20001906 PARAMETER Experiment Name: At_Drought_Reproduction_P Parameter: Plant Line Value: WS
  misc_feature: MA Experiment 20001906 PARAMETER Experiment Name: At_Drought_Reproduction_P Parameter: Timepoint (day) Value: 5
  misc_feature: MA Experiment 20001906 PARAMETER Experiment Name: At_Drought_Reproduction_P Parameter: Tissue Value: Siliques
  misc_feature: MA Experiment 20001906 PARAMETER Experiment Name: At_Drought_Reproduction_P Parameter: Treatment Value: Drought vs. No Drought
acttttaatcctagtttcactgctcattcgtgtctttcttctatcaaggtctttctctggttaaatttggtgattatggacatggaaacatcttggagatttctcagaagtgtttgcttactttcatttatccttgggtctttttctgtctaccaaaccctttgtcttgttgacgctcaagaagacgccattgtaacactgcaagtagatgcttctaacgtgacacggcgaccgattcccgaaactctatttgggatcttctttgaggaaataaatcatgctggagcaggtggactatgggctgaacttgttagcaatagaggatttgaagctggtggacaaatcattccttccaatatctggccttggtccattattggagatgaatcatccatttatgttgttacagaccgttcttcgtgttttgagcgtaacaagattgctcttagaatggaagtcctttgtgacagcaactcttgtccgttaggaggagtcggggtttataacccgggttactggggcatgaacattgaagaagggaagaaatataaagtggtgttatatgtgcgttcgactggggacatcgatgtgtctgtgtcgtttacaagttctaatggatcagtgactcttgcgtcagaaaatattatagctttggcttctgatcttttaaattggacaaaaaaggaaatgcttttagaagcaaatggaacagataatggtgcaagacttcagtttacaactaccaaaaaaggttcaatttggtttgatcaagtctcagccatgcctatggatacttacaagggacatggtttcagaaatgaccttttccaaatgatggtcgatctaaaaccgcggtttatccgattcccgggtggttgttttgtggagggtgattggttaggcaatgcattccgctggaaagaaaccgtgagagcttgggaagagagacctggccattatggtgatgtttggaagtactggactgatgatggccttggccactttgaattctttcaacttgcagaagaccttggtgcatccccaatatgggtgtttaacaatgggatcagtcacaatgatcaagttgaaacaaaaaatgtcatgccttttgttcaagaagcgattgacggtatagagtttgctcgtggagattctaattctacatggggatcggttcgagctgcaatgggacatccagagccttttgaactgaaatatgttgcggttgggaatgaagattgttttaagagttactacagaggaaactatcttgaattctataatgctatcaaaaaagcttatccagatattaaaatcatctccaactgcgatgcatcggctaaaccgctcgatcacccggccgattactttgattaccacatttacactcttgcaagagacttgttttccaagtcccatgattttgacaatacaccgcgaaacggtccaaaggcttttgttagcgaatacgctgtaaacaaagcagatgctaaaaatggcaaccttttggccgctcttggtgaagcagctttcctccttggtttggaaaagaacagtgacattgtagaaatggttagctatgcacctctctttgtcaacacaaacgatagaaggtggatccctgatgcaatagtttttaactcgtctcatctatatggaactcctagctattgggtccaacacttcttcaccgagtcaagcggagcaactcttctcaattctacacttaagggaaagacttcttctgttgaagcatctgccatctctttccaaaccaatggcaaagattacatacagatcaaggctgtaaactttggagaacaatcagtaaatctaaaggtagcagtgacaggattgatggcaaaattttatggatccaaaaagaaagtacttacatctgccagtgtgatggatgagaactctttttcaaacccaaatatgattgtgccacaagaaagtttgctggagatgactgagcaggaagaccttatgtttgttctcccgccgcactcgttctcttccttcgatttgttgacagaatctgaaaatgtcatcaagatgccaatatctgattcatacaagaaaacttcaacaatgtgaagagaaacatcatcttggagactttcatgtcttttgtctttactcttcagtggttattaaacacataaacctatatgttcgtgaataataccaaagttagttg

SEQ ID NO: 80235 - protein, 699 aa, Arabidopsis thaliana
  peptide (1)..(699): Ceres Seq. ID no. 12654956
  misc_feature (101)..(262): Pfam Name: Carbohydrate binding domain Pfam Description: Carbohydrate binding domain
  misc_feature (26)..(699): Homolog of NCBI NO: 15228368 NR Description: glycosyl hydrolase family 51; protein id:
  misc_feature (26)..(699): Homolog of NCBI NO: 13937191 NR Description: AT3g10740/T7M13_18 [Arabidopsis thaliana]
  misc_feature (26)..(699): Homolog of NCBI NO: 29825623 NR Description: alpha-L-arabinofuranosidase [Arabidopsis thaliana]
  misc_feature (38)..(697): Homolog of NCBI NO: 33151175 NR Description: alpha-L-arabinofuranosidase [Malus x domestica]
  misc_feature (40)..(683): Homolog of NCBI NO: 16417958 NR Description: arabinosidase ARA-1 [Lycopersicon esculentum]
  misc_feature (55)..(687): Homolog of NCBI NO: 13398414 NR Description: arabinoxylan arabinofuranohydrolase isoenzyme
  misc_feature (36)..(684): Homolog of NCBI NO: 13398412 NR Description: arabinoxylan arabinofuranohydrolase isoenzyme
  misc_feature (55)..(684): Homolog of NCBI NO: 38347003 NR Description: OSJNBb0058J09.4 [Oryza sativa (japonica
  misc_feature (67)..(680): Homolog of NCBI NO: 22324432 NR Description: putative arabinoxylan narabinofuranohydrolase
  misc_feature (370)..(699): Homolog of NCBI NO: 5107819 NR Description: contains similarity to arabinosidase [Arabidopsis
TFNPSFTAHSCLSSIKVFLWLNLVIMDMETSWRFLRSVCLLSFILGSFSVYQTLCLVDAQEDAIVTLQVDASNVTRRPIPETLFGIFFEEINHAGAGGLWAELVSNRGFEAGGQIIPSNIWPWSIIGDESSIYVVTDRSSCFERNKIALRMEVLCDSNSCPLGGVGVYNPGYWGMNIEEGKKYKVVLYVRSTGDIDVSVSFTSSNGSVTLASENIIALASDLLNWTKKEMLLEANGTDNGARLQFTTTKKGSIWFDQVSAMPMDTYKGHGFRNDLFQMMVDLKPRFIRFPGGCFVEGDWLGNAFRWKETVRAWEERPGHYGDVWKYWTDDGLGHFEFFQLAEDLGASPIWVFNNGISHNDQVETKNVMPFVQEAIDGIEFARGDSNSTWGSVRAAMGHPEPFELKYVAVGNEDCFKSYYRGNYLEFYNAIKKAYPDIKIISNCDASAKPLDHPADYFDYHIYTLARDLFSKSHDFDNTPRNGPKAFVSEYAVNKADAKNGNLLAALGEAAFLLGLEKNSDIVEMVSYAPLFVNTNDRRWIPDAIVFNSSHLYGTPSYWVQHFFTESSGATLLNSTLKGKTSSVEASAISFQTNGKDYIQIKAVNFGEQSVNLKVAVTGLMAKFYGSKKKVLTSASVMDENSFSNPNMIVPQESLLEMTEQEDLMFVLPPHSFSSFDLLTESENVIKMPISDSYKKTSTM

SEQ ID NO: 80236 - protein, 674 aa, Arabidopsis thaliana
  peptide (1)..(674): Ceres Seq. ID no. 12654957
  misc_feature (76)..(237): Pfam Name: Carbohydrate binding domain Pfam Description: Carbohydrate binding domain
  misc_feature (1)..(674): Homolog of NCBI NO: 15228368 NR Description: glycosyl hydrolase family 51; protein id:
  misc_feature (1)..(674): Homolog of NCBI NO: 13937191 NR Description: AT3g10740/T7M13_18 [Arabidopsis thaliana]
  misc_feature (1)..(674): Homolog of NCBI NO: 29825623 NR Description: alpha-L-arabinofuranosidase [Arabidopsis thaliana]
  misc_feature (13)..(672): Homolog of NCBI NO: 33151175 NR Description: alpha-L-arabinofuranosidase [Malus x domestica]
  misc_feature (15)..(658): Homolog of NCBI NO: 16417958 NR Description: arabinosidase ARA-1 [Lycopersicon esculentum]
  misc_feature (30)..(662): Homolog of NCBI NO: 13398414 NR Description: arabinoxylan arabinofuranohydrolase isoenzyme
  misc_feature (11)..(659): Homolog of NCBI NO: 13398412 NR Description: arabinoxylan arabinofuranohydrolase isoenzyme
  misc_feature (30)..(659): Homolog of NCBI NO: 38347003 NR Description: OSJNBb0058J09.4 [Oryza sativa (japonica
  misc_feature (42)..(655): Homolog of NCBI NO: 22324432 NR Description: putative arabinoxylan narabinofuranohydrolase
  misc_feature (345)..(674): Homolog of NCBI NO: 5107819 NR Description: contains similarity to arabinosidase [Arabidopsis
MDMETSWRFLRSVCLLSFILGSFSVYQTLCLVDAQEDAIVTLQVDASNVTRRPIPETLFGIFFEEINHAGAGGLWAELVSNRGFEAGGQIIPSNIWPWSIIGDESSIYVVTDRSSCFERNKIALRMEVLCDSNSCPLGGVGVYNPGYWGMNIEEGKKYKVVLYVRSTGDIDVSVSFTSSNGSVTLASENIIALASDLLNWTKKEMLLEANGTDNGARLQFTTTKKGSIWFDQVSAMPMDTYKGHGFRNDLFQMMVDLKPRFIRFPGGCFVEGDWLGNAFRWKETVRAWEERPGHYGDVWKYWTDDGLGHFEFFQLAEDLGASPIWVFNNGISHNDQVETKNVMPFVQEAIDGIEFARGDSNSTWGSVRAAMGHPEPFELKYVAVGNEDCFKSYYRGNYLEFYNAIKKAYPDIKIISNCDASAKPLDHPADYFDYHIYTLARDLFSKSHDFDNTPRNGPKAFVSEYAVNKADAKNGNLLAALGEAAFLLGLEKNSDIVEMVSYAPLFVNTNDRRWIPDAIVFNSSHLYGTPSYWVQHFFTESSGATLLNSTLKGKTSSVEASAISFQTNGKDYIQIKAVNFGEQSVNLKVAVTGLMAKFYGSKKKVLTSASVMDENSFSNPNMIVPQESLLEMTEQEDLMFVLPPHSFSSFDLLTESENVIKMPISDSYKKTSTM

SEQ ID NO: 80237 - protein, 672 aa, Arabidopsis thaliana
  peptide (1)..(672): Ceres Seq. ID no. 12654958
  misc_feature (74)..(235): Pfam Name: Carbohydrate binding domain Pfam Description: Carbohydrate binding domain
  misc_feature (1)..(672): Homolog of NCBI NO: 15228368 NR Description: glycosyl hydrolase family 51; protein id:
  misc_feature (1)..(672): Homolog of NCBI NO: 13937191 NR Description: AT3g10740/T7M13_18 [Arabidopsis thaliana]
  misc_feature (1)..(672): Homolog of NCBI NO: 29825623 NR Description: alpha-L-arabinofuranosidase [Arabidopsis thaliana]
  misc_feature (11)..(670): Homolog of NCBI NO: 33151175 NR Description: alpha-L-arabinofuranosidase [Malus x domestica]
  misc_feature (13)..(656): Homolog of NCBI NO: 16417958 NR Description: arabinosidase ARA-1 [Lycopersicon esculentum]
  misc_feature (28)..(660): Homolog of NCBI NO: 13398414 NR Description: arabinoxylan arabinofuranohydrolase isoenzyme
  misc_feature (9)..(657): Homolog of NCBI NO: 13398412 NR Description: arabinoxylan arabinofuranohydrolase isoenzyme
  misc_feature (28)..(657): Homolog of NCBI NO: 38347003 NR Description: OSJNBb0058J09.4 [Oryza sativa (japonica
  misc_feature (40)..(653): Homolog of NCBI NO: 22324432 NR Description: putative arabinoxylan narabinofuranohydrolase
  misc_feature (343)..(672): Homolog of NCBI NO: 5107819 NR Description: contains similarity to arabinosidase [Arabidopsis
METSWRFLRSVCLLSFILGSFSVYQTLCLVDAQEDAIVTLQVDASNVTRRPIPETLFGIFFEEINHAGAGGLWAELVSNRGFEAGGQIIPSNIWPWSIIGDESSIYVVTDRSSCFERNKIALRMEVLCDSNSCPLGGVGVYNPGYWGMNIEEGKKYKVVLYVRSTGDIDVSVSFTSSNGSVTLASENIIALASDLLNWTKKEMLLEANGTDNGARLQFTTTKKGSIWFDQVSAMPMDTYKGHGFRNDLFQMMVDLKPRFIRFPGGCFVEGDWLGNAFRWKETVRAWEERPGHYGDVWKYWTDDGLGHFEFFQLAEDLGASPIWVFNNGISHNDQVETKNVMPFVQEAIDGIEFARGDSNSTWGSVRAAMGHPEPFELKYVAVGNEDCFKSYYRGNYLEFYNAIKKAYPDIKIISNCDASAKPLDHPADYFDYHIYTLARDLFSKSHDFDNTPRNGPKAFVSEYAVNKADAKNGNLLAALGEAAFLLGLEKNSDIVEMVSYAPLFVNTNDRRWIPDAIVFNSSHLYGTPSYWVQHFFTESSGATLLNSTLKGKTSSVEASAISFQTNGKDYIQIKAVNFGEQSVNLKVAVTGLMAKFYGSKKKVLTSASVMDENSFSNPNMIVPQESLLEMTEQEDLMFVLPPHSFSSFDLLTESENVIKMPISDSYKKTSTM

SEQ ID NO: 80238 - DNA, 2112 bp, Arabidopsis thaliana
  misc_feature (1)..(2112): Ceres Seq. ID no. 12654963
  misc_feature: MA Experiment ID: 20001910 Result: Up-regulated in Transcription
  misc_feature: MA Experiment 20001910 PARAMETER Experiment Name: At_Drought_Reproduction_P Parameter: Age (day) Value: 37
  misc_feature: MA Experiment 20001910 PARAMETER Experiment Name: At_Drought_Reproduction_P Parameter: Organism Value: A. thaliana
  misc_feature: MA Experiment 20001910 PARAMETER Experiment Name: At_Drought_Reproduction_P Parameter: Plant Line Value: WS
  misc_feature: MA Experiment 20001910 PARAMETER Experiment Name: At_Drought_Reproduction_P Parameter: Timepoint (day) Value: 7
  misc_feature: MA Experiment 20001910 PARAMETER Experiment Name: At_Drought_Reproduction_P Parameter: Tissue Value: Flowers
  misc_feature: MA Experiment 20001910 PARAMETER Experiment Name: At_Drought_Reproduction_P Parameter: Treatment Value: Drought vs. No Drought
atggcttcaccgtactcgtccgacgatatccattctccggtgaactcaacggtcgttgcaatagacaaagagaaacatagttcttacgctgttcgttgggccgtcgaccatctcctcaatatgattcacaatcccgtcatgattcttgtccatgttcgtaccaaaaattcaaaccatggagccaacttgaacaatgatgatctaaatcagctttttattccatatcgaggatattgtgcgcgaaaaggggttgttctagacgattccgacgtagcaaaaacaatcttggattacgttaataacaacctggttaacaatcttgtattgggagcatccacgaagaacaccttcgctaggtcttttatgtttagtaaaccacatgaggtgcaatctagcataatgaaatcgacgcctgatttttgttcggtgtatgtcatttctaaaggagggaaagttcagtcttcccgaccagctcaaagacctatcaccaatacgcttgccccgcctcgtgttccatcctctggctttttaatccaatctttatccgatagcgagcaagatctcatacctagggtccagcgtagtgcaaggaacaaacctaatgagactacttatccgcataatcgtgccgccttcaacacgacgcaaaaaggttacaaaagccctataaatgggtcgatggatttcaacaacggctttaatcaagctgccttccaaagaaatcccacgttacaaagttcgttttctgatgaatctgatggtgggtttggagtgatgggttcagttgatctctcttctcaaaatagtatggatttttatcatggtgcatcgagttcttcagaagagtcaattccacaatcaactaaagatattgaagctgagatgagaaggctaaagcttgaacttaagcaaactatggacatgtatagctcagcttgtaaagaagcacttacggcaaaaagaaaggcaaacgagctaaatcaatggaagatagaagaagctcgtaaattcgagaaagcgaggctttctgaagaagcagcattggcagttgctgaaatcgagaaagcaaagtgtagaacagccgtagaagcagctgagaaagctcaaagaatggctgaactagaaggacaaagaaggaagcaagcagagatgaaagctgtaagtgaagaaaaggacaaagaccgcgcagtgagtgctttggcacataacgatgttcgctacagaaaatatagtatagaagagatcgaagaagctacagagaggtttgcaaatcataggaagattggtgaaggaggatatggacctgtgtacaatggtgaacttgaccacactcctgttgccattaaagttttaagacctgatgctgctcaaggaaaaaaacaatttcaacaagaagttgaggttctatgttccataaggcatcctcacatggttcttctccttggtgcatgtcctgaatatggatgtttggtttacgagttcatggaaaatgggagcttagaggatagactttttcgtactggaaactctccaccgctttcgtggaggaaacgttttgaaatagcggcggagattgctaccgcactctcattccttcatcaagctaagccagaacctttagttcaccgcgacctaaaaccagccaatatactcttagacaaaaactacgtgagcaagatcagcgacgttggtttagcgcggttagtccccgcatcgatagctgatagcgtcacgcaattccacatgacatctgcggcaggaacgttttgttacatagaccctgaataccaacaaacaggaatgttaaccacaaaatcagacgtatactcattggggatattgctacttcagattataaccggaaggcctcccatggggctggctcaccaagtttcaagggcaattagtaaaggaactttcaaggaaatgcttgaccccgttgtgcctgattggcctgtacaagaggctcaatcttttgctactctagcgttgaaatgtgcggagctaagaaaaagagatagaccagatcttgggaaggaagtagtcccacatcttattagattaaaaaactttgggaatgatggtgatgagagaactaacgaatggatatga

SEQ ID NO: 80239 - protein, 703 aa, Arabidopsis thaliana
  peptide (1)..(703): Ceres Seq. ID no. 12654964
  misc_feature (422)..(624): Pfam Name: Protein kinase domain Pfam Description: Protein kinase domain
  misc_feature (1)..(696): Homolog of NCBI NO: 15239834 NR Description: putative receptor - like kinase; protein id:
  misc_feature (84)..(698): Homolog of NCBI NO: 21902013 NR Description: putative serine threonine kinase [Oryza sativa
  misc_feature (18)..(152): Homolog of NCBI NO: 21902013 NR Description: putative serine threonine kinase [Oryza sativa
  misc_feature (179)..(694): Homolog of NCBI NO: 15224129 NR Description: putative protein kinase; protein id: At2g24370.1
  misc_feature (19)..(64): Homolog of NCBI NO: 15224129 NR Description: putative protein kinase; protein id: At2g24370.1
  misc_feature (19)..(694): Homolog of NCBI NO: 15238484 NR Description: putative protein; protein id: At5g35380.1
  misc_feature (52)..(694): Homolog of NCBI NO: 10178101 NR Description: receptor-like protein kinase [Arabidopsis
  misc_feature (82)..(694): Homolog of NCBI NO: 14719286 NR Description: serine threonine kinase 1 [Zea mays]
  misc_feature (82)..(694): Homolog of NCBI NO: 18092335 NR Description: serine threonine kinase [Zea mays]
  misc_feature (84)..(694): Homolog of NCBI NO: 15219360 NR Description: protein kinase, putative; protein id: At1g16760.1
MASPYSSDDIHSPVNSTVVAIDKEKHSSYAVRWAVDHLLNMIHNPVMILVHVRTKNSNHGANLNNDDLNQLFIPYRGYCARKGVVLDDSDVAKTILDYVNNNLVNNLVLGASTKNTFARSFMFSKPHEVQSSIMKSTPDFCSVYVISKGGKVQSSRPAQRPITNTLAPPRVPSSGFLIQSLSDSEQDLIPRVQRSARNKPNETTYPHNRAAFNTTQKGYKSPINGSMDFNNGFNQAAFQRNPTLQSSFSDESDGGFGVMGSVDLSSQNSMDFYHGASSSSEESIPQSTKDIEAEMRRLKLELKQTMDMYSSACKEALTAKRKANELNQWKIEEARKFEKARLSEEAALAVAEIEKAKCRTAVEAAEKAQRMAELEGQRRKQAEMKAVSEEKDKDRAVSALAHNDVRYRKYSIEEIEEATERFANHRKIGEGGYGPVYNGELDHTPVAIKVLRPDAAQGKKQFQQEVEVLCSIRHPHMVLLLGACPEYGCLVYEFMENGSLEDRLFRTGNSPPLSWRKRFEIAAEIATALSFLHQAKPEPLVHRDLKPANILLDKNYVSKISDVGLARLVPASIADSVTQFHMTSAAGTFCYIDPEYQQTGMLTTKSDVYSLGILLLQIITGRPPMGLAHQVSRAISKGTFKEMLDPVVPDWPVQEAQSFATLALKCAELRKRDRPDLGKEVVPHLIRLKNFGNDGDERTNEWI

SEQ ID NO: 80240 - protein, 663 aa, Arabidopsis thaliana
  peptide (1)..(663): Ceres Seq. ID no. 12654965
  misc_feature (382)..(584): Pfam Name: Protein kinase domain Pfam Description: Protein kinase domain
  misc_feature (1)..(656): Homolog of NCBI NO: 15239834 NR Description: putative receptor - like kinase; protein id:
  misc_feature (44)..(658): Homolog of NCBI NO: 21902013 NR Description: putative serine threonine kinase [Oryza sativa
  misc_feature (1)..(112): Homolog of NCBI NO: 21902013 NR Description: putative serine threonine kinase [Oryza sativa
  misc_feature (139)..(654): Homolog of NCBI NO: 15224129 NR Description: putative protein kinase; protein id: At2g24370.1
  misc_feature (1)..(24): Homolog of NCBI NO: 15224129 NR Description: putative protein kinase; protein id: At2g24370.1
  misc_feature (1)..(654): Homolog of NCBI NO: 15238484 NR Description: putative protein; protein id: At5g35380.1
  misc_feature (12)..(654): Homolog of NCBI NO: 10178101 NR Description: receptor-like protein kinase [Arabidopsis
  misc_feature (42)..(654): Homolog of NCBI NO: 14719286 NR Description: serine threonine kinase 1 [Zea mays]
  misc_feature (42)..(654): Homolog of NCBI NO: 18092335 NR Description: serine threonine kinase [Zea mays]
  misc_feature (44)..(654): Homolog of NCBI NO: 15219360 NR Description: protein kinase, putative; protein id: At1g16760.1
MIHNPVMILVHVRTKNSNHGANLNNDDLNQLFIPYRGYCARKGVVLDDSDVAKTILDYVNNNLVNNLVLGASTKNTFARSFMFSKPHEVQSSIMKSTPDFCSVYVISKGGKVQSSRPAQRPITNTLAPPRVPSSGFLIQSLSDSEQDLIPRVQRSARNKPNETTYPHNRAAFNTTQKGYKSPINGSMDFNNGFNQAAFQRNPTLQSSFSDESDGGFGVMGSVDLSSQNSMDFYHGASSSSEESIPQSTKDIEAEMRRLKLELKQTMDMYSSACKEALTAKRKANELNQWKIEEARKFEKARLSEEAALAVAEIEKAKCRTAVEAAEKAQRMAELEGQRRKQAEMKAVSEEKDKDRAVSALAHNDVRYRKYSIEEIEEATERFANHRKIGEGGYGPVYNGELDHTPVAIKVLRPDAAQGKKQFQQEVEVLCSIRHPHMVLLLGACPEYGCLVYEFMENGSLEDRLFRTGNSPPLSWRKRFEIAAEIATALSFLHQAKPEPLVHRDLKPANILLDKNYVSKISDVGLARLVPASIADSVTQFHMTSAAGTFCYIDPEYQQTGMLTTKSDVYSLGILLLQIITGRPPMGLAHQVSRAISKGTFKEMLDPVVPDWPVQEAQSFATLALKCAELRKRDRPDLGKEVVPHLIRLKNFGNDGDERTNEWI

SEQ ID NO: 80241 - protein, 657 aa, Arabidopsis thaliana
  peptide (1)..(657): Ceres Seq. ID no. 12654966
  misc_feature (376)..(578): Pfam Name: Protein kinase domain Pfam Description: Protein kinase domain
  misc_feature (1)..(650): Homolog of NCBI NO: 15239834 NR Description: putative receptor - like kinase; protein id:
  misc_feature (38)..(652): Homolog of NCBI NO: 21902013 NR Description: putative serine threonine kinase [Oryza sativa
  misc_feature (1)..(106): Homolog of NCBI NO: 21902013 NR Description: putative serine threonine kinase [Oryza sativa
  misc_feature (133)..(648): Homolog of NCBI NO: 15224129 NR Description: putative protein kinase; protein id: At2g24370.1
  misc_feature (1)..(18): Homolog of NCBI NO: 15224129 NR Description: putative protein kinase; protein id: At2g24370.1
  misc_feature (1)..(648): Homolog of NCBI NO: 15238484 NR Description: putative protein; protein id: At5g35380.1
  misc_feature (6)..(648): Homolog of NCBI NO: 10178101 NR Description: receptor-like protein kinase [Arabidopsis
  misc_feature (36)..(648): Homolog of NCBI NO: 14719286 NR Description: serine threonine kinase 1 [Zea mays]
  misc_feature (36)..(648): Homolog of NCBI NO: 18092335 NR Description: serine threonine kinase [Zea mays]
  misc_feature (38)..(648): Homolog of NCBI NO: 15219360 NR Description: protein kinase, putative; protein id: At1g16760.1
MILVHVRTKNSNHGANLNNDDLNQLFIPYRGYCARKGVVLDDSDVAKTILDYVNNNLVNNLVLGASTKNTFARSFMFSKPHEVQSSIMKSTPDFCSVYVISKGGKVQSSRPAQRPITNTLAPPRVPSSGFLIQSLSDSEQDLIPRVQRSARNKPNETTYPHNRAAFNTTQKGYKSPINGSMDFNNGFNQAAFQRNPTLQSSFSDESDGGFGVMGSVDLSSQNSMDFYHGASSSSEESIPQSTKDIEAEMRRLKLELKQTMDMYSSACKEALTAKRKANELNQWKIEEARKFEKARLSEEAALAVAEIEKAKCRTAVEAAEKAQRMAELEGQRRKQAEMKAVSEEKDKDRAVSALAHNDVRYRKYSIEEIEEATERFANHRKIGEGGYGPVYNGELDHTPVAIKVLRPDAAQGKKQFQQEVEVLCSIRHPHMVLLLGACPEYGCLVYEFMENGSLEDRLFRTGNSPPLSWRKRFEIAAEIATALSFLHQAKPEPLVHRDLKPANILLDKNYVSKISDVGLARLVPASIADSVTQFHMTSAAGTFCYIDPEYQQTGMLTTKSDVYSLGILLLQIITGRPPMGLAHQVSRAISKGTFKEMLDPVVPDWPVQEAQSFATLALKCAELRKRDRPDLGKEVVPHLIRLKNFGNDGDERTNEWI

SEQ ID NO: 80242 - DNA, 1867 bp, Arabidopsis thaliana
  misc_feature (1)..(1867): Ceres Seq. ID no. 12655002
  misc_feature: MA Experiment ID: 20000166 Result: Up-regulated in Transcription
  misc_feature: MA Experiment 20000166 PARAMETER Experiment Name: At_100uM_ABA_P Parameter: Age (day) Value: 14
  misc_feature: MA Experiment 20000166 PARAMETER Experiment Name: At_100uM_ABA_P Parameter: Organism Value: A. thaliana
  misc_feature: MA Experiment 20000166 PARAMETER Experiment Name: At_100uM_ABA_P Parameter: Plant Line Value: WS
  misc_feature: MA Experiment 20000166 PARAMETER Experiment Name: At_100uM_ABA_P Parameter: Timepoint (hr) Value: 1
  misc_feature: MA Experiment 20000166 PARAMETER Experiment Name: At_100uM_ABA_P Parameter: Tissue Value: Aerial
  misc_feature: MA Experiment 20000166 PARAMETER Experiment Name: At_100uM_ABA_P Parameter: Treatment Value: 100uM ABA vs. No Treatment
  misc_feature: MA Experiment ID: 20000171 Result: Down-regulated in Transcription
  misc_feature: MA Experiment 20000171 PARAMETER Experiment Name: At_42deg_Heat_P Parameter: Age (day) Value: 14
  misc_feature: MA Experiment 20000171 PARAMETER Experiment Name: At_42deg_Heat_P Parameter: Organism Value: A. thaliana
  misc_feature: MA Experiment 20000171 PARAMETER Experiment Name: At_42deg_Heat_P Parameter: Plant Line Value: WS
  misc_feature: MA Experiment 20000171 PARAMETER Experiment Name: At_42deg_Heat_P Parameter: Temperature (deg C) Value: 42 vs. 22
  misc_feature: MA Experiment 20000171 PARAMETER Experiment Name: At_42deg_Heat_P Parameter: Timepoint (hr) Value: 1
  misc_feature: MA Experiment 20000171 PARAMETER Experiment Name: At_42deg_Heat_P Parameter: Tissue Value: Aerial
  misc_feature: MA Experiment ID: 20000173 Result: Down-regulated in Transcription
  misc_feature: MA Experiment 20000173 PARAMETER Experiment Name: At_42deg_Heat_P Parameter: Age (day) Value: 14
  misc_feature: MA Experiment 20000173 PARAMETER Experiment Name: At_42deg_Heat_P Parameter: Organism Value: A. thaliana
  misc_feature: MA Experiment 20000173 PARAMETER Experiment Name: At_42deg_Heat_P Parameter: Plant Line Value: WS
  misc_feature: MA Experiment 20000173 PARAMETER Experiment Name: At_42deg_Heat_P Parameter: Temperature (deg C) Value: 42 vs. 22
  misc_feature: MA Experiment 20000173 PARAMETER Experiment Name: At_42deg_Heat_P Parameter: Timepoint (hr) Value: 6
  misc_feature: MA Experiment 20000173 PARAMETER Experiment Name: At_42deg_Heat_P Parameter: Tissue Value: Aerial
  misc_feature: MA Experiment ID: 20000180 Result: Up-regulated in Transcription
  misc_feature: MA Experiment 20000180 PARAMETER Experiment Name: At_Germinating_Seeds_P Parameter: Age (hr) Value: 24 vs. 0
  misc_feature: MA Experiment 20000180 PARAMETER Experiment Name: At_Germinating_Seeds_P Parameter: Tissue Value: Germinating Seeds
  misc_feature: MA Experiment ID: 20000182 Result: Up-regulated in Transcription
  misc_feature: MA Experiment 20000182 PARAMETER Experiment Name: At_2mM_SA_P Parameter: Age (day) Value: 14
  misc_feature: MA Experiment 20000182 PARAMETER Experiment Name: At_2mM_SA_P Parameter: Organism Value: A. thaliana
  misc_feature: MA Experiment 20000182 PARAMETER Experiment Name: At_2mM_SA_P Parameter: Plant Line Value: WS
  misc_feature: MA Experiment 20000182 PARAMETER Experiment Name: At_2mM_SA_P Parameter: Timepoint (hr) Value: 6
  misc_feature: MA Experiment 20000182 PARAMETER Experiment Name: At_2mM_SA_P Parameter: Tissue Value: Aerial
  misc_feature: MA Experiment 20000182 PARAMETER Experiment Name: At_2mM_SA_P Parameter: Treatment Value: 2mM SA vs. No Treatment
  misc_feature: MA Experiment ID: 20000184 Result: Down-regulated in Transcription
  misc_feature: MA Experiment 20000184 PARAMETER Experiment Name: At_Shoots__P Parameter: Age (day) Value: 7
  misc_feature: MA Experiment 20000184 PARAMETER Experiment Name: At_Shoots__P Parameter: Tissue Value: Shoots vs. Whole Plant
  misc_feature: MA Experiment ID: 20000185 Result: Down-regulated in Transcription
  misc_feature: MA Experiment 20000185 PARAMETER Experiment Name: At_Roots__P Parameter: Age (day) Value: 7 vs. 21
  misc_feature: MA Experiment 20000185 PARAMETER Experiment Name: At_Roots__P Parameter: Organism Value: A. thaliana
  misc_feature: MA Experiment 20000185 PARAMETER Experiment Name: At_Roots__P Parameter: Tissue Value: Roots vs. Whole Plant
  misc_feature: MA Experiment ID: 20000213 Result: Up-regulated in Transcription
  misc_feature: MA Experiment 20000213 PARAMETER Experiment Name: At_4deg_Cold_P Parameter: Timepoint (hr) Value: 2
  misc_feature: MA Experiment ID: 20000234 Result: Down-regulated in Transcription
  misc_feature: MA Experiment 20000234 PARAMETER Experiment Name: At_Siliques_P Parameter: Age (day) Value: 21
  misc_feature: MA Experiment 20000234 PARAMETER Experiment Name: At_Siliques_P Parameter: Organism Value: A. thaliana
  misc_feature: MA Experiment 20000234 PARAMETER Experiment Name: At_Siliques_P Parameter: Plant Line Value: WS
  misc_feature: MA Experiment 20000234 PARAMETER Experiment Name: At_Siliques_P Parameter: Tissue Value: Less Than 5mm Siliques vs. Whole Plant
  misc_feature: MA Experiment ID: 20000235 Result: Down-regulated in Transcription
  misc_feature: MA Experiment 20000235 PARAMETER Experiment Name: At_Siliques_P Parameter: Age (day) Value: 21
  misc_feature: MA Experiment 20000235 PARAMETER Experiment Name: At_Siliques_P Parameter: Organism Value: A. thaliana
  misc_feature: MA Experiment 20000235 PARAMETER Experiment Name: At_Siliques_P Parameter: Plant Line Value: WS
  misc_feature: MA Experiment 20000235 PARAMETER Experiment Name: At_Siliques_P Parameter: Tissue Value: 5-10mm Siliques vs. Whole Plant
  misc_feature: MA Experiment ID: 20000264 Result: Down-regulated in Transcription
  misc_feature: MA Experiment 20000264 PARAMETER Experiment Name: At_Open_Flower_P Parameter: Age (day) Value: 21
  misc_feature: MA Experiment 20000264 PARAMETER Experiment Name: At_Open_Flower_P Parameter: Plant Line Value: WS
  misc_feature: MA Experiment 20000264 PARAMETER Experiment Name: At_Open_Flower_P Parameter: Tissue Value: Open Flower vs. Whole Plant
  misc_feature: MA Experiment ID: 20000265 Result: Down-regulated in Transcription
  misc_feature: MA Experiment 20000265 PARAMETER Experiment Name: At_Open_Flower_P Parameter: Age (day) Value: 21
  misc_feature: MA Experiment 20000265 PARAMETER Experiment Name: At_Open_Flower_P Parameter: Plant Line Value: WS
  misc_feature: MA Experiment 20000265 PARAMETER Experiment Name: At_Open_Flower_P Parameter: Tissue Value: Closed Flower vs. Whole Plant
  misc_feature: MA Experiment ID: 20000286 Result: Down-regulated in Transcription
  misc_feature: MA Experiment 20000286 PARAMETER Experiment Name: At_Open_Flower_P Parameter: Age (day) Value: 21
  misc_feature: MA Experiment 20000286 PARAMETER Experiment Name: At_Open_Flower_P Parameter: Plant Line Value: WS
  misc_feature: MA Experiment 20000286 PARAMETER Experiment Name: At_Open_Flower_P Parameter: Tissue Value: Half Open vs. Whole Plant
  misc_feature: MA Experiment ID: 20000436 Result: Up-regulated in Transcription
  misc_feature: MA Experiment 20000436 PARAMETER Experiment Name: At_Drought_P Parameter: Age (day) Value: 7
  misc_feature: MA Experiment 20000436 PARAMETER Experiment Name: At_Drought_P Parameter: Organism Value: A. thaliana
  misc_feature: MA Experiment 20000436 PARAMETER Experiment Name: At_Drought_P Parameter: Plant Line Value: WS
  misc_feature: MA Experiment 20000436 PARAMETER Experiment Name: At_Drought_P Parameter: Timepoint (hr) Value: 12
  misc_feature: MA Experiment 20000436 PARAMETER Experiment Name: At_Drought_P Parameter: Tissue Value: Whole Plant
  misc_feature: MA Experiment 20000436 PARAMETER Experiment Name: At_Drought_P Parameter: Treatment Value: Drought vs. No Drought
  misc_feature: MA Experiment ID: 20000437 Result: Up-regulated in Transcription
  misc_feature: MA Experiment 20000437 PARAMETER Experiment Name: At_Drought_P Parameter: Age (day) Value: 8
  misc_feature: MA Experiment 20000437 PARAMETER Experiment Name: At_Drought_P Parameter: Organism Value: A. thaliana
  misc_feature: MA Experiment 20000437 PARAMETER Experiment Name: At_Drought_P Parameter: Plant Line Value: WS
  misc_feature: MA Experiment 20000437 PARAMETER Experiment Name: At_Drought_P Parameter: Timepoint (hr) Value: 24
  misc_feature: MA Experiment 20000437 PARAMETER Experiment Name: At_Drought_P Parameter: Tissue Value: Whole Plant
  misc_feature: MA Experiment 20000437 PARAMETER Experiment Name: At_Drought_P Parameter: Treatment Value: Drought vs. No Drought
  misc_feature: MA Experiment ID: 20000438 Result: Down-regulated in Transcription
  misc_feature: MA Experiment 20000438 PARAMETER Experiment Name: At_Shoots__P Parameter: Age (day) Value: 14
  misc_feature: MA Experiment 20000438 PARAMETER Experiment Name: At_Shoots__P Parameter: Tissue Value: Shoots vs. Whole Plant
  misc_feature: MA Experiment ID: 20000439 Result: Down-regulated in Transcription
  misc_feature: MA Experiment 20000439 PARAMETER Experiment Name: At_Roots__P Parameter: Age (day) Value: 14 vs. 21
  misc_feature: MA Experiment 20000439 PARAMETER Experiment Name: At_Roots__P Parameter: Organism Value: A. thaliana
  misc_feature: MA Experiment 20000439 PARAMETER Experiment Name: At_Roots__P Parameter: Tissue Value: Roots vs. Whole Plant
  misc_feature: MA Experiment ID: 20000451 Result: Up-regulated in Transcription
  misc_feature: MA Experiment 20000451 PARAMETER Experiment Name: At_CS6879_Shoots-Roots_P Parameter: Age (day) Value: 14
  misc_feature: MA Experiment 20000451 PARAMETER Experiment Name: At_CS6879_Shoots-Roots_P Parameter: Organism Value: A. thaliana
  misc_feature: MA Experiment 20000451 PARAMETER Experiment Name: At_CS6879_Shoots-Roots_P Parameter: Plant Line Value: CS6879 vs. WS
  misc_feature: MA Experiment 20000451 PARAMETER Experiment Name: At_CS6879_Shoots-Roots_P Parameter: Tissue Value: Roots
  misc_feature: MA Experiment ID: 20000453 Result: Up-regulated in Transcription
  misc_feature: MA Experiment 20000453 PARAMETER Experiment Name: At_100uM_ABA_P Parameter: Age (day) Value: 15
  misc_feature: MA Experiment 20000453 PARAMETER Experiment Name: At_100uM_ABA_P Parameter: Organism Value: A. thaliana
  misc_feature: MA Experiment 20000453 PARAMETER Experiment Name: At_100uM_ABA_P Parameter: Plant Line Value: WS
  misc_feature: MA Experiment 20000453 PARAMETER Experiment Name: At_100uM_ABA_P Parameter: Timepoint (hr) Value: 24
  misc_feature: MA Experiment 20000453 PARAMETER Experiment Name: At_100uM_ABA_P Parameter: Tissue Value: Aerial
  misc_feature: MA Experiment 20000453 PARAMETER Experiment Name: At_100uM_ABA_P Parameter: Treatment Value: 100uM ABA vs. No Treatment
  misc_feature: MA Experiment ID: 20000495 Result: Down-regulated in Transcription
  misc_feature: MA Experiment 20000495 PARAMETER Experiment Name: At_Guard_Cells_P Parameter: Harvest Date Value: 8/2/2002
  misc_feature: MA Experiment 20000495 PARAMETER Experiment Name: At_Guard_Cells_P Parameter: Organism Value: A. thaliana
  misc_feature: MA Experiment 20000495 PARAMETER Experiment Name: At_Guard_Cells_P Parameter: Tissue Value: Guard Cells vs. Leaves
  misc_feature: MA Experiment ID: 20000573 Result: Up-regulated in Transcription
  misc_feature: MA Experiment 20000573 PARAMETER Experiment Name: At_100uM_ABA_Mutants__P Parameter: Organism Value: A. thaliana
  misc_feature: MA Experiment 20000573 PARAMETER Experiment Name: At_100uM_ABA_Mutants__P Parameter: Plant Line Value: CS22 vs. Ler wt
  misc_feature: MA Experiment 20000573 PARAMETER Experiment Name: At_100uM_ABA_Mutants__P Parameter: Timepoint (hr) Value: N/A
  misc_feature: MA Experiment 20000573 PARAMETER Experiment Name: At_100uM_ABA_Mutants__P Parameter: Tissue Value: Whole Plant
  misc_feature: MA Experiment 20000573 PARAMETER Experiment Name: At_100uM_ABA_Mutants__P Parameter: Treatment Value: None
  misc_feature: MA Experiment ID: 20000574 Result: Up-regulated in Transcription
  misc_feature: MA Experiment 20000574 PARAMETER Experiment Name: At_100uM_ABA_Mutants__P Parameter: Organism Value: A. thaliana
  misc_feature: MA Experiment 20000574 PARAMETER Experiment Name: At_100uM_ABA_Mutants__P Parameter: Plant Line Value: CS23 vs. Ler wt
  misc_feature: MA Experiment 20000574 PARAMETER Experiment Name: At_100uM_ABA_Mutants__P Parameter: Timepoint (hr) Value: N/A
  misc_feature: MA Experiment 20000574 PARAMETER Experiment Name: At_100uM_ABA_Mutants__P Parameter: Tissue Value: Whole Plant
  misc_feature: MA Experiment 20000574 PARAMETER Experiment Name: At_100uM_ABA_Mutants__P Parameter: Treatment Value: None
  misc_feature: MA Experiment ID: 20000576 Result: Down-regulated in Transcription
  misc_feature: MA Experiment 20000576 PARAMETER Experiment Name: At_100uM_ABA_Mutants__P Parameter: Organism Value: A. thaliana
  misc_feature: MA Experiment 20000576 PARAMETER Experiment Name: At_100uM_ABA_Mutants__P Parameter: Plant Line Value: CS23
  misc_feature: MA Experiment 20000576 PARAMETER Experiment Name: At_100uM_ABA_Mutants__P Parameter: Timepoint (hr) Value: 6
  misc_feature: MA Experiment 20000576 PARAMETER Experiment Name: At_100uM_ABA_Mutants__P Parameter: Tissue Value: Whole Plant
  misc_feature: MA Experiment 20000576 PARAMETER Experiment Name: At_100uM_ABA_Mutants__P Parameter: Treatment Value: 1uM ABA vs. No Treatment
  misc_feature: MA Experiment ID: 20000794 Result: Down-regulated in Transcription
  misc_feature: MA Experiment 20000794 PARAMETER Experiment Name: At_Petals_P Parameter: Age (day) Value: 23-25 days
  misc_feature: MA Experiment 20000794 PARAMETER Experiment Name: At_Petals_P Parameter: Plant Line Value: WS
  misc_feature: MA Experiment 20000794 PARAMETER Experiment Name: At_Petals_P Parameter: Tissue Value: Petals vs. Whole plant
  misc_feature: MA Experiment ID: 20001247 Result: Down-regulated in Transcription
  misc_feature: MA Experiment 20001247 PARAMETER Experiment Name: At_Far-red-induction_P Parameter: Age (day) Value: 7
  misc_feature: MA Experiment 20001247 PARAMETER Experiment Name: At_Far-red-induction_P Parameter: Light Value: Far-red vs. White
  misc_feature: MA Experiment 20001247 PARAMETER Experiment Name: At_Far-red-induction_P Parameter: Organism Value: A. thaliana
  misc_feature: MA Experiment 20001247 PARAMETER Experiment Name: At_Far-red-induction_P Parameter: Plant Line Value: Columbia
  misc_feature: MA Experiment 20001247 PARAMETER Experiment Name: At_Far-red-induction_P Parameter: Timepoint (hr) Value: 1
  misc_feature: MA Experiment 20001247 PARAMETER Experiment Name: At_Far-red-induction_P Parameter: Tissue Value: Whole Plant
  misc_feature: MA Experiment ID: 20001248 Result: Up-regulated in Transcription
  misc_feature: MA Experiment 20001248 PARAMETER Experiment Name: At_Far-red-induction_P Parameter: Age (day) Value: 7
  misc_feature: MA Experiment 20001248 PARAMETER Experiment Name: At_Far-red-induction_P Parameter: Light Value: Far-red vs. White
  misc_feature: MA Experiment 20001248 PARAMETER Experiment Name: At_Far-red-induction_P Parameter: Organism Value: A. thaliana
  misc_feature: MA Experiment 20001248 PARAMETER Experiment Name: At_Far-red-induction_P Parameter: Plant Line Value: Columbia
  misc_feature: MA Experiment 20001248 PARAMETER Experiment Name: At_Far-red-induction_P Parameter: Timepoint (hr) Value: 4
  misc_feature: MA Experiment 20001248 PARAMETER Experiment Name: At_Far-red-induction_P Parameter: Tissue Value: Whole Plant
  misc_feature: MA Experiment ID: 20001451 Result: Down-regulated in Transcription
  misc_feature: MA Experiment 20001451 PARAMETER Experiment Name: At_Far-red-induction_P Parameter: Age (day) Value: 7
  misc_feature: MA Experiment 20001451 PARAMETER Experiment Name: At_Far-red-induction_P Parameter: Light Value: Far-red vs. White
  misc_feature: MA Experiment 20001451 PARAMETER Experiment Name: At_Far-red-induction_P Parameter: Organism Value: A. thaliana
  misc_feature: MA Experiment 20001451 PARAMETER Experiment Name: At_Far-red-induction_P Parameter: Plant Line Value: Columbia
  misc_feature: MA Experiment 20001451 PARAMETER Experiment Name: At_Far-red-induction_P Parameter: Timepoint (hr) Value: 24
  misc_feature: MA Experiment 20001451 PARAMETER Experiment Name: At_Far-red-induction_P Parameter: Tissue Value: Whole Plant
  misc_feature: MA Experiment ID: 20001558 Result: Down-regulated in Transcription
  misc_feature: MA Experiment 20001558 PARAMETER Experiment Name: At_Drought_Soil_Dry_P Parameter: Age (day) Value: 27
  misc_feature: MA Experiment 20001558 PARAMETER Experiment Name: At_Drought_Soil_Dry_P Parameter: Organism Value: A. thaliana
  misc_feature: MA Experiment 20001558 PARAMETER Experiment Name: At_Drought_Soil_Dry_P Parameter: Plant Line Value: WS
  misc_feature: MA Experiment 20001558 PARAMETER Experiment Name: At_Drought_Soil_Dry_P Parameter: Post Timepoint (hr) Value: 6
  misc_feature: MA Experiment 20001558 PARAMETER Experiment Name: At_Drought_Soil_Dry_P Parameter: Post-Treatment Value: Re-Water vs. No Drought
  misc_feature: MA Experiment 20001558 PARAMETER Experiment Name: At_Drought_Soil_Dry_P Parameter: Timepoint (day) Value: 13
  misc_feature: MA Experiment 20001558 PARAMETER Experiment Name: At_Drought_Soil_Dry_P Parameter: Treatment Value: Drought vs. No Drought
  misc_feature: MA Experiment ID: 20001560 Result: Down-regulated in Transcription
  misc_feature: MA Experiment 20001560 PARAMETER Experiment Name: At_Drought_Soil_Dry_P Parameter: Age (day) Value: 28
  misc_feature: MA Experiment 20001560 PARAMETER Experiment Name: At_Drought_Soil_Dry_P Parameter: Organism Value: A. thaliana
  misc_feature: MA Experiment 20001560 PARAMETER Experiment Name: At_Drought_Soil_Dry_P Parameter: Plant Line Value: WS
  misc_feature: MA Experiment 20001560 PARAMETER Experiment Name: At_Drought_Soil_Dry_P Parameter: Post Timepoint (hr) Value: None
  misc_feature: MA Experiment 20001560 PARAMETER Experiment Name: At_Drought_Soil_Dry_P Parameter: Post-Treatment Value: None
  misc_feature: MA Experiment 20001560 PARAMETER Experiment Name: At_Drought_Soil_Dry_P Parameter: Timepoint (day) Value: 14
  misc_feature: MA Experiment 20001560 PARAMETER Experiment Name: At_Drought_Soil_Dry_P Parameter: Treatment Value: Drought vs. No Drought
  misc_feature: MA Experiment ID: 20001761 Result: Down-regulated in Transcription
  misc_feature: MA Experiment 20001761 PARAMETER Experiment Name: At_50mM_NH4NO3_L-to-H_P Parameter: Timepoint (hr) Value: 4
  misc_feature: MA Experiment 20001761 PARAMETER Experiment Name: At_50mM_NH4NO3_L-to-H_P Parameter: Tissue Value: Siliques
  misc_feature: MA Experiment 20001761 PARAMETER Experiment Name: At_50mM_NH4NO3_L-to-H_P Parameter: Treatment Value: 50mM NH4NO3 vs 100mM Mannitol
  misc_feature: MA Experiment ID: 20001773 Result: Down-regulated in Transcription
  misc_feature: MA Experiment 20001773 PARAMETER Experiment Name: At_Far-red-enriched-adult_P Parameter: Age (day) Value: 30
  misc_feature: MA Experiment 20001773 PARAMETER Experiment Name: At_Far-red-enriched-adult_P Parameter: Light Value: Far-red enriched vs. White
  misc_feature: MA Experiment 20001773 PARAMETER Experiment Name: At_Far-red-enriched-adult_P Parameter: Organism Value: A. thaliana
  misc_feature: MA Experiment 20001773 PARAMETER Experiment Name: At_Far-red-enriched-adult_P Parameter: Plant Line Value: Columbia
  misc_feature: MA Experiment 20001773 PARAMETER Experiment Name: At_Far-red-enriched-adult_P Parameter: Timepoint (hr) Value: 48
  misc_feature: MA Experiment 20001773 PARAMETER Experiment Name: At_Far-red-enriched-adult_P Parameter: Tissue Value: Aerial
aacttaagtgtttctgtttaactccttgagagaaaataacttttaaactttagcttctaagagatattcaggatgaccggaggaggatttgcgacttcggcgaacggagtagagtttgaggcaaagataactccaatagtcatcatatcttgcatcatggctgctaccggcggcctcatgtttggttacgacgtcggtgtctccggcggagtgacatcgatgccggactttctcgaaaagttttttcccgtggtttatcggaaagtagtagctggcgccgacaaagacagcaactactgcaaatacgacaaccaaggactacaacttttcacatcatctttatacttagccggtctaaccgcaacgttctttgcttcatacacgacaagaacgctcggaaggaggctaactatgctcatagccggcgttttcttcatcataggtgtggctctcaacgcgggggctcaagacctagccatgcttattgcaggcaggatattgcttggttgtggagttgggttcgctaatcaagccgttccgttgttcttgtcggagattgcacctactaggatccgtggtggtcttaatattctctttcagcttaacgtcactattggtatcctcttcgccaatcttgtcaactatgggaccgccaagattaaaggaggttggggatggaggttatcgttaggtttggcgggaattcccgcgcttcttctaacggtcggagctttattggtgacagagacaccaaacagtttagtcgaaagaggtcgtctcgatgaaggtaaagctgttcttcgtcgtattcgagggaccgataatgttgaaccagagttcgctgatctccttgaagctagtcgacttgctaaagaagttaaacacccttttagaaaccttcttcaacgtagaaaccgtcctcagctcgtcatcgccgtcgctttacagattttccagcaatgtactggaatcaacgcgattatgttctacgcgcctgttctgttcagcacattagggtttggtagtgacgcttcactttactcagcagtggtgaccggagcagtcaacgtcctctcaactttagtctcaatctactccgttgacaaagtcggtcgccgagttcttctcctagaagctggtgtccaaatgttcttctctcaagtcgtaatcgccattatccttggcgtcaaagtaacagacacttctacaaatctctccaaaggtttcgcaattctagtcgtggtaatgatctgcacatacgtcgctgctttcgcctggtcttggggaccgctcgggtggttaatccctagtgagacattccctctagagacacgttccgcgggacaaagtgtaacggtctgcgttaacttgctcttcacgttcattatcgctcaagctttcctctctatgctttgccatttcaagtttgggatattcatcttcttttctgcatgggttttgattatgtctgtctttgtgatgttcctacttccggagactaagaatattcctatcgaggagatgactgagagagtttggaagaagcattggttctgggctaggttcatggatgatcataatgatcacgagttcgtgaatggtgagaagagtaatggtaaatctaatggctttgatccttcaacacggctttaaagtggtttaagagtccctaaccaaagtagaagcagaagagagtgaacaagaggtggtaaacacaccaaagtagagaagggaaatacagttttcaattctatacagtgtactaaatttcgttactttaagtttgaactgcgtttgtgaataagtgaagtttttttttttgctttgttgtggttcttaatgtcatccctgagttccaattttctac

SEQ ID NO: 80243 - protein, 526 aa, Arabidopsis thaliana
  peptide (1)..(526): Ceres Seq. ID no. 12655003
  misc_feature (26)..(488): Pfam Name: Sugar (and other) transporter Pfam Description: Sugar (and other) transporter
  misc_feature (1)..(526): Homolog of NCBI NO: 15240313 NR Description: hexose transporter - like protein; protein id: supported by cDNA: gi_15010579, supported by cDNA: gi_15450648, by cDNA: gi_9965738 [Arabidopsis thaliana]
  misc_feature (1)..(526): Homolog of NCBI NO: 5734440 NR Description: hexose transporter [Lycopersicon esculentum]
  misc_feature (1)..(526): Homolog of NCBI NO: 7446737 NR Description: hexose transport protein - tomato
  misc_feature (1)..(344): Homolog of NCBI NO: 15010580 NR Description: AT5g26340/F9D12_17 [Arabidopsis thaliana]
  misc_feature (1)..(506): Homolog of NCBI NO: 15235215 NR Description: putative hexose transporter; protein id: [Arabidopsis thaliana] >gi|7446742|pir||T01506 probable hexose
  misc_feature (1)..(516): Homolog of NCBI NO: 34915514 NR Description: monosaccharide transporter 3 [Oryza sativa
  misc_feature (1)..(499): Homolog of NCBI NO: 347855 NR Description: glucose transporter [Saccharum hybrid cultivar
  misc_feature (1)..(520): Homolog of NCBI NO: 100347 NR Description: monosaccharide transport protein MST1 - common >gi|19885|emb|CAA47324.1| monosaccharid transporter [Nicotiana
  misc_feature (1)..(505): Homolog of NCBI NO: 1353516 NR Description: sugar transporter
  misc_feature (4)..(501): Homolog of NCBI NO: 4138724 NR Description: hexose transporter [Vitis vinifera]
MTGGGFATSANGVEFEAKITPIVIISCIMAATGGLMFGYDVGVSGGVTSMPDFLEKFFPVVYRKVVAGADKDSNYCKYDNQGLQLFTSSLYLAGLTATFFASYTTRTLGRRLTMLIAGVFFIIGVALNAGAQDLAMLIAGRILLGCGVGFANQAVPLFLSEIAPTRIRGGLNILFQLNVTIGILFANLVNYGTAKIKGGWGWRLSLGLAGIPALLLTVGALLVTETPNSLVERGRLDEGKAVLRRIRGTDNVEPEFADLLEASRLAKEVKHPFRNLLQRRNRPQLVIAVALQIFQQCTGINAIMFYAPVLFSTLGFGSDASLYSAVVTGAVNVLSTLVSIYSVDKVGRRVLLLEAGVQMFFSQVVIAIILGVKVTDTSTNLSKGFAILVVVMICTYVAAFAWSWGPLGWLIPSETFPLETRSAGQSVTVCVNLLFTFIIAQAFLSMLCHFKFGIFIFFSAWVLIMSVFVMFLLPETKNIPIEEMTERVWKKHWFWARFMDDHNDHEFVNGEKSNGKSNGFDPSTRL

SEQ ID NO: 80244 - protein, 498 aa, Arabidopsis thaliana
  peptide (1)..(498): Ceres Seq. ID no. 12655004
  misc_feature (1)..(460): Pfam Name: Sugar (and other) transporter Pfam Description: Sugar (and other) transporter
  misc_feature (1)..(498): Homolog of NCBI NO: 15240313 NR Description: hexose transporter - like protein; protein id: supported by cDNA: gi_15010579, supported by cDNA: gi_15450648, by cDNA: gi_9965738 [Arabidopsis thaliana]
  misc_feature (1)..(498): Homolog of NCBI NO: 5734440 NR Description: hexose transporter [Lycopersicon esculentum]
  misc_feature (1)..(498): Homolog of NCBI NO: 7446737 NR Description: hexose transport protein - tomato
  misc_feature (1)..(316): Homolog of NCBI NO: 15010580 NR Description: AT5g26340/F9D12_17 [Arabidopsis thaliana]
  misc_feature (1)..(478): Homolog of NCBI NO: 15235215 NR Description: putative hexose transporter; protein id: [Arabidopsis thaliana] >gi|7446742|pir||T01506 probable hexose
  misc_feature (1)..(488): Homolog of NCBI NO: 34915514 NR Description: monosaccharide transporter 3 [Oryza sativa
  misc_feature (1)..(471): Homolog of NCBI NO: 347855 NR Description: glucose transporter [Saccharum hybrid cultivar
  misc_feature (1)..(492): Homolog of NCBI NO: 100347 NR Description: monosaccharide transport protein MST1 - common >gi|19885|emb|CAA47324.1| monosaccharid transporter [Nicotiana
  misc_feature (1)..(477): Homolog of NCBI NO: 1353516 NR Description: sugar transporter
  misc_feature (1)..(473): Homolog of NCBI NO: 4138724 NR Description: hexose transporter [Vitis vinifera]
MAATGGLMFGYDVGVSGGVTSMPDFLEKFFPVVYRKVVAGADKDSNYCKYDNQGLQLFTSSLYLAGLTATFFASYTTRTLGRRLTMLIAGVFFIIGVALNAGAQDLAMLIAGRILLGCGVGFANQAVPLFLSEIAPTRIRGGLNILFQLNVTIGILFANLVNYGTAKIKGGWGWRLSLGLAGIPALLLTVGALLVTETPNSLVERGRLDEGKAVLRRIRGTDNVEPEFADLLEASRLAKEVKHPFRNLLQRRNRPQLVIAVALQIFQQCTGINAIMFYAPVLFSTLGFGSDASLYSAVVTGAVNVLSTLVSIYSVDKVGRRVLLLEAGVQMFFSQVVIAIILGVKVTDTSTNLSKGFAILVVVMICTYVAAFAWSWGPLGWLIPSETFPLETRSAGQSVTVCVNLLFTFIIAQAFLSMLCHFKFGIFIFFSAWVLIMSVFVMFLLPETKNIPIEEMTERVWKKHWFWARFMDDHNDHEFVNGEKSNGKSNGFDPSTRL

SEQ ID NO: 80245 - protein, 491 aa, Arabidopsis thaliana
  peptide (1)..(491): Ceres Seq. ID no. 12655005
  misc_feature (1)..(453): Pfam Name: Sugar (and other) transporter Pfam Description: Sugar (and other) transporter
  misc_feature (1)..(491): Homolog of NCBI NO: 15240313 NR Description: hexose transporter - like protein; protein id: supported by cDNA: gi_15010579, supported by cDNA: gi_15450648, by cDNA: gi_9965738 [Arabidopsis thaliana]
  misc_feature (1)..(491): Homolog of NCBI NO: 5734440 NR Description: hexose transporter [Lycopersicon esculentum]
  misc_feature (1)..(491): Homolog of NCBI NO: 7446737 NR Description: hexose transport protein - tomato
  misc_feature (1)..(309): Homolog of NCBI NO: 15010580 NR Description: AT5g26340/F9D12_17 [Arabidopsis thaliana]
  misc_feature (1)..(471): Homolog of NCBI NO: 15235215 NR Description: putative hexose transporter; protein id: [Arabidopsis thaliana] >gi|7446742|pir||T01506 probable hexose
  misc_feature (1)..(481): Homolog of NCBI NO: 34915514 NR Description: monosaccharide transporter 3 [Oryza sativa
  misc_feature (1)..(464): Homolog of NCBI NO: 347855 NR Description: glucose transporter [Saccharum hybrid cultivar
  misc_feature (1)..(485): Homolog of NCBI NO: 100347 NR Description: monosaccharide transport protein MST1 - common >gi|19885|emb|CAA47324.1| monosaccharid transporter [Nicotiana
  misc_feature (1)..(470): Homolog of NCBI NO: 1353516 NR Description: sugar transporter
  misc_feature (1)..(466): Homolog of NCBI NO: 4138724 NR Description: hexose transporter [Vitis vinifera]
MFGYDVGVSGGVTSMPDFLEKFFPVVYRKVVAGADKDSNYCKYDNQGLQLFTSSLYLAGLTATFFASYTTRTLGRRLTMLIAGVFFIIGVALNAGAQDLAMLIAGRILLGCGVGFANQAVPLFLSEIAPTRIRGGLNILFQLNVTIGILFANLVNYGTAKIKGGWGWRLSLGLAGIPALLLTVGALLVTETPNSLVERGRLDEGKAVLRRIRGTDNVEPEFADLLEASRLAKEVKHPFRNLLQRRNRPQLVIAVALQIFQQCTGINAIMFYAPVLFSTLGFGSDASLYSAVVTGAVNVLSTLVSIYSVDKVGRRVLLLEAGVQMFFSQVVIAIILGVKVTDTSTNLSKGFAILVVVMICTYVAAFAWSWGPLGWLIPSETFPLETRSAGQSVTVCVNLLFTFIIAQAFLSMLCHFKFGIFIFFSAWVLIMSVFVMFLLPETKNIPIEEMTERVWKKHWFWARFMDDHNDHEFVNGEKSNGKSNGFDPSTRL

SEQ ID NO: 80246 - DNA, 1721 bp, Arabidopsis thaliana
  misc_feature (1)..(1721): Ceres Seq. ID no. 12655014
  misc_feature: MA Experiment ID: 20000179 Result: Up-regulated in Transcription
  misc_feature: MA Experiment 20000179 PARAMETER Experiment Name: At_Germinating_Seeds_P Parameter: Age (hr) Value: 6 vs. 0
  misc_feature: MA Experiment 20000179 PARAMETER Experiment Name: At_Germinating_Seeds_P Parameter: Tissue Value: Germinating Seeds
  misc_feature: MA Experiment ID: 20000234 Result: Down-regulated in Transcription
  misc_feature: MA Experiment 20000234 PARAMETER Experiment Name: At_Siliques_P Parameter: Age (day) Value: 21
  misc_feature: MA Experiment 20000234 PARAMETER Experiment Name: At_Siliques_P Parameter: Organism Value: A. thaliana
  misc_feature: MA Experiment 20000234 PARAMETER Experiment Name: At_Siliques_P Parameter: Plant Line Value: WS
  misc_feature: MA Experiment 20000234 PARAMETER Experiment Name: At_Siliques_P Parameter: Tissue Value: Less Than 5mm Siliques vs. Whole Plant
  misc_feature: MA Experiment ID: 20000235 Result: Down-regulated in Transcription
  misc_feature: MA Experiment 20000235 PARAMETER Experiment Name: At_Siliques_P Parameter: Age (day) Value: 21
  misc_feature: MA Experiment 20000235 PARAMETER Experiment Name: At_Siliques_P Parameter: Organism Value: A. thaliana
  misc_feature: MA Experiment 20000235 PARAMETER Experiment Name: At_Siliques_P Parameter: Plant Line Value: WS
  misc_feature: MA Experiment 20000235 PARAMETER Experiment Name: At_Siliques_P Parameter: Tissue Value: 5-10mm Siliques vs. Whole Plant
  misc_feature: MA Experiment ID: 20000437 Result: Up-regulated in Transcription
  misc_feature: MA Experiment 20000437 PARAMETER Experiment Name: At_Drought_P Parameter: Age (day) Value: 8
  misc_feature: MA Experiment 20000437 PARAMETER Experiment Name: At_Drought_P Parameter: Organism Value: A. thaliana
  misc_feature: MA Experiment 20000437 PARAMETER Experiment Name: At_Drought_P Parameter: Plant Line Value: WS
  misc_feature: MA Experiment 20000437 PARAMETER Experiment Name: At_Drought_P Parameter: Timepoint (hr) Value: 24
  misc_feature: MA Experiment 20000437 PARAMETER Experiment Name: At_Drought_P Parameter: Tissue Value: Whole Plant
  misc_feature: MA Experiment 20000437 PARAMETER Experiment Name: At_Drought_P Parameter: Treatment Value: Drought vs. No Drought
atggcgtcgtctctatctccaccggaagaagcttcgtatcaccaccgtcataccaaaaggtacacctcctccgcttcctccgcttcctccaccaccaacggaaccgtcgaatcatcggtttccgatttcgtcaaacgtcccaaaatctctcatccgaattacatatcaagttccgagatcgaatcagagttttctcatcacgatccagatttcgcaagaatcaacaacggtagttttggttgttgtccgtcatcaatcctagctttacaacgagattggcagctccggttccttcgtcaaccggatcgattctatttcgacgaactcaaaccaaaaatctccgattctagatctgtaatcaaacggttaataaacgccgagcatgacgatgaagtctcgatcgtcgataacgcaacaaccgcagctgcaatcgttcttcaacaaaccgcttgggcttttcgtgaaggtcggttcgataaaggcgacgcggtggttatgcttcattacgcttatggctctgtgaagaaatctgttgaagcgtatgttacacgctccggtggacacgtcaccgaggtacagttaccttttccggttatttcggcggatgagattattgaccggtttaggattggtttagagtctggtaaagcgaatggtaggagagttaggttagctttgattgatcatgtgacttctatgccaagtgttgtgattcctattaaagagcttgtgaagatttgtagaagagaaggtgttgaccaagtttttgttgatgctgctcatgggataggttgtgttgatgttgatatgaaggagattggtgctgatttctatactagtaatcttcataagtggtttttcgcaccgccttctgttgctttcttgtattgtaggaaatcgagtaatggtggtgttgcggatttgcatcatcccgttgtttcgaatgagtatgggaacggtttggcggttgagagttcgtgggttggaactagagattatagtgctcagttggtggttccttcgatattggagtttgtaaatcggtttgaaggcgggattgatggtattaagaagaggaatcatgagtctgttgttgagatgggtcaaatgttggttaagtcttgggggactcagctcggttgtccccctgagatgtgtgcgagtatgatcatggttgggttgccagtgtgtttaggagtgtcgagtgagtcggatgttttgaagcttagaacgtttttaagagaaaagttcagaattgaaatcccaatctactttaggccaccaggggatggagagattgatccgatcacgggatatgtgcgtatttcttttcaagtttacaacaaacctgaggattatcataggctcagggacgcaataaacgggcttgttagagatgggttcaaatgcacgtctctatcttgttgaataagggcataaagcttttcaggcgaatgaatcatgagaaagaaagttatcatggtttaggtaccatggagctttatgagattcgaaggagtctctatttccacaatcatatctctcaacttcttatacagtaatgatgtatgagaaaactaagttttcttctatttccgttgctcgaatcgcctgttcaaaatttcccatttacataaccttagcaggtctaataaagcactctagtccgtgttgtgttctcgtaattggtctttaaattctctaattgttacgacggtcac

SEQ ID NO: 80247 - protein, 475 aa, Arabidopsis thaliana
  peptide (1)..(475): Ceres Seq. ID no. 12655015
  misc_feature (80)..(456): Pfam Name: Aminotransferase class-V Pfam Description: Aminotransferase class-V
  misc_feature (1)..(475): Homolog of NCBI NO: 30690360 NR Description: expressed protein [Arabidopsis thaliana]
  misc_feature (45)..(473): Homolog of NCBI NO: 34894318 NR Description: unnamed protein product [Oryza sativa (japonica group)] >gi|8467955|dbj|BAA96579.1| unnamed protein product
  misc_feature (28)..(473): Homolog of NCBI NO: 15228693 NR Description: putative protein; protein id: At3g62130.1, by cDNA: 27922., supported by cDNA: gi_17064881 [Arabidopsis
  misc_feature (23)..(473): Homolog of NCBI NO: 34894322 NR Description: unnamed protein product [Oryza sativa (japonica group)] >gi|8467957|dbj|BAA96581.1| unnamed protein product
  misc_feature (68)..(460): Homolog of NCBI NO: 17548917 NR Description: PUTATIVE ISOPENICILLIN N EPIMERASE PROTEIN solanacearum] >gi|17431167|emb|CAD17847.1| PUTATIVE ISOPENICILLIN
  misc_feature (55)..(459): Homolog of NCBI NO: 21230669 NR Description: isopenicillin N epimerase [Xanthomonas campestris campestris str. ATCC 33913] >gi|21112256|gb|AAM40510.1| N epimerase [Xanthomonas campestris pv. campestris str. ATCC
  misc_feature (64)..(395): Homolog of NCBI NO: 25463395 NR Description: hypothetical protein [imported] - yeast (Candida >gi|3859696|emb|CAA21971.1| unknown hypothetical protein [Candida
  misc_feature (68)..(296): Homolog of NCBI NO: 40738451 NR Description: hypothetical protein AN6227.2 [Aspergillus
  misc_feature (68)..(463): Homolog of NCBI NO: 116093 NR Description: Isopenicillin N epimerase >gi|25453499|pir||T52311
  misc_feature (68)..(463): Homolog of NCBI NO: 399225 NR Description: Isopenicillin N epimerase >gi|419704|pir||S30901
MASSLSPPEEASYHHRHTKRYTSSASSASSTTNGTVESSVSDFVKRPKISHPNYISSSEIESEFSHHDPDFARINNGSFGCCPSSILALQRDWQLRFLRQPDRFYFDELKPKISDSRSVIKRLINAEHDDEVSIVDNATTAAAIVLQQTAWAFREGRFDKGDAVVMLHYAYGSVKKSVEAYVTRSGGHVTEVQLPFPVISADEIIDRFRIGLESGKANGRRVRLALIDHVTSMPSVVIPIKELVKICRREGVDQVFVDAAHGIGCVDVDMKEIGADFYTSNLHKWFFAPPSVAFLYCRKSSNGGVADLHHPVVSNEYGNGLAVESSWVGTRDYSAQLVVPSILEFVNRFEGGIDGIKKRNHESVVEMGQMLVKSWGTQLGCPPEMCASMIMVGLPVCLGVSSESDVLKLRTFLREKFRIEIPIYFRPPGDGEIDPITGYVRISFQVYNKPEDYHRLRDAINGLVRDGFKCTSLSC

SEQ ID NO: 80248 - protein, 310 aa, Arabidopsis thaliana
  peptide (1)..(310): Ceres Seq. ID no. 12655016
  misc_feature (1)..(291): Pfam Name: Aminotransferase class-V Pfam Description: Aminotransferase class-V
  misc_feature (1)..(310): Homolog of NCBI NO: 30690360 NR Description: expressed protein [Arabidopsis thaliana]
  misc_feature (1)..(308): Homolog of NCBI NO: 34894318 NR Description: unnamed protein product [Oryza sativa (japonica group)] >gi|8467955|dbj|BAA96579.1| unnamed protein product
  misc_feature (1)..(308): Homolog of NCBI NO: 15228693 NR Description: putative protein; protein id: At3g62130.1, by cDNA: 27922., supported by cDNA: gi_17064881 [Arabidopsis
  misc_feature (1)..(308): Homolog of NCBI NO: 34894322 NR Description: unnamed protein product [Oryza sativa (japonica group)] >gi|8467957|dbj|BAA96581.1| unnamed protein product
  misc_feature (1)..(295): Homolog of NCBI NO: 17548917 NR Description: PUTATIVE ISOPENICILLIN N EPIMERASE PROTEIN solanacearum] >gi|17431167|emb|CAD17847.1| PUTATIVE ISOPENICILLIN
  misc_feature (1)..(294): Homolog of NCBI NO: 21230669 NR Description: isopenicillin N epimerase [Xanthomonas campestris campestris str. ATCC 33913] >gi|21112256|gb|AAM40510.1| N epimerase [Xanthomonas campestris pv. campestris str. ATCC
  misc_feature (1)..(230): Homolog of NCBI NO: 25463395 NR Description: hypothetical protein [imported] - yeast (Candida >gi|3859696|emb|CAA21971.1| unknown hypothetical protein [Candida
  misc_feature (1)..(131): Homolog of NCBI NO: 40738451 NR Description: hypothetical protein AN6227.2 [Aspergillus
  misc_feature (1)..(298): Homolog of NCBI NO: 116093 NR Description: Isopenicillin N epimerase >gi|25453499|pir||T52311
  misc_feature (1)..(298): Homolog of NCBI NO: 399225 NR Description: Isopenicillin N epimerase >gi|419704|pir||S30901
MLHYAYGSVKKSVEAYVTRSGGHVTEVQLPFPVISADEIIDRFRIGLESGKANGRRVRLALIDHVTSMPSVVIPIKELVKICRREGVDQVFVDAAHGIGCVDVDMKEIGADFYTSNLHKWFFAPPSVAFLYCRKSSNGGVADLHHPVVSNEYGNGLAVESSWVGTRDYSAQLVVPSILEFVNRFEGGIDGIKKRNHESVVEMGQMLVKSWGTQLGCPPEMCASMIMVGLPVCLGVSSESDVLKLRTFLREKFRIEIPIYFRPPGDGEIDPITGYVRISFQVYNKPEDYHRLRDAINGLVRDGFKCTSLSC

SEQ ID NO: 80249 - protein, 243 aa, Arabidopsis thaliana
  peptide (1)..(243): Ceres Seq. ID no. 12655017
  misc_feature (1)..(224): Pfam Name: Aminotransferase class-V Pfam Description: Aminotransferase class-V
  misc_feature (1)..(243): Homolog of NCBI NO: 30690360 NR Description: expressed protein [Arabidopsis thaliana]
  misc_feature (1)..(241): Homolog of NCBI NO: 34894318 NR Description: unnamed protein product [Oryza sativa (japonica group)] >gi|8467955|dbj|BAA96579.1| unnamed protein product
  misc_feature (1)..(241): Homolog of NCBI NO: 15228693 NR Description: putative protein; protein id: At3g62130.1, by cDNA: 27922., supported by cDNA: gi_17064881 [Arabidopsis
  misc_feature (1)..(241): Homolog of NCBI NO: 34894322 NR Description: unnamed protein product [Oryza sativa (japonica group)] >gi|8467957|dbj|BAA96581.1| unnamed protein product
  misc_feature (1)..(228): Homolog of NCBI NO: 17548917 NR Description: PUTATIVE ISOPENICILLIN N EPIMERASE PROTEIN solanacearum] >gi|17431167|emb|CAD17847.1| PUTATIVE ISOPENICILLIN
  misc_feature (1)..(227): Homolog of NCBI NO: 21230669 NR Description: isopenicillin N epimerase [Xanthomonas campestris campestris str. ATCC 33913] >gi|21112256|gb|AAM40510.1| N epimerase [Xanthomonas campestris pv. campestris str. ATCC
  misc_feature (1)..(163): Homolog of NCBI NO: 25463395 NR Description: hypothetical protein [imported] - yeast (Candida >gi|3859696|emb|CAA21971.1| unknown hypothetical protein [Candida
  misc_feature (1)..(64): Homolog of NCBI NO: 40738451 NR Description: hypothetical protein AN6227.2 [Aspergillus
  misc_feature (1)..(231): Homolog of NCBI NO: 116093 NR Description: Isopenicillin N epimerase >gi|25453499|pir||T52311
  misc_feature (1)..(231): Homolog of NCBI NO: 399225 NR Description: Isopenicillin N epimerase >gi|419704|pir||S30901
MPSVVIPIKELVKICRREGVDQVFVDAAHGIGCVDVDMKEIGADFYTSNLHKWFFAPPSVAFLYCRKSSNGGVADLHHPVVSNEYGNGLAVESSWVGTRDYSAQLVVPSILEFVNRFEGGIDGIKKRNHESVVEMGQMLVKSWGTQLGCPPEMCASMIMVGLPVCLGVSSESDVLKLRTFLREKFRIEIPIYFRPPGDGEIDPITGYVRISFQVYNKPEDYHRLRDAINGLVRDGFKCTSLSC

SEQ ID NO: 80250 - DNA, 1361 bp, Arabidopsis thaliana
  misc_feature (1)..(1361): Ceres Seq. ID no. 12655026
  misc_feature: MA Experiment ID: 20000184 Result: Down-regulated in Transcription
  misc_feature: MA Experiment 20000184 PARAMETER Experiment Name: At_Shoots__P Parameter: Age (day) Value: 7
  misc_feature: MA Experiment 20000184 PARAMETER Experiment Name: At_Shoots__P Parameter: Tissue Value: Shoots vs. Whole Plant
  misc_feature: MA Experiment ID: 20000185 Result: Up-regulated in Transcription
  misc_feature: MA Experiment 20000185 PARAMETER Experiment Name: At_Roots__P Parameter: Age (day) Value: 7 vs. 21
  misc_feature: MA Experiment 20000185 PARAMETER Experiment Name: At_Roots__P Parameter: Organism Value: A. thaliana
  misc_feature: MA Experiment 20000185 PARAMETER Experiment Name: At_Roots__P Parameter: Tissue Value: Roots vs. Whole Plant
  misc_feature: MA Experiment ID: 20000438 Result: Down-regulated in Transcription
  misc_feature: MA Experiment 20000438 PARAMETER Experiment Name: At_Shoots__P Parameter: Age (day) Value: 14
  misc_feature: MA Experiment 20000438 PARAMETER Experiment Name: At_Shoots__P Parameter: Tissue Value: Shoots vs. Whole Plant
  misc_feature: MA Experiment ID: 20000794 Result: Down-regulated in Transcription
  misc_feature: MA Experiment 20000794 PARAMETER Experiment Name: At_Petals_P Parameter: Age (day) Value: 23-25 days
  misc_feature: MA Experiment 20000794 PARAMETER Experiment Name: At_Petals_P Parameter: Plant Line Value: WS
  misc_feature: MA Experiment 20000794 PARAMETER Experiment Name: At_Petals_P Parameter: Tissue Value: Petals vs. Whole plant
atagtttctctcattttataataattttctccatcttcttccttcctcttcaagcttatagaacctccaagaaccataaaactctctctgcaacaatctatactttcttcattacttttataaaaaatgggaagacattcttgttgttttaagcagaagctaagaaaaggcctttggtctcctgaagaagatgagaaacttctcaattacatcactagacatggtcatggctgttggagttctgtccctaaactcgcaggtttgcaaagatgtggaaagagttgtagacttaggtggataaattatttgagaccagatttaaagagaggagctttctctcaagacgaagaaagcttgatcattgagctccatgctgcattaggcaacagatggtctcaaatcgcaacgcggttaccgggaagaacagacaacgagatcaaaaacttttggaactcatgtcttaagaagaagctgagaagaaaaggcattgacccaacaacacataaacccttaataacaaacgagcttcaatctcttaacgtcatagatcagaaactgacgtcatcagaagtagtaaagtcaacgggttcgataaacaacctacatgatcagtcaatggtcgtctcatcgcaacaaggtccatggtggttcccggcgaatacaactacgactaatcaaaactctgcgttttgctttagttcaagtaatactacaacggtttcagaccagatcgtatctttaatctcttcaatgtctacgtcatcatctccgacaccaatgacttcaaacttcagtcctgctccaaacaactgggaacaactcaactactgcaacacagtaccaagtcagagcaacagtatctacagtgccttctttggtaatcaatacacagaagctagccaaaccatgaacaataataatccactagtagatcaacatcatcatcatcaagacatgaagtcatgggcatcagagattcttcattacacagaacacaaccaaagctcagaaactgttatagaagcagaagtgaagccagacattgccaactactactggagatcagcatcatcatcgtcgtcaccaaaccaagaagctgcaacattactacacgatgctaacgtggaagtgtacggtaaaaatctacaaaagcttaataacatggtgtttgatcagagcctttagattattaacatgtgttatagagagtttcattttctattcatattcatagacctgagtttattgattgatccatacatttgttatgcttgtgtgtaaagtatgtatatggtttttgatttatgtaaattttctgctcgagtgaatttttttggtgctaagatgtagttctttattcc

SEQ ID NO: 80251 - protein, 352 aa, Arabidopsis thaliana
  peptide (1)..(352): Ceres Seq. ID no. 12655027
  misc_feature (14)..(61): Pfam Name: Myb-like DNA-binding domain Pfam Description: Myb-like DNA-binding domain
  misc_feature (1)..(352): Homolog of NCBI NO: 30690317 NR Description: myb transcription factor (ATMYB4) [Arabidopsis >gi|20466622|gb|AAM20628.1| transcription factor ATMYB4 thaliana] >gi|30984580|gb|AAP42753.1| At5g26655 [Arabidopsis
  misc_feature (1)..(352): Homolog of NCBI NO: 2280530 NR Description: ATMYB4 [Arabidopsis thaliana]
  misc_feature (45)..(352): Homolog of NCBI NO: 7446174 NR Description: transcription factor MYB4 - Arabidopsis thaliana
  misc_feature (1)..(44): Homolog of NCBI NO: 7446174 NR Description: transcription factor MYB4 - Arabidopsis thaliana
  misc_feature (77)..(352): Homolog of NCBI NO: 11358564 NR Description: myb-related transcription factor MYB86 [imported] Arabidopsis thaliana (fragment) >gi|3941518|gb|AAC83635.1|
  misc_feature (1)..(268): Homolog of NCBI NO: 34902542 NR Description: putative transcription factor (myb) [Oryza sativa
  misc_feature (1)..(352): Homolog of NCBI NO: 22329445 NR Description: myb family transcription factor; protein id: supported by cDNA: gi_20465974 [Arabidopsis thaliana] putative transcription factor [Arabidopsis thaliana]
  misc_feature (1)..(343): Homolog of NCBI NO: 25294104 NR Description: hypothetical protein [imported] - Arabidopsis >gi|3482929|gb|AAC33214.1| Putative transcription factor
  misc_feature (1)..(129): Homolog of NCBI NO: 15223612 NR Description: myb family transcription factor; protein id: supported by cDNA: 250386. [Arabidopsis thaliana]
  misc_feature (1)..(136): Homolog of NCBI NO: 15234262 NR Description: myb family transcription factor; protein id: supported by cDNA: gi_15375280, supported by cDNA: gi_15450989
MGRHSCCFKQKLRKGLWSPEEDEKLLNYITRHGHGCWSSVPKLAGLQRCGKSCRLRWINYLRPDLKRGAFSQDEESLIIELHAALGNRWSQIATRLPGRTDNEIKNFWNSCLKKKLRRKGIDPTTHKPLITNELQSLNVIDQKLTSSEVVKSTGSINNLHDQSMVVSSQQGPWWFPANTTTTNQNSAFCFSSSNTTTVSDQIVSLISSMSTSSSPTPMTSNFSPAPNNWEQLNYCNTVPSQSNSIYSAFFGNQYTEASQTMNNNNPLVDQHHHHQDMKSWASEILHYTEHNQSSETVIEAEVKPDIANYYWRSASSSSSPNQEAATLLHDANVEVYGKNLQKLNNMVFDQSL

SEQ ID NO: 80252 - protein, 189 aa, Arabidopsis thaliana; identical to SEQ ID NO: 69842
  peptide (1)..(189): Ceres Seq. ID no. 12655028
  misc_feature (1)..(189): Homolog of NCBI NO: 30690317 NR Description: myb transcription factor (ATMYB4) [Arabidopsis >gi|20466622|gb|AAM20628.1| transcription factor ATMYB4 thaliana] >gi|30984580|gb|AAP42753.1| At5g26655 [Arabidopsis
  misc_feature (1)..(189): Homolog of NCBI NO: 2280530 NR Description: ATMYB4 [Arabidopsis thaliana]
  misc_feature (1)..(189): Homolog of NCBI NO: 7446174 NR Description: transcription factor MYB4 - Arabidopsis thaliana
  misc_feature (1)..(189): Homolog of NCBI NO: 11358564 NR Description: myb-related transcription factor MYB86 [imported] Arabidopsis thaliana (fragment) >gi|3941518|gb|AAC83635.1|
  misc_feature (1)..(105): Homolog of NCBI NO: 34902542 NR Description: putative transcription factor (myb) [Oryza sativa
  misc_feature (1)..(189): Homolog of NCBI NO: 22329445 NR Description: myb family transcription factor; protein id: supported by cDNA: gi_20465974 [Arabidopsis thaliana] putative transcription factor [Arabidopsis thaliana]
  misc_feature (1)..(180): Homolog of NCBI NO: 25294104 NR Description: hypothetical protein [imported] - Arabidopsis >gi|3482929|gb|AAC33214.1| Putative transcription factor
  misc_feature (1)..(60): Homolog of NCBI NO: 18399724 NR Description: myb family transcription factor; protein id: supported by cDNA: gi_14517437, supported by cDNA: gi_20908077
  misc_feature (1)..(38): Homolog of NCBI NO: 23476279 NR Description: myb-like transcription factor 1 [Gossypium
  misc_feature (1)..(38): Homolog of NCBI NO: 7438345 NR Description: myb-related protein A - upland cotton

SEQ ID NO: 80253 - DNA, 1272 bp, Arabidopsis thaliana
  misc_feature (1)..(1272): Ceres Seq. ID no. 12655029
  misc_feature: MA Experiment ID: 20000306 Result: Up-regulated in Transcription
  misc_feature: MA Experiment 20000306 PARAMETER Experiment Name: At_Germinating_Seeds_Sub_P Parameter: Age (hr) Value: 6 vs. 0
  misc_feature: MA Experiment 20000306 PARAMETER Experiment Name: At_Germinating_Seeds_Sub_P Parameter: Organism Value: A. thaliana
  misc_feature: MA Experiment 20000306 PARAMETER Experiment Name: At_Germinating_Seeds_Sub_P Parameter: Plant Line Value: WS
  misc_feature: MA Experiment 20000306 PARAMETER Experiment Name: At_Germinating_Seeds_Sub_P Parameter: Tissue Value: Germinating Seeds
  misc_feature: MA Experiment ID: 20000307 Result: Up-regulated in Transcription
  misc_feature: MA Experiment 20000307 PARAMETER Experiment Name: At_Germinating_Seeds_Sub_P Parameter: Age (hr) Value: 24 vs. 0
  misc_feature: MA Experiment 20000307 PARAMETER Experiment Name: At_Germinating_Seeds_Sub_P Parameter: Organism Value: A. thaliana
  misc_feature: MA Experiment 20000307 PARAMETER Experiment Name: At_Germinating_Seeds_Sub_P Parameter: Plant Line Value: WS
  misc_feature: MA Experiment 20000307 PARAMETER Experiment Name: At_Germinating_Seeds_Sub_P Parameter: Tissue Value: Germinating Seeds
  misc_feature: MA Experiment ID: 20000327 Result: Down-regulated in Transcription
  misc_feature: MA Experiment 20000327 PARAMETER Experiment Name: At_42deg_Heat_Sub_P Parameter: Age (day) Value: 14
  misc_feature: MA Experiment 20000327 PARAMETER Experiment Name: At_42deg_Heat_Sub_P Parameter: Organism Value: A. thaliana
  misc_feature: MA Experiment 20000327 PARAMETER Experiment Name: At_42deg_Heat_Sub_P Parameter: Plant Line Value: WS
  misc_feature: MA Experiment 20000327 PARAMETER Experiment Name: At_42deg_Heat_Sub_P Parameter: Temperature (deg C) Value: 42 vs. 22
  misc_feature: MA Experiment 20000327 PARAMETER Experiment Name: At_42deg_Heat_Sub_P Parameter: Timepoint (hr) Value: 1
  misc_feature: MA Experiment 20000327 PARAMETER Experiment Name: At_42deg_Heat_Sub_P Parameter: Tissue Value: Aerial
  misc_feature: MA Experiment ID: 20000328 Result: Down-regulated in Transcription
  misc_feature: MA Experiment 20000328 PARAMETER Experiment Name: At_42deg_Heat_Sub_P Parameter: Age (day) Value: 14
  misc_feature: MA Experiment 20000328 PARAMETER Experiment Name: At_42deg_Heat_Sub_P Parameter: Organism Value: A. thaliana
  misc_feature: MA Experiment 20000328 PARAMETER Experiment Name: At_42deg_Heat_Sub_P Parameter: Plant Line Value: WS
  misc_feature: MA Experiment 20000328 PARAMETER Experiment Name: At_42deg_Heat_Sub_P Parameter: Temperature (deg C) Value: 42 vs. 22
  misc_feature: MA Experiment 20000328 PARAMETER Experiment Name: At_42deg_Heat_Sub_P Parameter: Timepoint (hr) Value: 6
  misc_feature: MA Experiment 20000328 PARAMETER Experiment Name: At_42deg_Heat_Sub_P Parameter: Tissue Value: Aerial
atgaggaagcttttcttgttagggtttatagttgcaggactggttcttgggaatgaggcaaatgggtatttagagttcaatgtcactgaattagatcgcattgaggatttagagtttggtttctccaaatttagttccaatttcaatccattaatggttggtctcacacttatcagaggagctggttctaaaggagctgtttgtttggatggtacattgcctggatatcacttacatcgtggacatggatctggagccaatagctggttaattcaattagagggaggaggatggtgtgacaacattaggaactgtgtataccgaaagaagtcgcgtcgcggatcttctaactatatggagaaacaaatacagtttacaggaatacttagcaataaagctcaagaaaatccagactttttcaactggaatcgagttaagcttcgttactgcgatggtggttccttcagtggagatagtcagaacaaggctgcacggcttcagtttagaggagagaagatatggagagccgcaatggacgatttgaaggcaaagggaatgcgaaatgcgaaacaggcacttctatctggttgctctgcaggtggtctagcagttattttacgctgtgacgaattcagaaacttgttttctggatggaccagagttaaatgcttaagtgatgcaggcttgttcttggacacgcctgatgtatccggtggacacactataaggaatttatataacggcgttgtgcagttgcagggagtgaagaacaatttgccacatttatgcactaaccatctcaatccaacctctgtaagctcttctttacttagttgtttcttccctcaaaacttgatcagtcagatgaaaactcctcttttcattgtcaatgcagcatatgatatttggcagattcaaagcagtatcgctccgccgagtgcagatcctagtggttattggcatgaatgcagattaaaccacggtagatgcactccggcgcagatacggttcttgcaagggtttagaaaccaaatgttgagagctgtgagtggtttctcgaattcgaaaaagaacggtttgttcatcaattcttgctttgctcattgccaaaccgaaaggcaagacacttggttcgccgatgattctcctgttatacacaaaaaggcggtggcgatagcggttggagattggtatttcgatagagctgaagtgaagctaatagattgtccatacccgtgtgataggagctgtcacaatctggtcttcagatga

SEQ ID NO: 80254 - protein, 423 aa, Arabidopsis thaliana
  peptide (1)..(423): Ceres Seq. ID no. 12655030
  misc_feature (37)..(407): Pfam Name: Pectinacetylesterase Pfam Description: Pectinacetylesterase
  misc_feature (1)..(423): Homolog of NCBI NO: 7487997 NR Description: pectin acetylesterase homolog F21E10.11 - thaliana >gi|3047082|gb|AAC13595.1| similar to Vigna radiata
  misc_feature (1)..(423): Homolog of NCBI NO: 18397406 NR Description: pectinacetylesterase, putative; protein id: supported by cDNA: gi_15292826, supported by cDNA: gi_16226324, by cDNA: gi_20465792 [Arabidopsis thaliana]
  misc_feature (1)..(253): Homolog of NCBI NO: 6714404 NR Description: putative pectinacetylesterase [Arabidopsis
  misc_feature (286)..(423): Homolog of NCBI NO: 6714404 NR Description: putative pectinacetylesterase [Arabidopsis
  misc_feature (119)..(423): Homolog of NCBI NO: 30690308 NR Description: pectinacetylesterase, putative [Arabidopsis
  misc_feature (4)..(423): Homolog of NCBI NO: 25347293 NR Description: probable pectinacetylesterase precursor T8L23.6 - Arabidopsis thaliana >gi|12321351|gb|AAG50747.1|AC079733_15
  misc_feature (4)..(423): Homolog of NCBI NO: 30696158 NR Description: pectinacetylesterase, putative [Arabidopsis
  misc_feature (4)..(423): Homolog of NCBI NO: 21703105 NR Description: At1g57590/T8L23_6 [Arabidopsis thaliana]
  misc_feature (11)..(422): Homolog of NCBI NO: 28392968 NR Description: putative pectinacetylesterase [Arabidopsis >gi|28827554|gb|AAO50621.1| putative pectinacetylesterase
  misc_feature (51)..(423): Homolog of NCBI NO: 15226462 NR Description: pectinacetylesterase, putative; protein id: supported by cDNA: gi_15450606 [Arabidopsis thaliana]
MRKLFLLGFIVAGLVLGNEANGYLEFNVTELDRIEDLEFGFSKFSSNFNPLMVGLTLIRGAGSKGAVCLDGTLPGYHLHRGHGSGANSWLIQLEGGGWCDNIRNCVYRKKSRRGSSNYMEKQIQFTGILSNKAQENPDFFNWNRVKLRYCDGGSFSGDSQNKAARLQFRGEKIWRAAMDDLKAKGMRNAKQALLSGCSAGGLAVILRCDEFRNLFSGWTRVKCLSDAGLFLDTPDVSGGHTIRNLYNGVVQLQGVKNNLPHLCTNHLNPTSVSSSLLSCFFPQNLISQMKTPLFIVNAAYDIWQIQSSIAPPSADPSGYWHECRLNHGRCTPAQIRFLQGFRNQMLRAVSGFSNSKKNGLFINSCFAHCQTERQDTWFADDSPVIHKKAVAIAVGDWYFDRAEVKLIDCPYPCDRSCHNLVFR

SEQ ID NO: 80255 - protein, 372 aa, Arabidopsis thaliana
  peptide (1)..(372): Ceres Seq. ID no. 12655031
  misc_feature (1)..(356): Pfam Name: Pectinacetylesterase Pfam Description: Pectinacetylesterase
  misc_feature (1)..(372): Homolog of NCBI NO: 7487997 NR Description: pectin acetylesterase homolog F21E10.11 - thaliana >gi|3047082|gb|AAC13595.1| similar to Vigna radiata
  misc_feature (1)..(372): Homolog of NCBI NO: 18397406 NR Description: pectinacetylesterase, putative; protein id: supported by cDNA: gi_15292826, supported by cDNA: gi_16226324, by cDNA: gi_20465792 [Arabidopsis thaliana]
  misc_feature (1)..(202): Homolog of NCBI NO: 6714404 NR Description: putative pectinacetylesterase [Arabidopsis
  misc_feature (235)..(372): Homolog of NCBI NO: 6714404 NR Description: putative pectinacetylesterase [Arabidopsis
  misc_feature (68)..(372): Homolog of NCBI NO: 30690308 NR Description: pectinacetylesterase, putative [Arabidopsis
  misc_feature (1)..(372): Homolog of NCBI NO: 25347293 NR Description: probable pectinacetylesterase precursor T8L23.6 - Arabidopsis thaliana >gi|12321351|gb|AAG50747.1|AC079733_15
  misc_feature (1)..(372): Homolog of NCBI NO: 30696158 NR Description: pectinacetylesterase, putative [Arabidopsis
  misc_feature (1)..(372): Homolog of NCBI NO: 21703105 NR Description: At1g57590/T8L23_6 [Arabidopsis thaliana]
  misc_feature (1)..(371): Homolog of NCBI NO: 28392968 NR Description: putative pectinacetylesterase [Arabidopsis >gi|28827554|gb|AAO50621.1| putative pectinacetylesterase
  misc_feature (1)..(372): Homolog of NCBI NO: 15226462 NR Description: pectinacetylesterase, putative; protein id: supported by cDNA: gi_15450606 [Arabidopsis thaliana]
MVGLTLIRGAGSKGAVCLDGTLPGYHLHRGHGSGANSWLIQLEGGGWCDNIRNCVYRKKSRRGSSNYMEKQIQFTGILSNKAQENPDFFNWNRVKLRYCDGGSFSGDSQNKAARLQFRGEKIWRAAMDDLKAKGMRNAKQALLSGCSAGGLAVILRCDEFRNLFSGWTRVKCLSDAGLFLDTPDVSGGHTIRNLYNGVVQLQGVKNNLPHLCTNHLNPTSVSSSLLSCFFPQNLISQMKTPLFIVNAAYDIWQIQSSIAPPSADPSGYWHECRLNHGRCTPAQIRFLQGFRNQMLRAVSGFSNSKKNGLFINSCFAHCQTERQDTWFADDSPVIHKKAVAIAVGDWYFDRAEVKLIDCPYPCDRSCHNLVFR

SEQ ID NO: 80256 - protein, 305 aa, Arabidopsis thaliana
  peptide (1)..(305): Ceres Seq. ID no. 12655032
  misc_feature (1)..(289): Pfam Name: Pectinacetylesterase Pfam Description: Pectinacetylesterase
  misc_feature (1)..(305): Homolog of NCBI NO: 7487997 NR Description: pectin acetylesterase homolog F21E10.11 - thaliana >gi|3047082|gb|AAC13595.1| similar to Vigna radiata
  misc_feature (1)..(305): Homolog of NCBI NO: 18397406 NR Description: pectinacetylesterase, putative; protein id: supported by cDNA: gi_15292826, supported by cDNA: gi_16226324, by cDNA: gi_20465792 [Arabidopsis thaliana]
  misc_feature (1)..(135): Homolog of NCBI NO: 6714404 NR Description: putative pectinacetylesterase [Arabidopsis
  misc_feature (168)..(305): Homolog of NCBI NO: 6714404 NR Description: putative pectinacetylesterase [Arabidopsis
  misc_feature (1)..(305): Homolog of NCBI NO: 30690308 NR Description: pectinacetylesterase, putative [Arabidopsis
  misc_feature (1)..(305): Homolog of NCBI NO: 25347293 NR Description: probable pectinacetylesterase precursor T8L23.6 - Arabidopsis thaliana >gi|12321351|gb|AAG50747.1|AC079733_15
  misc_feature (1)..(305): Homolog of NCBI NO: 30696158 NR Description: pectinacetylesterase, putative [Arabidopsis
  misc_feature (1)..(305): Homolog of NCBI NO: 21703105 NR Description: At1g57590/T8L23_6 [Arabidopsis thaliana]
  misc_feature (1)..(304): Homolog of NCBI NO: 28392968 NR Description: putative pectinacetylesterase [Arabidopsis >gi|28827554|gb|AAO50621.1| putative pectinacetylesterase
  misc_feature (1)..(305): Homolog of NCBI NO: 15226462 NR Description: pectinacetylesterase, putative; protein id: supported by cDNA: gi_15450606 [Arabidopsis thaliana]
MEKQIQFTGILSNKAQENPDFFNWNRVKLRYCDGGSFSGDSQNKAARLQFRGEKIWRAAMDDLKAKGMRNAKQALLSGCSAGGLAVILRCDEFRNLFSGWTRVKCLSDAGLFLDTPDVSGGHTIRNLYNGVVQLQGVKNNLPHLCTNHLNPTSVSSSLLSCFFPQNLISQMKTPLFIVNAAYDIWQIQSSIAPPSADPSGYWHECRLNHGRCTPAQIRFLQGFRNQMLRAVSGFSNSKKNGLFINSCFAHCQTERQDTWFADDSPVIHKKAVAIAVGDWYFDRAEVKLIDCPYPCDRSCHNLVFR

SEQ ID NO: 80257 - DNA, 1915 bp, Arabidopsis thaliana
  misc_feature (1)..(1915): Ceres Seq. ID no. 12655043
  misc_feature: MA Experiment ID: 20000185 Result: Up-regulated in Transcription
  misc_feature: MA Experiment 20000185 PARAMETER Experiment Name: At_Roots__P Parameter: Age (day) Value: 7 vs. 21
  misc_feature: MA Experiment 20000185 PARAMETER Experiment Name: At_Roots__P Parameter: Organism Value: A. thaliana
  misc_feature: MA Experiment 20000185 PARAMETER Experiment Name: At_Roots__P Parameter: Tissue Value: Roots vs. Whole Plant
aactccaatgctcacttatacagaagctgagaagcagaaccgcttttatataatcgcactcactcagagaaacagagaagacgatagatagagaaaaaaaaaaaatggcgttggctcttcgtagactctcctcttccgttaagaaaccgatctcgcttctctcctctaatggcggttcactccgtttcatgtcgtctttatcaaccgcagctatggcggaatcggagaaatctcgttctagttggattaagcaattgaatgcatctctagatgaaatcgatcctgaagttgcggatattatcgaattagagaaggctagacaatggaagggatttgaacttataccgtcagagaatttcacttctctatctgtgatgcaagccgttggttctgttatgactaataagtatagtgaaggataccctggagctagatactatggaggaaatgagtacattgacatggctgagacattatgtcaaaaacgcgcattagaagcttttcagttagatccttctaaatggggagtcaatgtgcagtctttatcaggatcaccagctaatttccaagtttacactgcattgttgaagcctcatgaaagaatcatggcacttgatttacctcatggtggacatctttctcatggttatcagactgacacgaagaaaatatcggctgtatccatcttttttgagacaatgccatacagattggatgagaacactggttacattgattatgaccagctagaaaagagtgccgtgcttttcagaccgaaacttattgttgcgggtgcaagtgcttatgctcgtctatatgactatgcacgtattcgtaaggtctgtaacaagcaaaaggcagttatgttggctgatatggctcatattagtgggttggttgctgctggcgttattccttctccttttgagtatgcagatgttgttacgactacaactcacaaatcgcttcgcggtcctagaggggctatgatattctttaggaaggggttaaaagagattaacaaacaagggaaagaggtcatgtatgactatgaggacagaattaatcaagctgtttttcctggactgcaaggtggtccacataatcacactataacgggtctagcagttgctctgaagcaggcaagaactcctgagtacaaggcctaccaggatcaagttctccgtaattgctcaaagtttgctgagactttgcttgcgaaaggatatgatttagtgtctggaggcactgataatcatttagttttggtgaatctgaaaaacaagggaatagatggatcaagagtggaaaaagtattagaattagtacatattgcagcaaacaagaatactgttcctggtgatgtttctgccatggttcccggtggcatccgtatgggaacaccagccctcacatcaagaggattcattgaggaagattttgcaaaagtggcggagtattttgatttagccgtcaagatagccttaaagatcaaagcagagtctcaaggaacaaagttgaaagactttgtagcaacaatgcaatcaaatgagaaattacagtcagagatgtcaaagctccgtgagatggtagaagaatatgctaagcaattcccaacgattgggttcgagaaagagacgatgagatacaaagagtagttttcatcgtgtggattgacacgtttccacatctctgagatgctttagtgatcatggaccagaggcgcaaccgatggtctgaagtatcgctgaaactaaagttgaactaaaaaaatcgcactccaatgttgtctcttaccctttccttttgtctctcaaattttatctttgcttccttaagttggttcctcaaaattcaaaatttgtaatgcaactggtttaaggttgctatgatggataatggcaactaaagttat

SEQ ID NO: 80258 - protein, 517 aa, Arabidopsis thaliana
  peptide (1)..(517): Ceres Seq. ID no. 12655044
  misc_feature (55)..(453): Pfam Name: Serine hydroxymethyltransferase Pfam Description: Serine hydroxymethyltransferase
  misc_feature (1)..(517): Homolog of NCBI NO: 30690394 NR Description: glycine hydroxymethyltransferase - like protein
  misc_feature (1)..(517): Homolog of NCBI NO: 14334888 NR Description: putative glycine hydroxymethyltransferase
  misc_feature (1)..(517): Homolog of NCBI NO: 30690400 NR Description: glycine hydroxymethyltransferase - like protein
  misc_feature (1)..(516): Homolog of NCBI NO: 1707998 NR Description: SERINE HYDROXYMETHYLTRANSFERASE, MITOCHONDRIAL
  misc_feature (1)..(516): Homolog of NCBI NO: 15235745 NR Description: glycine hydroxymethyltransferase like protein; id: At4g37930.1, supported by cDNA: 33799., supported by cDNA: supported by cDNA: gi_16226392, supported by cDNA:
  misc_feature (1)..(516): Homolog of NCBI NO: 15809972 NR Description: AT4g37930/F20D10_50 [Arabidopsis thaliana]
  misc_feature (1)..(516): Homolog of NCBI NO: 1346155 NR Description: Serine hydroxymethyltransferase 1, mitochondrial (Serine methylase) (Glycine hydroxymethyltransferase) (SHMT) glycine hydroxymethyltransferase (EC glycine
  misc_feature (1)..(517): Homolog of NCBI NO: 462187 NR Description: SERINE HYDROXYMETHYLTRANSFERASE, MITOCHONDRIAL
  misc_feature (1)..(516): Homolog of NCBI NO: 1346156 NR Description: Serine hydroxymethyltransferase 2, mitochondrial (Serine methylase) (Glycine hydroxymethyltransferase) (SHMT) glycine hydroxymethyltransferase (EC glycine
  misc_feature (1)..(475): Homolog of NCBI NO: 7433553 NR Description: glycine hydroxymethyltransferase (EC 2.1.2.1)
MALALRRLSSSVKKPISLLSSNGGSLRFMSSLSTAAMAESEKSRSSWIKQLNASLDEIDPEVADIIELEKARQWKGFELIPSENFTSLSVMQAVGSVMTNKYSEGYPGARYYGGNEYIDMAETLCQKRALEAFQLDPSKWGVNVQSLSGSPANFQVYTALLKPHERIMALDLPHGGHLSHGYQTDTKKISAVSIFFETMPYRLDENTGYIDYDQLEKSAVLFRPKLIVAGASAYARLYDYARIRKVCNKQKAVMLADMAHISGLVAAGVIPSPFEYADVVTTTTHKSLRGPRGAMIFFRKGLKEINKQGKEVMYDYEDRINQAVFPGLQGGPHNHTITGLAVALKQARTPEYKAYQDQVLRNCSKFAETLLAKGYDLVSGGTDNHLVLVNLKNKGIDGSRVEKVLELVHIAANKNTVPGDVSAMVPGGIRMGTPALTSRGFIEEDFAKVAEYFDLAVKIALKIKAESQGTKLKDFVATMQSNEKLQSEMSKLREMVEEYAKQFPTIGFEKETMRYKE

SEQ ID NO: 80259 - protein, 489 aa, Arabidopsis thaliana
  peptide (1)..(489): Ceres Seq. ID no. 12655045
  misc_feature (27)..(425): Pfam Name: Serine hydroxymethyltransferase Pfam Description: Serine hydroxymethyltransferase
  misc_feature (1)..(489): Homolog of NCBI NO: 30690394 NR Description: glycine hydroxymethyltransferase - like protein
  misc_feature (1)..(489): Homolog of NCBI NO: 14334888 NR Description: putative glycine hydroxymethyltransferase
  misc_feature (1)..(489): Homolog of NCBI NO: 30690400 NR Description: glycine hydroxymethyltransferase - like protein
  misc_feature (1)..(488): Homolog of NCBI NO: 1707998 NR Description: SERINE HYDROXYMETHYLTRANSFERASE, MITOCHONDRIAL
  misc_feature (1)..(488): Homolog of NCBI NO: 15235745 NR Description: glycine hydroxymethyltransferase like protein; id: At4g37930.1, supported by cDNA: 33799., supported by cDNA: supported by cDNA: gi_16226392, supported by cDNA:
  misc_feature (1)..(488): Homolog of NCBI NO: 15809972 NR Description: AT4g37930/F20D10_50 [Arabidopsis thaliana]
  misc_feature (1)..(488): Homolog of NCBI NO: 1346155 NR Description: Serine hydroxymethyltransferase 1, mitochondrial (Serine methylase) (Glycine hydroxymethyltransferase) (SHMT) glycine hydroxymethyltransferase (EC glycine
  misc_feature (1)..(489): Homolog of NCBI NO: 462187 NR Description: SERINE HYDROXYMETHYLTRANSFERASE, MITOCHONDRIAL
  misc_feature (1)..(488): Homolog of NCBI NO: 1346156 NR Description: Serine hydroxymethyltransferase 2, mitochondrial (Serine methylase) (Glycine hydroxymethyltransferase) (SHMT) glycine hydroxymethyltransferase (EC glycine
  misc_feature (1)..(447): Homolog of NCBI NO: 7433553 NR Description: glycine hydroxymethyltransferase (EC 2.1.2.1)
MSSLSTAAMAESEKSRSSWIKQLNASLDEIDPEVADIIELEKARQWKGFELIPSENFTSLSVMQAVGSVMTNKYSEGYPGARYYGGNEYIDMAETLCQKRALEAFQLDPSKWGVNVQSLSGSPANFQVYTALLKPHERIMALDLPHGGHLSHGYQTDTKKISAVSIFFETMPYRLDENTGYIDYDQLEKSAVLFRPKLIVAGASAYARLYDYARIRKVCNKQKAVMLADMAHISGLVAAGVIPSPFEYADVVTTTTHKSLRGPRGAMIFFRKGLKEINKQGKEVMYDYEDRINQAVFPGLQGGPHNHTITGLAVALKQARTPEYKAYQDQVLRNCSKFAETLLAKGYDLVSGGTDNHLVLVNLKNKGIDGSRVEKVLELVHIAANKNTVPGDVSAMVPGGIRMGTPALTSRGFIEEDFAKVAEYFDLAVKIALKIKAESQGTKLKDFVATMQSNEKLQSEMSKLREMVEEYAKQFPTIGFEKETMRYKE

SEQ ID NO: 80260 - protein, 481 aa, Arabidopsis thaliana
  peptide (1)..(481): Ceres Seq. ID no. 12655046
  misc_feature (19)..(417): Pfam Name: Serine hydroxymethyltransferase Pfam Description: Serine hydroxymethyltransferase
  misc_feature (1)..(481): Homolog of NCBI NO: 30690394 NR Description: glycine hydroxymethyltransferase - like protein
  misc_feature (1)..(481): Homolog of NCBI NO: 14334888 NR Description: putative glycine hydroxymethyltransferase
  misc_feature (1)..(481): Homolog of NCBI NO: 30690400 NR Description: glycine hydroxymethyltransferase - like protein
  misc_feature (1)..(480): Homolog of NCBI NO: 1707998 NR Description: SERINE HYDROXYMETHYLTRANSFERASE, MITOCHONDRIAL
  misc_feature (1)..(480): Homolog of NCBI NO: 15235745 NR Description: glycine hydroxymethyltransferase like protein; id: At4g37930.1, supported by cDNA: 33799., supported by cDNA: supported by cDNA: gi_16226392, supported by cDNA:
  misc_feature (1)..(480): Homolog of NCBI NO: 15809972 NR Description: AT4g37930/F20D10_50 [Arabidopsis thaliana]
  misc_feature (1)..(480): Homolog of NCBI NO: 1346155 NR Description: Serine hydroxymethyltransferase 1, mitochondrial (Serine methylase) (Glycine hydroxymethyltransferase) (SHMT) glycine hydroxymethyltransferase (EC glycine
  misc_feature (1)..(481): Homolog of NCBI NO: 462187 NR Description: SERINE HYDROXYMETHYLTRANSFERASE, MITOCHONDRIAL
  misc_feature (1)..(480): Homolog of NCBI NO: 1346156 NR Description: Serine hydroxymethyltransferase 2, mitochondrial (Serine methylase) (Glycine hydroxymethyltransferase) (SHMT) glycine hydroxymethyltransferase (EC glycine
  misc_feature (1)..(439): Homolog of NCBI NO: 7433553 NR Description: glycine hydroxymethyltransferase (EC 2.1.2.1)
MAESEKSRSSWIKQLNASLDEIDPEVADIIELEKARQWKGFELIPSENFTSLSVMQAVGSVMTNKYSEGYPGARYYGGNEYIDMAETLCQKRALEAFQLDPSKWGVNVQSLSGSPANFQVYTALLKPHERIMALDLPHGGHLSHGYQTDTKKISAVSIFFETMPYRLDENTGYIDYDQLEKSAVLFRPKLIVAGASAYARLYDYARIRKVCNKQKAVMLADMAHISGLVAAGVIPSPFEYADVVTTTTHKSLRGPRGAMIFFRKGLKEINKQGKEVMYDYEDRINQAVFPGLQGGPHNHTITGLAVALKQARTPEYKAYQDQVLRNCSKFAETLLAKGYDLVSGGTDNHLVLVNLKNKGIDGSRVEKVLELVHIAANKNTVPGDVSAMVPGGIRMGTPALTSRGFIEEDFAKVAEYFDLAVKIALKIKAESQGTKLKDFVATMQSNEKLQSEMSKLREMVEEYAKQFPTIGFEKETMRYKE

SEQ ID NO: 80261 - DNA, 3194 bp, Arabidopsis thaliana
  misc_feature (1)..(3194): Ceres Seq. ID no. 12655073
  misc_feature: MA Experiment ID: 20000185 Result: Up-regulated in Transcription
  misc_feature: MA Experiment 20000185 PARAMETER Experiment Name: At_Roots__P Parameter: Age (day) Value: 7 vs. 21
  misc_feature: MA Experiment 20000185 PARAMETER Experiment Name: At_Roots__P Parameter: Organism Value: A. thaliana
  misc_feature: MA Experiment 20000185 PARAMETER Experiment Name: At_Roots__P Parameter: Tissue Value: Roots vs. Whole Plant
  misc_feature: MA Experiment ID: 20000286 Result: Up-regulated in Transcription
  misc_feature: MA Experiment 20000286 PARAMETER Experiment Name: At_Open_Flower_P Parameter: Age (day) Value: 21
  misc_feature: MA Experiment 20000286 PARAMETER Experiment Name: At_Open_Flower_P Parameter: Plant Line Value: WS
  misc_feature: MA Experiment 20000286 PARAMETER Experiment Name: At_Open_Flower_P Parameter: Tissue Value: Half Open vs. Whole Plant
aaacaccgcaattttctctgcatctcataatttcaccagaatctcagatggcgacgacatcggagatcaacaatgatctttcgttttccgttgtatcgattgttgaagatgttcttcaacaacatagtagccgatcaagcgacgtcggtttggtttccagaaaagttgaagaatcttctttgagaagatatgaagctgctgggtggcttagagatatgatcggagtttccaatggtaaagattttccaggagagccttctgaagaagagtttaggcttggattgcgaagtgggatcgttctttgtaatgttcttaacaaagttaatcctggatcagtctcaaaggtcgttgaagcgccggacgatgttgcagatggagctgcactttcagcttttcaatactttgaaaacataaggaattttttagtagctatagaggaaatggggttgccatcatttgaagcttcagatatggagaagggaggcaagtctataaggatagtgaactgcattcttgcccttaagtcttatagtgagtggaaactgaaaggtgaaaatggtccatggaggtatggatctaacatgaaacataactttggatcgagaaaactatttctgagaaaaagttcagagccatttgttagttctatatcgagaactcagtcgacggatatgttatcaactgatcaacctctgagttctgatggagattctagatccataaatgggcttgttcggtcattcattgcagacagaaagcatgaagatattccaaatgttgtagagtctgtgttgaacaaagttatggaagaagtccagcagcgtttatcaatccacaatgaaatgatgaaatcaagttcaaagcctattccagaagatgattcatcctgtgagacagtggtccggtctcagctgtgtgatgcaagacaacatgaggaagcagaagaaaatagtccgccccaggttgtggaaaaaaagtttcaaaggacaaattttgaacatcacgaagaacaaaagattcttctgaatcaacaaaaacacatccaggagttgaagcaaaccttatacactacaaaagcaggaatgaaattgctgcagatgaagtatcaagaagatttctttcatctaggcaagcatttaaatggtttagcttatgcggctacgggatacaaaagggttcttgaagaaaaccgtaaactgtacaatctagtgcaggatctaaaaggaaacatacgggtgtactgtcgagttaggccgttcttgcctgggcaagaaagtggtggtttgagtgccgtggaagacatagacgaagggaccatcacgatcagagttccatcaaagtatgggaaagcaggacaaaaaccatttatgttcaacaaagtctttggtccttctgcaacacaagaggaagtgttttcagacatgcagcctttggtacggtcggttctcgatggctacaatgtctgcatcttcgcttatggccaaaccgggtcagggaaaacttttaccatgacagggcctaaggaactgactgaagagagcctaggtgtgaactacagggcactggcagatctgtttcttctatcaaatcaaagaaaagacacgaccagctacgaaatctcagttcagatgttggaaatttacaacgagcaagtcagagatctacttgcccaagatggccagactaaaaggttagagatcagaaacaactctcacaatggaatcaatgtaccggaagcaagtctagtgcctgtctcatcgacggatgacgttatacagctaatggatttgggacacatgaatcgtgcagtgagctctacagccatgaatgacagaagtagtcgatctcacagttgtgtaactgttcatgttcaaggcagagacctcacatctggctctatcctccatggttctatgcatctggttgatcttgcaggaagcgagagagtggacaagtctgaggtgactggagacagactgaaggaggctcaacacatcaacaagtccctctcggctcttggagatgtcatctcctcgctttcccagaagacttctcatgtgccttacagaaacagtaaactcactcagctgctgcaggactccctcggaggatcagccaagacacttatgtttgtccacataagtccagaacctgacactctcggagaaactattagtactctgaagtttgctgaacgagtggggagtgttgagctaggcgctgctcgtgtgaacaaagataactcagaggttaaggagcttaaagagcagattgctaatcttaagatggctctagtgaggaaaggaaatggtaatgatgtacaaccaacagctataccaatcaaccgtgagagaatatcgagaagaagatcactcgaaactcctactattcgacccaaattacctaccatgggaaacacatcaaacaacagtaggccccagatcatggatctaagtggaccagaggcttttaacgacagtactgcatcttcaagaagacacagcttagatatccatgagctaatgaaatcttcttctccggcttggccgaggcagccactcaatggaaaagacgaggacagagaatctaagtcgggcgagtggatcgataagcatgaagaattaattcaaaatcagaatccaaattctcccgagcaattctaccagtcaatggtccctcaacaacaatcactatatggtgggaaacaagatttcgaagtgcagagtattacagataacgaatctgatgaagccgcaacaagcgattgctcagattccgatttgctgtggcgattgagcgttcaagtgaatgttcccaaagtttctaatatccaaaactcagcaaaccccaaaccaaagaaaattcagcccagaactgctaaactctcagaaactagaagtttaattccatcgctgatcccagcaccaagcaagagacctcctaacacagtaaattcacagccgcagcgaccaacgagagatggaaaacgcagactgagtttaggcacatgaacacaccagttttgtaaagagtttaaaaaggaaggagacaaatatttgttgttttgtatattgtgagagaaagctttctctgttgtggccgctcttattgtgccattaaggtaaaaatctcaaatttgctgttttgagtgtacaaaaaatgattccttattatacaatcttcttttggattct

SEQ ID NO: 80262 - protein, 1002 aa, Arabidopsis thaliana
  peptide (1)..(1002): Ceres Seq. ID no. 12655074
  misc_feature (16)..(997): Homolog of NCBI NO: 28393382 NR Description: putative kinesin [Arabidopsis thaliana]
  misc_feature (16)..(767): Homolog of NCBI NO: 30690701 NR Description: kinesin-related protein [Arabidopsis thaliana]
  misc_feature (424)..(955): Homolog of NCBI NO: 7487566 NR Description: probable kinesin heavy chain [imported] - thaliana >gi|2529677|gb|AAC62860.1| putative kinesin heavy chain
  misc_feature (16)..(281): Homolog of NCBI NO: 7487566 NR Description: probable kinesin heavy chain [imported] - thaliana >gi|2529677|gb|AAC62860.1| putative kinesin heavy chain
  misc_feature (259)..(849): Homolog of NCBI NO: 30692267 NR Description: kinesin-related protein [Arabidopsis thaliana]
  misc_feature (82)..(236): Homolog of NCBI NO: 30692267 NR Description: kinesin-related protein [Arabidopsis thaliana]
  misc_feature (259)..(849): Homolog of NCBI NO: 18201934 NR Description: kinesin-like protein heavy chain [Arabidopsis
  misc_feature (82)..(236): Homolog of NCBI NO: 18201934 NR Description: kinesin-like protein heavy chain [Arabidopsis
  misc_feature (565)..(977): Homolog of NCBI NO: 22329432 NR Description: kinesin-related protein; protein id: At1g09170.1
  misc_feature (55)..(286): Homolog of NCBI NO: 22329432 NR Description: kinesin-related protein; protein id: At1g09170.1
TPQFSLHLIISPESQMATTSEINNDLSFSVVSIVEDVLQQHSSRSSDVGLVSRKVEESSLRRYEAAGWLRDMIGVSNGKDFPGEPSEEEFRLGLRSGIVLCNVLNKVNPGSVSKVVEAPDDVADGAALSAFQYFENIRNFLVAIEEMGLPSFEASDMEKGGKSIRIVNCILALKSYSEWKLKGENGPWRYGSNMKHNFGSRKLFLRKSSEPFVSSISRTQSTDMLSTDQPLSSDGDSRSINGLVRSFIADRKHEDIPNVVESVLNKVMEEVQQRLSIHNEMMKSSSKPIPEDDSSCETVVRSQLCDARQHEEAEENSPPQVVEKKFQRTNFEHHEEQKILLNQQKHIQELKQTLYTTKAGMKLLQMKYQEDFFHLGKHLNGLAYAATGYKRVLEENRKLYNLVQDLKGNIRVYCRVRPFLPGQESGGLSAVEDIDEGTITIRVPSKYGKAGQKPFMFNKVFGPSATQEEVFSDMQPLVRSVLDGYNVCIFAYGQTGSGKTFTMTGPKELTEESLGVNYRALADLFLLSNQRKDTTSYEISVQMLEIYNEQVRDLLAQDGQTKRLEIRNNSHNGINVPEASLVPVSSTDDVIQLMDLGHMNRAVSSTAMNDRSSRSHSCVTVHVQGRDLTSGSILHGSMHLVDLAGSERVDKSEVTGDRLKEAQHINKSLSALGDVISSLSQKTSHVPYRNSKLTQLLQDSLGGSAKTLMFVHISPEPDTLGETISTLKFAERVGSVELGAARVNKDNSEVKELKEQIANLKMALVRKGNGNDVQPTAIPINRERISRRRSLETPTIRPKLPTMGNTSNNSRPQIMDLSGPEAFNDSTASSRRHSLDIHELMKSSSPAWPRQPLNGKDEDRESKSGEWIDKHEELIQNQNPNSPEQFYQSMVPQQQSLYGGKQDFEVQSITDNESDEAATSDCSDSDLLWRLSVQVNVPKVSNIQNSANPKPKKIQPRTAKLSETRSLIPSLIPAPSKRPPNTVNSQPQRPTRDGKRRLSLGT

SEQ ID NO: 80263 - protein, 987 aa, Arabidopsis thaliana
  peptide (1)..(987): Ceres Seq. ID no. 12655075
  misc_feature (1)..(982): Homolog of NCBI NO: 28393382 NR Description: putative kinesin [Arabidopsis thaliana]
  misc_feature (1)..(752): Homolog of NCBI NO: 30690701 NR Description: kinesin-related protein [Arabidopsis thaliana]
  misc_feature (409)..(940): Homolog of NCBI NO: 7487566 NR Description: probable kinesin heavy chain [imported] - thaliana >gi|2529677|gb|AAC62860.1| putative kinesin heavy chain
  misc_feature (1)..(266): Homolog of NCBI NO: 7487566 NR Description: probable kinesin heavy chain [imported] - thaliana >gi|2529677|gb|AAC62860.1| putative kinesin heavy chain
  misc_feature (244)..(834): Homolog of NCBI NO: 30692267 NR Description: kinesin-related protein [Arabidopsis thaliana]
  misc_feature (67)..(221): Homolog of NCBI NO: 30692267 NR Description: kinesin-related protein [Arabidopsis thaliana]
  misc_feature (244)..(834): Homolog of NCBI NO: 18201934 NR Description: kinesin-like protein heavy chain [Arabidopsis
  misc_feature (67)..(221): Homolog of NCBI NO: 18201934 NR Description: kinesin-like protein heavy chain [Arabidopsis
  misc_feature (550)..(962): Homolog of NCBI NO: 22329432 NR Description: kinesin-related protein; protein id: At1g09170.1
  misc_feature (40)..(271): Homolog of NCBI NO: 22329432 NR Description: kinesin-related protein; protein id: At1g09170.1
MATTSEINNDLSFSVVSIVEDVLQQHSSRSSDVGLVSRKVEESSLRRYEAAGWLRDMIGVSNGKDFPGEPSEEEFRLGLRSGIVLCNVLNKVNPGSVSKVVEAPDDVADGAALSAFQYFENIRNFLVAIEEMGLPSFEASDMEKGGKSIRIVNCILALKSYSEWKLKGENGPWRYGSNMKHNFGSRKLFLRKSSEPFVSSISRTQSTDMLSTDQPLSSDGDSRSINGLVRSFIADRKHEDIPNVVESVLNKVMEEVQQRLSIHNEMMKSSSKPIPEDDSSCETVVRSQLCDARQHEEAEENSPPQVVEKKFQRTNFEHHEEQKILLNQQKHIQELKQTLYTTKAGMKLLQMKYQEDFFHLGKHLNGLAYAATGYKRVLEENRKLYNLVQDLKGNIRVYCRVRPFLPGQESGGLSAVEDIDEGTITIRVPSKYGKAGQKPFMFNKVFGPSATQEEVFSDMQPLVRSVLDGYNVCIFAYGQTGSGKTFTMTGPKELTEESLGVNYRALADLFLLSNQRKDTTSYEISVQMLEIYNEQVRDLLAQDGQTKRLEIRNNSHNGINVPEASLVPVSSTDDVIQLMDLGHMNRAVSSTAMNDRSSRSHSCVTVHVQGRDLTSGSILHGSMHLVDLAGSERVDKSEVTGDRLKEAQHINKSLSALGDVISSLSQKTSHVPYRNSKLTQLLQDSLGGSAKTLMFVHISPEPDTLGETISTLKFAERVGSVELGAARVNKDNSEVKELKEQIANLKMALVRKGNGNDVQPTAIPINRERISRRRSLETPTIRPKLPTMGNTSNNSRPQIMDLSGPEAFNDSTASSRRHSLDIHELMKSSSPAWPRQPLNGKDEDRESKSGEWIDKHEELIQNQNPNSPEQFYQSMVPQQQSLYGGKQDFEVQSITDNESDEAATSDCSDSDLLWRLSVQVNVPKVSNIQNSANPKPKKIQPRTAKLSETRSLIPSLIPAPSKRPPNTVNSQPQRPTRDGKRRLSLGT

SEQ ID NO: 80264 - protein, 931 aa, Arabidopsis thaliana
  peptide (1)..(931): Ceres Seq. ID no. 12655076
  misc_feature (1)..(926): Homolog of NCBI NO: 28393382 NR Description: putative kinesin [Arabidopsis thaliana]
  misc_feature (1)..(696): Homolog of NCBI NO: 30690701 NR Description: kinesin-related protein [Arabidopsis thaliana]
  misc_feature (353)..(884): Homolog of NCBI NO: 7487566 NR Description: probable kinesin heavy chain [imported] - thaliana >gi|2529677|gb|AAC62860.1| putative kinesin heavy chain
  misc_feature (1)..(210): Homolog of NCBI NO: 7487566 NR Description: probable kinesin heavy chain [imported] - thaliana >gi|2529677|gb|AAC62860.1| putative kinesin heavy chain
  misc_feature (188)..(778): Homolog of NCBI NO: 30692267 NR Description: kinesin-related protein [Arabidopsis thaliana]
  misc_feature (11)..(165): Homolog of NCBI NO: 30692267 NR Description: kinesin-related protein [Arabidopsis thaliana]
  misc_feature (188)..(778): Homolog of NCBI NO: 18201934 NR Description: kinesin-like protein heavy chain [Arabidopsis
  misc_feature (11)..(165): Homolog of NCBI NO: 18201934 NR Description: kinesin-like protein heavy chain [Arabidopsis
  misc_feature (494)..(906): Homolog of NCBI NO: 22329432 NR Description: kinesin-related protein; protein id: At1g09170.1
  misc_feature (1)..(215): Homolog of NCBI NO: 22329432 NR Description: kinesin-related protein; protein id: At1g09170.1
MIGVSNGKDFPGEPSEEEFRLGLRSGIVLCNVLNKVNPGSVSKVVEAPDDVADGAALSAFQYFENIRNFLVAIEEMGLPSFEASDMEKGGKSIRIVNCILALKSYSEWKLKGENGPWRYGSNMKHNFGSRKLFLRKSSEPFVSSISRTQSTDMLSTDQPLSSDGDSRSINGLVRSFIADRKHEDIPNVVESVLNKVMEEVQQRLSIHNEMMKSSSKPIPEDDSSCETVVRSQLCDARQHEEAEENSPPQVVEKKFQRTNFEHHEEQKILLNQQKHIQELKQTLYTTKAGMKLLQMKYQEDFFHLGKHLNGLAYAATGYKRVLEENRKLYNLVQDLKGNIRVYCRVRPFLPGQESGGLSAVEDIDEGTITIRVPSKYGKAGQKPFMFNKVFGPSATQEEVFSDMQPLVRSVLDGYNVCIFAYGQTGSGKTFTMTGPKELTEESLGVNYRALADLFLLSNQRKDTTSYEISVQMLEIYNEQVRDLLAQDGQTKRLEIRNNSHNGINVPEASLVPVSSTDDVIQLMDLGHMNRAVSSTAMNDRSSRSHSCVTVHVQGRDLTSGSILHGSMHLVDLAGSERVDKSEVTGDRLKEAQHINKSLSALGDVISSLSQKTSHVPYRNSKLTQLLQDSLGGSAKTLMFVHISPEPDTLGETISTLKFAERVGSVELGAARVNKDNSEVKELKEQIANLKMALVRKGNGNDVQPTAIPINRERISRRRSLETPTIRPKLPTMGNTSNNSRPQIMDLSGPEAFNDSTASSRRHSLDIHELMKSSSPAWPRQPLNGKDEDRESKSGEWIDKHEELIQNQNPNSPEQFYQSMVPQQQSLYGGKQDFEVQSITDNESDEAATSDCSDSDLLWRLSVQVNVPKVSNIQNSANPKPKKIQPRTAKLSETRSLIPSLIPAPSKRPPNTVNSQPQRPTRDGKRRLSLGT

SEQ ID NO: 80265 - DNA, 1086 bp, Arabidopsis thaliana
  misc_feature (1)..(1086): Ceres Seq. ID no. 12655116
  misc_feature: MA Experiment ID: 20000171 Result: Down-regulated in Transcription
  misc_feature: MA Experiment 20000171 PARAMETER Experiment Name: At_42deg_Heat_P Parameter: Age (day) Value: 14
  misc_feature: MA Experiment 20000171 PARAMETER Experiment Name: At_42deg_Heat_P Parameter: Organism Value: A. thaliana
  misc_feature: MA Experiment 20000171 PARAMETER Experiment Name: At_42deg_Heat_P Parameter: Plant Line Value: WS
  misc_feature: MA Experiment 20000171 PARAMETER Experiment Name: At_42deg_Heat_P Parameter: Temperature (deg C) Value: 42 vs. 22
  misc_feature: MA Experiment 20000171 PARAMETER Experiment Name: At_42deg_Heat_P Parameter: Timepoint (hr) Value: 1
  misc_feature: MA Experiment 20000171 PARAMETER Experiment Name: At_42deg_Heat_P Parameter: Tissue Value: Aerial
  misc_feature: MA Experiment ID: 20000173 Result: Down-regulated in Transcription
  misc_feature: MA Experiment 20000173 PARAMETER Experiment Name: At_42deg_Heat_P Parameter: Age (day) Value: 14
  misc_feature: MA Experiment 20000173 PARAMETER Experiment Name: At_42deg_Heat_P Parameter: Organism Value: A. thaliana
  misc_feature: MA Experiment 20000173 PARAMETER Experiment Name: At_42deg_Heat_P Parameter: Plant Line Value: WS
  misc_feature: MA Experiment 20000173 PARAMETER Experiment Name: At_42deg_Heat_P Parameter: Temperature (deg C) Value: 42 vs. 22
  misc_feature: MA Experiment 20000173 PARAMETER Experiment Name: At_42deg_Heat_P Parameter: Timepoint (hr) Value: 6
  misc_feature: MA Experiment 20000173 PARAMETER Experiment Name: At_42deg_Heat_P Parameter: Tissue Value: Aerial
  misc_feature: MA Experiment ID: 20000184 Result: Down-regulated in Transcription
  misc_feature: MA Experiment 20000184 PARAMETER Experiment Name: At_Shoots__P Parameter: Age (day) Value: 7
  misc_feature: MA Experiment 20000184 PARAMETER Experiment Name: At_Shoots__P Parameter: Tissue Value: Shoots vs. Whole Plant
  misc_feature: MA Experiment ID: 20000235 Result: Up-regulated in Transcription
  misc_feature: MA Experiment 20000235 PARAMETER Experiment Name: At_Siliques_P Parameter: Age (day) Value: 21
  misc_feature: MA Experiment 20000235 PARAMETER Experiment Name: At_Siliques_P Parameter: Organism Value: A. thaliana
  misc_feature: MA Experiment 20000235 PARAMETER Experiment Name: At_Siliques_P Parameter: Plant Line Value: WS
  misc_feature: MA Experiment 20000235 PARAMETER Experiment Name: At_Siliques_P Parameter: Tissue Value: 5-10mm Siliques vs. Whole Plant
  misc_feature: MA Experiment ID: 20000496 Result: Up-regulated in Transcription
  misc_feature: MA Experiment 20000496 PARAMETER Experiment Name: At_Guard_Cells_P Parameter: Harvest Date Value: 7/19/2002
  misc_feature: MA Experiment 20000496 PARAMETER Experiment Name: At_Guard_Cells_P Parameter: Organism Value: Canola
  misc_feature: MA Experiment 20000496 PARAMETER Experiment Name: At_Guard_Cells_P Parameter: Tissue Value: Guard Cells vs. Leaves
ggaaaaaaaaactagaagcagatctgttgaagttaagccgagattcatcaattcgtgttatttgtctctcttgataagcaaaaaacatcgtacgaagaagaagaagatgaccttaattttttctgaatgaaatcttaaaattcccagaaagaagaatgacgaacagctcgtcatcgaagaaacaagctcaagatcagccagaaactagcgaacccactctcaaatctctcaaaaccaagatgactaaatccgacgaaaagcagaagaagcttaaagacattgaaataagcgttccaattgtgtatggtaatgtagcattctggcttggcaagaaggctagtgagtatcaatctcacaagtgggcagtatatgttcgaggggcaacaaatgaagatatcagtgttgtagtaaagaaagttgtatttcagcttcattctagtttcaatagcccgactagagttatcgaggagcctccattcgaggtatcggaatctggttggggagaattcgagattgcaatgacattgcatttccacagtgatgtctgtgataagccattgagtttatatcatcatttaaagctataccctgaagatgaatcaggtcctttgacaatgaagaagcctgtggttgtggaatcttatgacgagattgtctttcctgatccttcagaaagttttttagctagggttcagaatcatccggctttgacctttccaagattaccctctggttacaacttgcctgctcctatgcaagtcgaagataccgggaaaaagaagagaggtgatacgaaagatcatagtttgggacaatggttcatgagtttctctgaagcagatgagttattacagcttgcagctgctcgtcaacaggttcaagctcatattgcgaaactgaggcgacaaataagtttgctagagggacagaatcagaccgttaaaacaggatcagacctgtgaatctgattctgtagccatcatcttccattgagcgggagattggcatgttgtaactgtattagcatagatttccatttttcttgtattaataaacacaaataaagattagtgtcaagttcttatc

SEQ ID NO: 80266 - protein, 268 aa, Arabidopsis thaliana
  peptide (1)..(268): Ceres Seq. ID no. 12655117
  misc_feature (45)..(148): Pfam Name: YEATS family Pfam Description: YEATS family
  misc_feature (1)..(268): Homolog of NCBI NO: 15242448 NR Description: putative protein; protein id: At5g45600.1, by cDNA: gi_18175885, supported by cDNA: gi_20465402 [Arabidopsis
  misc_feature (31)..(199): Homolog of NCBI NO: 15227942 NR Description: unknown protein; protein id: At2g18000.1
  misc_feature (38)..(261): Homolog of NCBI NO: 13386064 NR Description: glioma-amplified sequence-41 [Mus musculus] unnamed protein product [Mus musculus]
  misc_feature (38)..(261): Homolog of NCBI NO: 34864887 NR Description: similar to glioma-amplified sequence-41 [Rattus
  misc_feature (38)..(172): Homolog of NCBI NO: 5729838 NR Description: glioma-amplified sequence-41; NuMA binding >gi|7022656|dbj|BAA91678.1| unnamed protein product [Homo
  misc_feature (38)..(172): Homolog of NCBI NO: 9755857 NR Description: NuBI-1 protein [Homo sapiens]
  misc_feature (38)..(172): Homolog of NCBI NO: 18419436 NR Description: GAS41 [Gallus gallus]
  misc_feature (38)..(173): Homolog of NCBI NO: 19920856 NR Description: CG9207-PA [Drosophila melanogaster]
  misc_feature (37)..(188): Homolog of NCBI NO: 6324222 NR Description: Yeast homolog of the human leukemogenic protein member of a yeast chromatin modifying complex; Yaf9p cerevisiae] >gi|1730761|sp|P53930|YNK7_YEAST Hypothetical 26.0
  misc_feature (37)..(175): Homolog of NCBI NO: 40745868 NR Description: hypothetical protein AN1859.2 [Aspergillus
MTNSSSSKKQAQDQPETSEPTLKSLKTKMTKSDEKQKKLKDIEISVPIVYGNVAFWLGKKASEYQSHKWAVYVRGATNEDISVVVKKVVFQLHSSFNSPTRVIEEPPFEVSESGWGEFEIAMTLHFHSDVCDKPLSLYHHLKLYPEDESGPLTMKKPVVVESYDEIVFPDPSESFLARVQNHPALTFPRLPSGYNLPAPMQVEDTGKKKRGDTKDHSLGQWFMSFSEADELLQLAAARQQVQAHIAKLRRQISLLEGQNQTVKTGSDL

SEQ ID NO: 80267 - protein, 240 aa, Arabidopsis thaliana
  peptide (1)..(240): Ceres Seq. ID no. 12655118
  misc_feature (17)..(120): Pfam Name: YEATS family Pfam Description: YEATS family
  misc_feature (1)..(240): Homolog of NCBI NO: 15242448 NR Description: putative protein; protein id: At5g45600.1, by cDNA: gi_18175885, supported by cDNA: gi_20465402 [Arabidopsis
  misc_feature (3)..(171): Homolog of NCBI NO: 15227942 NR Description: unknown protein; protein id: At2g18000.1
  misc_feature (10)..(233): Homolog of NCBI NO: 13386064 NR Description: glioma-amplified sequence-41 [Mus musculus] unnamed protein product [Mus musculus]
  misc_feature (10)..(233): Homolog of NCBI NO: 34864887 NR Description: similar to glioma-amplified sequence-41 [Rattus
  misc_feature (10)..(144): Homolog of NCBI NO: 5729838 NR Description: glioma-amplified sequence-41; NuMA binding >gi|7022656|dbj|BAA91678.1| unnamed protein product [Homo
  misc_feature (10)..(144): Homolog of NCBI NO: 9755857 NR Description: NuBI-1 protein [Homo sapiens]
  misc_feature (10)..(144): Homolog of NCBI NO: 18419436 NR Description: GAS41 [Gallus gallus]
  misc_feature (10)..(145): Homolog of NCBI NO: 19920856 NR Description: CG9207-PA [Drosophila melanogaster]
  misc_feature (9)..(160): Homolog of NCBI NO: 6324222 NR Description: Yeast homolog of the human leukemogenic protein member of a yeast chromatin modifying complex; Yaf9p cerevisiae] >gi|1730761|sp|P53930|YNK7_YEAST Hypothetical 26.0
  misc_feature (9)..(147): Homolog of NCBI NO: 40745868 NR Description: hypothetical protein AN1859.2 [Aspergillus
MTKSDEKQKKLKDIEISVPIVYGNVAFWLGKKASEYQSHKWAVYVRGATNEDISVVVKKVVFQLHSSFNSPTRVIEEPPFEVSESGWGEFEIAMTLHFHSDVCDKPLSLYHHLKLYPEDESGPLTMKKPVVVESYDEIVFPDPSESFLARVQNHPALTFPRLPSGYNLPAPMQVEDTGKKKRGDTKDHSLGQWFMSFSEADELLQLAAARQQVQAHIAKLRRQISLLEGQNQTVKTGSDL

SEQ ID NO: 80268 - protein, 147 aa, Arabidopsis thaliana
  peptide (1)..(147): Ceres Seq. ID no. 12655119
  misc_feature (1)..(147): Homolog of NCBI NO: 15242448 NR Description: putative protein; protein id: At5g45600.1, by cDNA: gi_18175885, supported by cDNA: gi_20465402 [Arabidopsis
  misc_feature (1)..(78): Homolog of NCBI NO: 15227942 NR Description: unknown protein; protein id: At2g18000.1
  misc_feature (1)..(140): Homolog of NCBI NO: 13386064 NR Description: glioma-amplified sequence-41 [Mus musculus] unnamed protein product [Mus musculus]
  misc_feature (1)..(140): Homolog of NCBI NO: 34864887 NR Description: similar to glioma-amplified sequence-41 [Rattus
  misc_feature (1)..(51): Homolog of NCBI NO: 5729838 NR Description: glioma-amplified sequence-41; NuMA binding >gi|7022656|dbj|BAA91678.1| unnamed protein product [Homo
  misc_feature (1)..(51): Homolog of NCBI NO: 9755857 NR Description: NuBI-1 protein [Homo sapiens]
  misc_feature (1)..(51): Homolog of NCBI NO: 18419436 NR Description: GAS41 [Gallus gallus]
  misc_feature (1)..(52): Homolog of NCBI NO: 19920856 NR Description: CG9207-PA [Drosophila melanogaster]
  misc_feature (1)..(67): Homolog of NCBI NO: 6324222 NR Description: Yeast homolog of the human leukemogenic protein member of a yeast chromatin modifying complex; Yaf9p cerevisiae] >gi|1730761|sp|P53930|YNK7_YEAST Hypothetical 26.0
  misc_feature (1)..(54): Homolog of NCBI NO: 40745868 NR Description: hypothetical protein AN1859.2 [Aspergillus
MTLHFHSDVCDKPLSLYHHLKLYPEDESGPLTMKKPVVVESYDEIVFPDPSESFLARVQNHPALTFPRLPSGYNLPAPMQVEDTGKKKRGDTKDHSLGQWFMSFSEADELLQLAAARQQVQAHIAKLRRQISLLEGQNQTVKTGSDL

SEQ ID NO: 80269 - DNA, 932 bp, Arabidopsis thaliana
  misc_feature (1)..(932): Ceres Seq. ID no. 12655120
  misc_feature: MA Experiment ID: 20000166 Result: Up-regulated in Transcription
  misc_feature: MA Experiment 20000166 PARAMETER Experiment Name: At_100uM_ABA_P Parameter: Age (day) Value: 14
  misc_feature: MA Experiment 20000166 PARAMETER Experiment Name: At_100uM_ABA_P Parameter: Organism Value: A. thaliana
  misc_feature: MA Experiment 20000166 PARAMETER Experiment Name: At_100uM_ABA_P Parameter: Plant Line Value: WS
  misc_feature: MA Experiment 20000166 PARAMETER Experiment Name: At_100uM_ABA_P Parameter: Timepoint (hr) Value: 1
  misc_feature: MA Experiment 20000166 PARAMETER Experiment Name: At_100uM_ABA_P Parameter: Tissue Value: Aerial
  misc_feature: MA Experiment 20000166 PARAMETER Experiment Name: At_100uM_ABA_P Parameter: Treatment Value: 100uM ABA vs. No Treatment
  misc_feature: MA Experiment ID: 20000169 Result: Up-regulated in Transcription
  misc_feature: MA Experiment 20000169 PARAMETER Experiment Name: At_100uM_ABA_P Parameter: Age (day) Value: 14
  misc_feature: MA Experiment 20000169 PARAMETER Experiment Name: At_100uM_ABA_P Parameter: Organism Value: A. thaliana
  misc_feature: MA Experiment 20000169 PARAMETER Experiment Name: At_100uM_ABA_P Parameter: Plant Line Value: WS
  misc_feature: MA Experiment 20000169 PARAMETER Experiment Name: At_100uM_ABA_P Parameter: Timepoint (hr) Value: 6
  misc_feature: MA Experiment 20000169 PARAMETER Experiment Name: At_100uM_ABA_P Parameter: Tissue Value: Aerial
  misc_feature: MA Experiment 20000169 PARAMETER Experiment Name: At_100uM_ABA_P Parameter: Treatment Value: 100uM ABA vs. No Treatment
  misc_feature: MA Experiment ID: 20000180 Result: Down-regulated in Transcription
  misc_feature: MA Experiment 20000180 PARAMETER Experiment Name: At_Germinating_Seeds_P Parameter: Age (hr) Value: 24 vs. 0
  misc_feature: MA Experiment 20000180 PARAMETER Experiment Name: At_Germinating_Seeds_P Parameter: Tissue Value: Germinating Seeds
  misc_feature: MA Experiment ID: 20000436 Result: Up-regulated in Transcription
  misc_feature: MA Experiment 20000436 PARAMETER Experiment Name: At_Drought_P Parameter: Age (day) Value: 7
  misc_feature: MA Experiment 20000436 PARAMETER Experiment Name: At_Drought_P Parameter: Organism Value: A. thaliana
  misc_feature: MA Experiment 20000436 PARAMETER Experiment Name: At_Drought_P Parameter: Plant Line Value: WS
  misc_feature: MA Experiment 20000436 PARAMETER Experiment Name: At_Drought_P Parameter: Timepoint (hr) Value: 12
  misc_feature: MA Experiment 20000436 PARAMETER Experiment Name: At_Drought_P Parameter: Tissue Value: Whole Plant
  misc_feature: MA Experiment 20000436 PARAMETER Experiment Name: At_Drought_P Parameter: Treatment Value: Drought vs. No Drought
  misc_feature: MA Experiment ID: 20000437 Result: Up-regulated in Transcription
  misc_feature: MA Experiment 20000437 PARAMETER Experiment Name: At_Drought_P Parameter: Age (day) Value: 8
  misc_feature: MA Experiment 20000437 PARAMETER Experiment Name: At_Drought_P Parameter: Organism Value: A. thaliana
  misc_feature: MA Experiment 20000437 PARAMETER Experiment Name: At_Drought_P Parameter: Plant Line Value: WS
  misc_feature: MA Experiment 20000437 PARAMETER Experiment Name: At_Drought_P Parameter: Timepoint (hr) Value: 24
  misc_feature: MA Experiment 20000437 PARAMETER Experiment Name: At_Drought_P Parameter: Tissue Value: Whole Plant
  misc_feature: MA Experiment 20000437 PARAMETER Experiment Name: At_Drought_P Parameter: Treatment Value: Drought vs. No Drought
  misc_feature: MA Experiment ID: 20001457 Result: Down-regulated in Transcription
  misc_feature: MA Experiment 20001457 PARAMETER Experiment Name: At_50mM_NH4NO3_L-to-H_P Parameter: Age (day) Value: Undefined
  misc_feature: MA Experiment 20001457 PARAMETER Experiment Name: At_50mM_NH4NO3_L-to-H_P Parameter: Organism Value: Undefined
  misc_feature: MA Experiment 20001457 PARAMETER Experiment Name: At_50mM_NH4NO3_L-to-H_P Parameter: Plant Line Value: Undefined
  misc_feature: MA Experiment 20001457 PARAMETER Experiment Name: At_50mM_NH4NO3_L-to-H_P Parameter: Timepoint (hr) Value: 0.5
  misc_feature: MA Experiment 20001457 PARAMETER Experiment Name: At_50mM_NH4NO3_L-to-H_P Parameter: Tissue Value: Siliques
  misc_feature: MA Experiment 20001457 PARAMETER Experiment Name: At_50mM_NH4NO3_L-to-H_P Parameter: Treatment Value: 50mM NH4NO3 vs. 100mM Manitol
  misc_feature: MA Experiment ID: 20001459 Result: Down-regulated in Transcription
  misc_feature: MA Experiment 20001459 PARAMETER Experiment Name: At_50mM_NH4NO3_L-to-H_P Parameter: Age (day) Value: Undefined
  misc_feature: MA Experiment 20001459 PARAMETER Experiment Name: At_50mM_NH4NO3_L-to-H_P Parameter: Organism Value: Undefined
  misc_feature: MA Experiment 20001459 PARAMETER Experiment Name: At_50mM_NH4NO3_L-to-H_P Parameter: Plant Line Value: Undefined
  misc_feature: MA Experiment 20001459 PARAMETER Experiment Name: At_50mM_NH4NO3_L-to-H_P Parameter: Timepoint (hr) Value: 4
  misc_feature: MA Experiment 20001459 PARAMETER Experiment Name: At_50mM_NH4NO3_L-to-H_P Parameter: Tissue Value: Siliques
  misc_feature: MA Experiment 20001459 PARAMETER Experiment Name: At_50mM_NH4NO3_L-to-H_P Parameter: Treatment Value: 50mM NH4NO3 vs. 100mM Manitol
  misc_feature: MA Experiment ID: 20001757 Result: Down-regulated in Transcription
  misc_feature: MA Experiment 20001757 PARAMETER Experiment Name: At_50mM_NH4NO3_L-to-H_P Parameter: Timepoint (hr) Value: 6
  misc_feature: MA Experiment 20001757 PARAMETER Experiment Name: At_50mM_NH4NO3_L-to-H_P Parameter: Tissue Value: Leaf
  misc_feature: MA Experiment 20001757 PARAMETER Experiment Name: At_50mM_NH4NO3_L-to-H_P Parameter: Treatment Value: 50mM NH4NO3 vs 100mM Mannitol
  misc_feature: MA Experiment ID: 20001904 Result: Up-regulated in Transcription
  misc_feature: MA Experiment 20001904 PARAMETER Experiment Name: At_Drought_Reproduction_P Parameter: Age (day) Value: 37
  misc_feature: MA Experiment 20001904 PARAMETER Experiment Name: At_Drought_Reproduction_P Parameter: Organism Value: A. thaliana
  misc_feature: MA Experiment 20001904 PARAMETER Experiment Name: At_Drought_Reproduction_P Parameter: Plant Line Value: WS
  misc_feature: MA Experiment 20001904 PARAMETER Experiment Name: At_Drought_Reproduction_P Parameter: Timepoint (day) Value: 7
  misc_feature: MA Experiment 20001904 PARAMETER Experiment Name: At_Drought_Reproduction_P Parameter: Tissue Value: Rosettes
  misc_feature: MA Experiment 20001904 PARAMETER Experiment Name: At_Drought_Reproduction_P Parameter: Treatment Value: Drought vs. No Drought
  misc_feature: MA Experiment ID: 20001906 Result: Up-regulated in Transcription
  misc_feature: MA Experiment 20001906 PARAMETER Experiment Name: At_Drought_Reproduction_P Parameter: Age (day) Value: 35
  misc_feature: MA Experiment 20001906 PARAMETER Experiment Name: At_Drought_Reproduction_P Parameter: Organism Value: A. thaliana
  misc_feature: MA Experiment 20001906 PARAMETER Experiment Name: At_Drought_Reproduction_P Parameter: Plant Line Value: WS
  misc_feature: MA Experiment 20001906 PARAMETER Experiment Name: At_Drought_Reproduction_P Parameter: Timepoint (day) Value: 5
  misc_feature: MA Experiment 20001906 PARAMETER Experiment Name: At_Drought_Reproduction_P Parameter: Tissue Value: Siliques
  misc_feature: MA Experiment 20001906 PARAMETER Experiment Name: At_Drought_Reproduction_P Parameter: Treatment Value: Drought vs. No Drought
acataaaatttgtataatagtacgtggttgatcgtttttgtgtgttgaaaatcaaaatggcgtcgagcgatgagcgtccaggagcgtatccggcacgtgacggatcagagaacttacctccgggagatccaaagacgatgaagacggtggtgatggataaaggagcggcgatgatgcaatcgttgaaaccgatcaaacagatgagtctccatttgtgttctttcgcttgttatggtcacgatcctagccgtcagattgaagtcaacttctatgttcatcgactcaaccaagactttcttcaatgtgctgtttacgattgcgactcctctaaaccccatctcatcgggatcgagtatattgtgtcggagaggttatttgagagtcttgatccggaggagcaaaagctttggcactctcatgactatgagatccaaacaggccttctagtaactccaagggtccctgagcttgtagctaagacagagcttgaaaatattgccaaaacttatgggaagttttggtgcacttggcagaccgatcgcggggataaattgccacttggtgcaccatcacttatgatgtcaccacaagacgtgaatatgggaaagatcaagccagggctattgaagaaacgtgacgatgagtatggaatctcgacggaatctttgaagacgtctcgagttggaattatgggaccggagaagaaaaattcgatggctgattattgggttcatcacggaaaaggattagcggttgacataatcgaaactgagatgcagaaattggctccgttcccgtaatgaagttggtgtgtaactaataataaaatgttgtatatgtcgtcctatgttgtcttataagaccattagtaaacataattatcctatatatatatactgttgtctgtgttgaaatataaccaccttcaacgt

SEQ ID NO: 80270 - protein, 247 aa, Arabidopsis thaliana
  peptide (1)..(247): Ceres Seq. ID no. 12655121
  misc_feature (1)..(247): Homolog of NCBI NO: 15242474 NR Description: putative protein; protein id: At5g45690.1, by cDNA: gi_15450432, supported by cDNA: gi_18958059 [Arabidopsis >gi|15450433|gb|AAK96510.1| AT5g45690/MRA19_8 [Arabidopsis
  misc_feature (1)..(247): Homolog of NCBI NO: 9758672 NR Description: gene_id:MRA19.8~pir||T05029~strong similarity to
  misc_feature (1)..(247): Homolog of NCBI NO: 18415199 NR Description: expressed protein; protein id: At4g18920.1,
  misc_feature (1)..(247): Homolog of NCBI NO: 21617913 NR Description: unknown [Arabidopsis thaliana]
  misc_feature (1)..(247): Homolog of NCBI NO: 7452426 NR Description: hypothetical protein F13C5.90 - Arabidopsis >gi|2832620|emb|CAA16749.1| hypothetical protein [Arabidopsis >gi|7268686|emb|CAB78894.1| hypothetical protein [Arabidopsis
  misc_feature (1)..(247): Homolog of NCBI NO: 34909516 NR Description: P0481E12.28 [Oryza sativa (japonica
  misc_feature (16)..(247): Homolog of NCBI NO: 15220516 NR Description: unknown protein; protein id: At1g29680.1
  misc_feature (1)..(247): Homolog of NCBI NO: 34910820 NR Description: P0456A01.15 [Oryza sativa (japonica
  misc_feature (22)..(247): Homolog of NCBI NO: 15220526 NR Description: hypothetical protein; protein id: At1g05510.1, by cDNA: gi_17979350, supported by cDNA: gi_20466016 [Arabidopsis >gi|8778719|gb|AAF79727.1|AC005106_8 T25N20.16 [Arabidopsis
  misc_feature (16)..(208): Homolog of NCBI NO: 16764905 NR Description: putative outer membrane or secreted lipoprotein typhimurium LT2] >gi|16420083|gb|AAL20479.1| putative outer
MASSDERPGAYPARDGSENLPPGDPKTMKTVVMDKGAAMMQSLKPIKQMSLHLCSFACYGHDPSRQIEVNFYVHRLNQDFLQCAVYDCDSSKPHLIGIEYIVSERLFESLDPEEQKLWHSHDYEIQTGLLVTPRVPELVAKTELENIAKTYGKFWCTWQTDRGDKLPLGAPSLMMSPQDVNMGKIKPGLLKKRDDEYGISTESLKTSRVGIMGPEKKNSMADYWVHHGKGLAVDIIETEMQKLAPFP

SEQ ID NO: 80271 - protein, 220 aa, Arabidopsis thaliana
  peptide (1)..(220): Ceres Seq. ID no. 12655122
  misc_feature (1)..(220): Homolog of NCBI NO: 15242474 NR Description: putative protein; protein id: At5g45690.1, by cDNA: gi_15450432, supported by cDNA: gi_18958059 [Arabidopsis >gi|15450433|gb|AAK96510.1| AT5g45690/MRA19_8 [Arabidopsis
  misc_feature (1)..(220): Homolog of NCBI NO: 9758672 NR Description: gene_id:MRA19.8~pir||T05029~strong similarity to
  misc_feature (1)..(220): Homolog of NCBI NO: 18415199 NR Description: expressed protein; protein id: At4g18920.1,
  misc_feature (1)..(220): Homolog of NCBI NO: 21617913 NR Description: unknown [Arabidopsis thaliana]
  misc_feature (1)..(220): Homolog of NCBI NO: 7452426 NR Description: hypothetical protein F13C5.90 - Arabidopsis >gi|2832620|emb|CAA16749.1| hypothetical protein [Arabidopsis >gi|7268686|emb|CAB78894.1| hypothetical protein [Arabidopsis
  misc_feature (1)..(220): Homolog of NCBI NO: 34909516 NR Description: P0481E12.28 [Oryza sativa (japonica
  misc_feature (1)..(220): Homolog of NCBI NO: 15220516 NR Description: unknown protein; protein id: At1g29680.1
  misc_feature (1)..(220): Homolog of NCBI NO: 34910820 NR Description: P0456A01.15 [Oryza sativa (japonica
  misc_feature (1)..(220): Homolog of NCBI NO: 15220526 NR Description: hypothetical protein; protein id: At1g05510.1, by cDNA: gi_17979350, supported by cDNA: gi_20466016 [Arabidopsis >gi|8778719|gb|AAF79727.1|AC005106_8 T25N20.16 [Arabidopsis
  misc_feature (1)..(181): Homolog of NCBI NO: 16764905 NR Description: putative outer membrane or secreted lipoprotein typhimurium LT2] >gi|16420083|gb|AAL20479.1| putative outer
MKTVVMDKGAAMMQSLKPIKQMSLHLCSFACYGHDPSRQIEVNFYVHRLNQDFLQCAVYDCDSSKPHLIGIEYIVSERLFESLDPEEQKLWHSHDYEIQTGLLVTPRVPELVAKTELENIAKTYGKFWCTWQTDRGDKLPLGAPSLMMSPQDVNMGKIKPGLLKKRDDEYGISTESLKTSRVGIMGPEKKNSMADYWVHHGKGLAVDIIETEMQKLAPFP

SEQ ID NO: 80272 - protein, 215 aa, Arabidopsis thaliana
  peptide (1)..(215): Ceres Seq. ID no. 12655123
  misc_feature (1)..(215): Homolog of NCBI NO: 15242474 NR Description: putative protein; protein id: At5g45690.1, by cDNA: gi_15450432, supported by cDNA: gi_18958059 [Arabidopsis >gi|15450433|gb|AAK96510.1| AT5g45690/MRA19_8 [Arabidopsis
  misc_feature (1)..(215): Homolog of NCBI NO: 9758672 NR Description: gene_id:MRA19.8~pir||T05029~strong similarity to
  misc_feature (1)..(215): Homolog of NCBI NO: 18415199 NR Description: expressed protein; protein id: At4g18920.1,
  misc_feature (1)..(215): Homolog of NCBI NO: 21617913 NR Description: unknown [Arabidopsis thaliana]
  misc_feature (1)..(215): Homolog of NCBI NO: 7452426 NR Description: hypothetical protein F13C5.90 - Arabidopsis >gi|2832620|emb|CAA16749.1| hypothetical protein [Arabidopsis >gi|7268686|emb|CAB78894.1| hypothetical protein [Arabidopsis
  misc_feature (1)..(215): Homolog of NCBI NO: 34909516 NR Description: P0481E12.28 [Oryza sativa (japonica
  misc_feature (1)..(215): Homolog of NCBI NO: 15220516 NR Description: unknown protein; protein id: At1g29680.1
  misc_feature (1)..(215): Homolog of NCBI NO: 34910820 NR Description: P0456A01.15 [Oryza sativa (japonica
  misc_feature (1)..(215): Homolog of NCBI NO: 15220526 NR Description: hypothetical protein; protein id: At1g05510.1, by cDNA: gi_17979350, supported by cDNA: gi_20466016 [Arabidopsis >gi|8778719|gb|AAF79727.1|AC005106_8 T25N20.16 [Arabidopsis
  misc_feature (1)..(176): Homolog of NCBI NO: 16764905 NR Description: putative outer membrane or secreted lipoprotein typhimurium LT2] >gi|16420083|gb|AAL20479.1| putative outer
MDKGAAMMQSLKPIKQMSLHLCSFACYGHDPSRQIEVNFYVHRLNQDFLQCAVYDCDSSKPHLIGIEYIVSERLFESLDPEEQKLWHSHDYEIQTGLLVTPRVPELVAKTELENIAKTYGKFWCTWQTDRGDKLPLGAPSLMMSPQDVNMGKIKPGLLKKRDDEYGISTESLKTSRVGIMGPEKKNSMADYWVHHGKGLAVDIIETEMQKLAPFP

SEQ ID NO: 80273 - DNA, 1452 bp, Arabidopsis thaliana
  misc_feature (1)..(1452): Ceres Seq. ID no. 12655130
  misc_feature: MA Experiment ID: 20000436 Result: Up-regulated in Transcription
  misc_feature: MA Experiment 20000436 PARAMETER Experiment Name: At_Drought_P Parameter: Age (day) Value: 7
  misc_feature: MA Experiment 20000436 PARAMETER Experiment Name: At_Drought_P Parameter: Organism Value: A. thaliana
  misc_feature: MA Experiment 20000436 PARAMETER Experiment Name: At_Drought_P Parameter: Plant Line Value: WS
  misc_feature: MA Experiment 20000436 PARAMETER Experiment Name: At_Drought_P Parameter: Timepoint (hr) Value: 12
  misc_feature: MA Experiment 20000436 PARAMETER Experiment Name: At_Drought_P Parameter: Tissue Value: Whole Plant
  misc_feature: MA Experiment 20000436 PARAMETER Experiment Name: At_Drought_P Parameter: Treatment Value: Drought vs. No Drought
  misc_feature: MA Experiment ID: 20000437 Result: Up-regulated in Transcription
  misc_feature: MA Experiment 20000437 PARAMETER Experiment Name: At_Drought_P Parameter: Age (day) Value: 8
  misc_feature: MA Experiment 20000437 PARAMETER Experiment Name: At_Drought_P Parameter: Organism Value: A. thaliana
  misc_feature: MA Experiment 20000437 PARAMETER Experiment Name: At_Drought_P Parameter: Plant Line Value: WS
  misc_feature: MA Experiment 20000437 PARAMETER Experiment Name: At_Drought_P Parameter: Timepoint (hr) Value: 24
  misc_feature: MA Experiment 20000437 PARAMETER Experiment Name: At_Drought_P Parameter: Tissue Value: Whole Plant
  misc_feature: MA Experiment 20000437 PARAMETER Experiment Name: At_Drought_P Parameter: Treatment Value: Drought vs. No Drought
  misc_feature: MA Experiment ID: 20001904 Result: Up-regulated in Transcription
  misc_feature: MA Experiment 20001904 PARAMETER Experiment Name: At_Drought_Reproduction_P Parameter: Age (day) Value: 37
  misc_feature: MA Experiment 20001904 PARAMETER Experiment Name: At_Drought_Reproduction_P Parameter: Organism Value: A. thaliana
  misc_feature: MA Experiment 20001904 PARAMETER Experiment Name: At_Drought_Reproduction_P Parameter: Plant Line Value: WS
  misc_feature: MA Experiment 20001904 PARAMETER Experiment Name: At_Drought_Reproduction_P Parameter: Timepoint (day) Value: 7
  misc_feature: MA Experiment 20001904 PARAMETER Experiment Name: At_Drought_Reproduction_P Parameter: Tissue Value: Rosettes
  misc_feature: MA Experiment 20001904 PARAMETER Experiment Name: At_Drought_Reproduction_P Parameter: Treatment Value: Drought vs. No Drought
  misc_feature: MA Experiment ID: 20001905 Result: Up-regulated in Transcription
  misc_feature: MA Experiment 20001905 PARAMETER Experiment Name: At_Drought_Reproduction_P Parameter: Age (day) Value: 40
  misc_feature: MA Experiment 20001905 PARAMETER Experiment Name: At_Drought_Reproduction_P Parameter: Organism Value: A. thaliana
  misc_feature: MA Experiment 20001905 PARAMETER Experiment Name: At_Drought_Reproduction_P Parameter: Plant Line Value: WS
  misc_feature: MA Experiment 20001905 PARAMETER Experiment Name: At_Drought_Reproduction_P Parameter: Timepoint (day) Value: 10
  misc_feature: MA Experiment 20001905 PARAMETER Experiment Name: At_Drought_Reproduction_P Parameter: Tissue Value: Rosettes
  misc_feature: MA Experiment 20001905 PARAMETER Experiment Name: At_Drought_Reproduction_P Parameter: Treatment Value: Drought vs. No Drought
  misc_feature: MA Experiment ID: 20001910 Result: Up-regulated in Transcription
  misc_feature: MA Experiment 20001910 PARAMETER Experiment Name: At_Drought_Reproduction_P Parameter: Age (day) Value: 37
  misc_feature: MA Experiment 20001910 PARAMETER Experiment Name: At_Drought_Reproduction_P Parameter: Organism Value: A. thaliana
  misc_feature: MA Experiment 20001910 PARAMETER Experiment Name: At_Drought_Reproduction_P Parameter: Plant Line Value: WS
  misc_feature: MA Experiment 20001910 PARAMETER Experiment Name: At_Drought_Reproduction_P Parameter: Timepoint (day) Value: 7
  misc_feature: MA Experiment 20001910 PARAMETER Experiment Name: At_Drought_Reproduction_P Parameter: Tissue Value: Flowers
  misc_feature: MA Experiment 20001910 PARAMETER Experiment Name: At_Drought_Reproduction_P Parameter: Treatment Value: Drought vs. No Drought
atggcggatttgttaagaaaagtgaaatcgataaagaagaagcaggatcagagcaatcatcaagctctgatccttggcaaatacgaaatgggtaggcttcttggccacggaaccttcgctaaagtctatctcgcacgaaacgctcaatctggagaaagcgtagcgatcaaggtaattgacaaagagaaagttctcaaatccggtttaatcgcacacatcaaacgcgagatctcgatcttgcgccgtgttcgtcatcctaacatcgttcagctattcgaagtcatggcgacgaaatctaagatctatttcgtaatggaatatgttaaaggaggtgaattgttcaacaaggtagctaaaggaaggttaaaagaagaaatggcacgtaaatattttcaacagttgatctcagccgtatcgttttgtcacttccgtggtgtttatcatcgagatttgaaaccggagaatcttcttttagacgaaaatggaaacctaaaagtctctgattttggtcttagtgctgtttctgatcagattcgacaagatgggttatttcatactttttgtgggacccctgcttacgtggcaccggaggttcttgctcggaaaggctacgatggagctaaagtcgatatttggtcttgtggagtgatcttgtttgtgttaatggcagggtttcttccttttcatgatcggaatgttatggctatgtataagaagatttacagaggagattttaggtgtccgagatggtttccggttgagattaaccggttattgattcgaatgttggagactaaaccggagagacggtttacaatgccggatattatggagactagttggttcaagaaaggttttaagcatattaagttttatgttgaagatgatcatcagctttgtaacgttgctgatgatgatgagatcgaatcgattgaatcggtttcggggaggtcttctacggtttctgaaccggaagacttcgagtcttttgatgggaggagaagaggtggttcgatgcctagaccggcaagtttgaatgctttcgatctcatttcgttttcgccaggttttgatctttcgggtttgtttgaggatgatggtgaaggatctaggtttgtgtctggtgctcctgttggtcagatcatttctaagttggaggaaatcgcgaggattgtgagttttactgtgcgaaagaaggattgtaaagtgagtcttgaaggttcaagagaaggaagtatgaaaggtccattgtcaattgctgctgagatatttgaactgacaccagctttggttgttgttgaagtgaagaagaaaggaggtgataaaatggagtatgatgagttttgtaataaggagttgaaacctaagttgcagaatttgtcttccgaaaatggccaacgggtttctggttcgcgttctttgccatcgtttttactttctgatactgattag

SEQ ID NO: 80274 - protein, 483 aa, Arabidopsis thaliana
  peptide (1)..(483): Ceres Seq. ID no. 12655131
  misc_feature (28)..(282): Pfam Name: Protein kinase domain Pfam Description: Protein kinase domain
  misc_feature (1)..(483): Homolog of NCBI NO: 15242507 NR Description: serine threonine protein kinase; protein id: supported by cDNA: gi_14009295 [Arabidopsis thaliana]
  misc_feature (1)..(464): Homolog of NCBI NO: 15233981 NR Description: putative protein kinase; protein id: At4g18700.1, by cDNA: gi_13249122, supported by cDNA: gi_13448040, supported cDNA: gi_16648898 [Arabidopsis thaliana] >gi|7446437|pir||T04862
  misc_feature (14)..(483): Homolog of NCBI NO: 15218854 NR Description: protein kinase PK4, putative; protein id: supported by cDNA: gi_14334387 [Arabidopsis thaliana]
  misc_feature (23)..(312): Homolog of NCBI NO: 5821067 NR Description: OsPK4 [Oryza sativa]
  misc_feature (304)..(465): Homolog of NCBI NO: 5821067 NR Description: OsPK4 [Oryza sativa]
  misc_feature (14)..(304): Homolog of NCBI NO: 3928519 NR Description: wpk4 protein kinase [Triticum aestivum]
  misc_feature (318)..(460): Homolog of NCBI NO: 3928519 NR Description: wpk4 protein kinase [Triticum aestivum]
  misc_feature (24)..(307): Homolog of NCBI NO: 6651177 NR Description: protein kinase PK4 [Zea mays]
  misc_feature (307)..(460): Homolog of NCBI NO: 6651177 NR Description: protein kinase PK4 [Zea mays]
  misc_feature (22)..(475): Homolog of NCBI NO: 15226241 NR Description: putative protein kinase; protein id: At2g34180.1, by cDNA: gi_13249124 [Arabidopsis thaliana]
MADLLRKVKSIKKKQDQSNHQALILGKYEMGRLLGHGTFAKVYLARNAQSGESVAIKVIDKEKVLKSGLIAHIKREISILRRVRHPNIVQLFEVMATKSKIYFVMEYVKGGELFNKVAKGRLKEEMARKYFQQLISAVSFCHFRGVYHRDLKPENLLLDENGNLKVSDFGLSAVSDQIRQDGLFHTFCGTPAYVAPEVLARKGYDGAKVDIWSCGVILFVLMAGFLPFHDRNVMAMYKKIYRGDFRCPRWFPVEINRLLIRMLETKPERRFTMPDIMETSWFKKGFKHIKFYVEDDHQLCNVADDDEIESIESVSGRSSTVSEPEDFESFDGRRRGGSMPRPASLNAFDLISFSPGFDLSGLFEDDGEGSRFVSGAPVGQIISKLEEIARIVSFTVRKKDCKVSLEGSREGSMKGPLSIAAEIFELTPALVVVEVKKKGGDKMEYDEFCNKELKPKLQNLSSENGQRVSGSRSLPSFLLSDTD

SEQ ID NO: 80275 - protein, 454 aa, Arabidopsis thaliana
  peptide (1)..(454): Ceres Seq. ID no. 12655132
  misc_feature (1)..(253): Pfam Name: Protein kinase domain Pfam Description: Protein kinase domain
  misc_feature (1)..(454): Homolog of NCBI NO: 15242507 NR Description: serine threonine protein kinase; protein id: supported by cDNA: gi_14009295 [Arabidopsis thaliana]
  misc_feature (1)..(435): Homolog of NCBI NO: 15233981 NR Description: putative protein kinase; protein id: At4g18700.1, by cDNA: gi_13249122, supported by cDNA: gi_13448040, supported cDNA: gi_16648898 [Arabidopsis thaliana] >gi|7446437|pir||T04862
  misc_feature (1)..(454): Homolog of NCBI NO: 15218854 NR Description: protein kinase PK4, putative; protein id: supported by cDNA: gi_14334387 [Arabidopsis thaliana]
  misc_feature (1)..(283): Homolog of NCBI NO: 5821067 NR Description: OsPK4 [Oryza sativa]
  misc_feature (275)..(436): Homolog of NCBI NO: 5821067 NR Description: OsPK4 [Oryza sativa]
  misc_feature (1)..(275): Homolog of NCBI NO: 3928519 NR Description: wpk4 protein kinase [Triticum aestivum]
  misc_feature (289)..(431): Homolog of NCBI NO: 3928519 NR Description: wpk4 protein kinase [Triticum aestivum]
  misc_feature (1)..(278): Homolog of NCBI NO: 6651177 NR Description: protein kinase PK4 [Zea mays]
  misc_feature (278)..(431): Homolog of NCBI NO: 6651177 NR Description: protein kinase PK4 [Zea mays]
  misc_feature (1)..(446): Homolog of NCBI NO: 15226241 NR Description: putative protein kinase; protein id: At2g34180.1, by cDNA: gi_13249124 [Arabidopsis thaliana]
MGRLLGHGTFAKVYLARNAQSGESVAIKVIDKEKVLKSGLIAHIKREISILRRVRHPNIVQLFEVMATKSKIYFVMEYVKGGELFNKVAKGRLKEEMARKYFQQLISAVSFCHFRGVYHRDLKPENLLLDENGNLKVSDFGLSAVSDQIRQDGLFHTFCGTPAYVAPEVLARKGYDGAKVDIWSCGVILFVLMAGFLPFHDRNVMAMYKKIYRGDFRCPRWFPVEINRLLIRMLETKPERRFTMPDIMETSWFKKGFKHIKFYVEDDHQLCNVADDDEIESIESVSGRSSTVSEPEDFESFDGRRRGGSMPRPASLNAFDLISFSPGFDLSGLFEDDGEGSRFVSGAPVGQIISKLEEIARIVSFTVRKKDCKVSLEGSREGSMKGPLSIAAEIFELTPALVVVEVKKKGGDKMEYDEFCNKELKPKLQNLSSENGQRVSGSRSLPSFLLSDTD

SEQ ID NO: 80276 - protein, 389 aa, Arabidopsis thaliana
  peptide (1)..(389): Ceres Seq. ID no. 12655133
  misc_feature (1)..(188): Pfam Name: Protein kinase domain Pfam Description: Protein kinase domain
  misc_feature (1)..(389): Homolog of NCBI NO: 15242507 NR Description: serine threonine protein kinase; protein id: supported by cDNA: gi_14009295 [Arabidopsis thaliana]
  misc_feature (1)..(370): Homolog of NCBI NO: 15233981 NR Description: putative protein kinase; protein id: At4g18700.1, by cDNA: gi_13249122, supported by cDNA: gi_13448040, supported cDNA: gi_16648898 [Arabidopsis thaliana] >gi|7446437|pir||T04862
  misc_feature (1)..(389): Homolog of NCBI NO: 15218854 NR Description: protein kinase PK4, putative; protein id: supported by cDNA: gi_14334387 [Arabidopsis thaliana]
  misc_feature (1)..(218): Homolog of NCBI NO: 5821067 NR Description: OsPK4 [Oryza sativa]
  misc_feature (210)..(371): Homolog of NCBI NO: 5821067 NR Description: OsPK4 [Oryza sativa]
  misc_feature (1)..(210): Homolog of NCBI NO: 3928519 NR Description: wpk4 protein kinase [Triticum aestivum]
  misc_feature (224)..(366): Homolog of NCBI NO: 3928519 NR Description: wpk4 protein kinase [Triticum aestivum]
  misc_feature (1)..(213): Homolog of NCBI NO: 6651177 NR Description: protein kinase PK4 [Zea mays]
  misc_feature (213)..(366): Homolog of NCBI NO: 6651177 NR Description: protein kinase PK4 [Zea mays]
  misc_feature (1)..(381): Homolog of NCBI NO: 15226241 NR Description: putative protein kinase; protein id: At2g34180.1, by cDNA: gi_13249124 [Arabidopsis thaliana]
MATKSKIYFVMEYVKGGELFNKVAKGRLKEEMARKYFQQLISAVSFCHFRGVYHRDLKPENLLLDENGNLKVSDFGLSAVSDQIRQDGLFHTFCGTPAYVAPEVLARKGYDGAKVDIWSCGVILFVLMAGFLPFHDRNVMAMYKKIYRGDFRCPRWFPVEINRLLIRMLETKPERRFTMPDIMETSWFKKGFKHIKFYVEDDHQLCNVADDDEIESIESVSGRSSTVSEPEDFESFDGRRRGGSMPRPASLNAFDLISFSPGFDLSGLFEDDGEGSRFVSGAPVGQIISKLEEIARIVSFTVRKKDCKVSLEGSREGSMKGPLSIAAEIFELTPALVVVEVKKKGGDKMEYDEFCNKELKPKLQNLSSENGQRVSGSRSLPSFLLSDTD

SEQ ID NO: 80277 - DNA, 2007 bp, Arabidopsis thaliana
  misc_feature (1)..(2007): Ceres Seq. ID no. 12655134
  misc_feature: MA Experiment ID: 20000185 Result: Up-regulated in Transcription
  misc_feature: MA Experiment 20000185 PARAMETER Experiment Name: At_Roots__P Parameter: Age (day) Value: 7 vs. 21
  misc_feature: MA Experiment 20000185 PARAMETER Experiment Name: At_Roots__P Parameter: Organism Value: A. thaliana
  misc_feature: MA Experiment 20000185 PARAMETER Experiment Name: At_Roots__P Parameter: Tissue Value: Roots vs. Whole Plant
  misc_feature: MA Experiment ID: 20000264 Result: Up-regulated in Transcription
  misc_feature: MA Experiment 20000264 PARAMETER Experiment Name: At_Open_Flower_P Parameter: Age (day) Value: 21
  misc_feature: MA Experiment 20000264 PARAMETER Experiment Name: At_Open_Flower_P Parameter: Plant Line Value: WS
  misc_feature: MA Experiment 20000264 PARAMETER Experiment Name: At_Open_Flower_P Parameter: Tissue Value: Open Flower vs. Whole Plant
  misc_feature: MA Experiment ID: 20000286 Result: Up-regulated in Transcription
  misc_feature: MA Experiment 20000286 PARAMETER Experiment Name: At_Open_Flower_P Parameter: Age (day) Value: 21
  misc_feature: MA Experiment 20000286 PARAMETER Experiment Name: At_Open_Flower_P Parameter: Plant Line Value: WS
  misc_feature: MA Experiment 20000286 PARAMETER Experiment Name: At_Open_Flower_P Parameter: Tissue Value: Half Open vs. Whole Plant
  misc_feature: MA Experiment ID: 20000439 Result: Up-regulated in Transcription
  misc_feature: MA Experiment 20000439 PARAMETER Experiment Name: At_Roots__P Parameter: Age (day) Value: 14 vs. 21
  misc_feature: MA Experiment 20000439 PARAMETER Experiment Name: At_Roots__P Parameter: Organism Value: A. thaliana
  misc_feature: MA Experiment 20000439 PARAMETER Experiment Name: At_Roots__P Parameter: Tissue Value: Roots vs. Whole Plant
  misc_feature: MA Experiment ID: 20000794 Result: Up-regulated in Transcription
  misc_feature: MA Experiment 20000794 PARAMETER Experiment Name: At_Petals_P Parameter: Age (day) Value: 23-25 days
  misc_feature: MA Experiment 20000794 PARAMETER Experiment Name: At_Petals_P Parameter: Plant Line Value: WS
  misc_feature: MA Experiment 20000794 PARAMETER Experiment Name: At_Petals_P Parameter: Tissue Value: Petals vs. Whole plant
  misc_feature: MA Experiment ID: 20001556 Result: Down-regulated in Transcription
  misc_feature: MA Experiment 20001556 PARAMETER Experiment Name: At_Drought_Soil_Dry_P Parameter: Age (day) Value: 26
  misc_feature: MA Experiment 20001556 PARAMETER Experiment Name: At_Drought_Soil_Dry_P Parameter: Organism Value: A. thaliana
  misc_feature: MA Experiment 20001556 PARAMETER Experiment Name: At_Drought_Soil_Dry_P Parameter: Plant Line Value: WS
  misc_feature: MA Experiment 20001556 PARAMETER Experiment Name: At_Drought_Soil_Dry_P Parameter: Post Timepoint (hr) Value: None
  misc_feature: MA Experiment 20001556 PARAMETER Experiment Name: At_Drought_Soil_Dry_P Parameter: Post-Treatment Value: None
  misc_feature: MA Experiment 20001556 PARAMETER Experiment Name: At_Drought_Soil_Dry_P Parameter: Timepoint (day) Value: 12
  misc_feature: MA Experiment 20001556 PARAMETER Experiment Name: At_Drought_Soil_Dry_P Parameter: Treatment Value: Drought vs. No Drought
  misc_feature: MA Experiment ID: 20001558 Result: Down-regulated in Transcription
  misc_feature: MA Experiment 20001558 PARAMETER Experiment Name: At_Drought_Soil_Dry_P Parameter: Age (day) Value: 27
  misc_feature: MA Experiment 20001558 PARAMETER Experiment Name: At_Drought_Soil_Dry_P Parameter: Organism Value: A. thaliana
  misc_feature: MA Experiment 20001558 PARAMETER Experiment Name: At_Drought_Soil_Dry_P Parameter: Plant Line Value: WS
  misc_feature: MA Experiment 20001558 PARAMETER Experiment Name: At_Drought_Soil_Dry_P Parameter: Post Timepoint (hr) Value: 6
  misc_feature: MA Experiment 20001558 PARAMETER Experiment Name: At_Drought_Soil_Dry_P Parameter: Post-Treatment Value: Re-Water vs. No Drought
  misc_feature: MA Experiment 20001558 PARAMETER Experiment Name: At_Drought_Soil_Dry_P Parameter: Timepoint (day) Value: 13
  misc_feature: MA Experiment 20001558 PARAMETER Experiment Name: At_Drought_Soil_Dry_P Parameter: Treatment Value: Drought vs. No Drought
  misc_feature: MA Experiment ID: 20001560 Result: Down-regulated in Transcription
  misc_feature: MA Experiment 20001560 PARAMETER Experiment Name: At_Drought_Soil_Dry_P Parameter: Age (day) Value: 28
  misc_feature: MA Experiment 20001560 PARAMETER Experiment Name: At_Drought_Soil_Dry_P Parameter: Organism Value: A. thaliana
  misc_feature: MA Experiment 20001560 PARAMETER Experiment Name: At_Drought_Soil_Dry_P Parameter: Plant Line Value: WS
  misc_feature: MA Experiment 20001560 PARAMETER Experiment Name: At_Drought_Soil_Dry_P Parameter: Post Timepoint (hr) Value: None
  misc_feature: MA Experiment 20001560 PARAMETER Experiment Name: At_Drought_Soil_Dry_P Parameter: Post-Treatment Value: None
  misc_feature: MA Experiment 20001560 PARAMETER Experiment Name: At_Drought_Soil_Dry_P Parameter: Timepoint (day) Value: 14
  misc_feature: MA Experiment 20001560 PARAMETER Experiment Name: At_Drought_Soil_Dry_P Parameter: Treatment Value: Drought vs. No Drought
atgggttgtcgatggaatccaattgggttccaattctcttgcttcatgttcttgatcattactcttcaatctcgttcttcgttgtccctcgaatccgaaggatttgtattgttgaaattccgggcaagagttgattctgatcctcatggaactcttgcaaattggaatgtttctgatcatgatcatttctgttcttggtttggtgttacgtgtgtcgacaataaagtgcagatgctgaatcttagtggttgttctttgggaggaactttagctccggagcttagtcaattgagtgaattaagatctctaatactatccaagaacaaactctctggtgacattccaaacgaatttgcgagtttcgcgaaattagagttcttggatttgcgagataataacttaaacggagtagttccacccgagctaaataaagtgttgacaccagaaaacttgttgctttctggtaacaaatttgcgggttttatgaccgtaaagttcctgagacttcaatcgctgtataaagtccagatgaacaagaatcgagagctatcttcggtttccgctgatgtcctcgactgtgtcaatagaaaacttggatactgggtgcgaagagaatctcatgggaagaattatgtagtgaattatcacccaagtgagaacgaaactagtatcttcaaaagacgtgagttactcgaggaaacaagcaatttagcggctatgcctgcgcctgatacgcccagtccttctcctgagattataactatagtgtttcctcgaagcagcgggtcgtttccagcattaactaatgcaaagaagagaatacctccattgatccctccttcttctcctcctcctctacctaccaacaacaccatcgctagtgatccaccgaggaaattcgaagaaaaatcgaaagggtttaaggacgtttggttgtatgttgtgatcggtgttgctgctttcgtagcgatgctgataatagtagcggttatattcttcttccggaaaagagctgtgaagagtataggtccatggaagactggtttgagtggacaattgcagaaagcttttgttactggtgtacctaagctaaaccggtctgaactagaaacagcctgtgaagatttcagtaatatcattgaagcatttgatggttacactgtctataaaggaactttgtccagtggcgttgagattgcggttgcttcaaccgccattttggaaactagggaatggacaagagctatggaaatgacttaccgcagaaggattgatacaatgtcaagagtcaaccataagaactttattaatctgattggttattgcgaagaagatgaaccgtttaataggatgatggttttcgaatatgctccaaatggaactcttttcgaacatttgcatgataaggaaatggagcatcttgattggaacgcgaggacgaggataataatgggaactgcttattgtctgcaatatatgcacgagctcaatcctccaatctcacacactaaacttgtctcatcagcaatatacttaaccgatgattacgcagcaaaggtcggagaggttcctttcagcggacaaaccgggagtaaaccgagaaaaccgatgagtggtgatttagaccaatctttattgccattacctcctgaaccagagactaatgtctatagctttggagtattaatgcttgagataatctctggaaagctctcagattcagaagaagaaggatcaattctaaaatgggcgtcaaagtatctggagaatgataatttgagagatatgattgatcctacactaacaacgtataaagaagaagaacttgaagctatatgtgacgtggcacgacattgtctgaaacttgacgaaagccaaagaccaaaaatgaaatatgtggttcaacaattgaaagaagtaataaacatatctcaagaacaagcaacaccaagactctctcctctttggtgggcagagcttgagatcttatcctctgaagctacataa

SEQ ID NO: 80278 - protein, 668 aa, Arabidopsis thaliana
  peptide (1)..(668): Ceres Seq. ID no. 12655135
  misc_feature (1)..(668): Homolog of NCBI NO: 7268658 NR Description: putative protein (fragment) [Arabidopsis thaliana]
  misc_feature (1)..(668): Homolog of NCBI NO: 30684487 NR Description: leucine-rich repeat transmembrane protein kinase,
  misc_feature (32)..(668): Homolog of NCBI NO: 7486276 NR Description: hypothetical protein F28A21.50 - Arabidopsis (fragment) >gi|4539383|emb|CAB37449.1| putative protein
  misc_feature (1)..(668): Homolog of NCBI NO: 34903782 NR Description: unnamed protein product [Oryza sativa (japonica group)] >gi|7340883|dbj|BAA92973.1| unnamed protein product
  misc_feature (13)..(668): Homolog of NCBI NO: 34911074 NR Description: putative receptor protein kinase-like protein
  misc_feature (237)..(554): Homolog of NCBI NO: 15240717 NR Description: putative protein; protein id: At5g07150.1
  misc_feature (4)..(139): Homolog of NCBI NO: 15240717 NR Description: putative protein; protein id: At5g07150.1
  misc_feature (549)..(666): Homolog of NCBI NO: 15240717 NR Description: putative protein; protein id: At5g07150.1
  misc_feature (245)..(665): Homolog of NCBI NO: 15228810 NR Description: putative protein kinase; protein id: At3g56050.1, by cDNA: gi_15028142, supported by cDNA: gi_20259276, supported cDNA: gi_20466709 [Arabidopsis thaliana] >gi|11358664|pir||T47722
  misc_feature (339)..(666): Homolog of NCBI NO: 28916446 NR Description: ser-thr protein kinase [Gossypium hirsutum]
MGCRWNPIGFQFSCFMFLIITLQSRSSLSLESEGFVLLKFRARVDSDPHGTLANWNVSDHDHFCSWFGVTCVDNKVQMLNLSGCSLGGTLAPELSQLSELRSLILSKNKLSGDIPNEFASFAKLEFLDLRDNNLNGVVPPELNKVLTPENLLLSGNKFAGFMTVKFLRLQSLYKVQMNKNRELSSVSADVLDCVNRKLGYWVRRESHGKNYVVNYHPSENETSIFKRRELLEETSNLAAMPAPDTPSPSPEIITIVFPRSSGSFPALTNAKKRIPPLIPPSSPPPLPTNNTIASDPPRKFEEKSKGFKDVWLYVVIGVAAFVAMLIIVAVIFFFRKRAVKSIGPWKTGLSGQLQKAFVTGVPKLNRSELETACEDFSNIIEAFDGYTVYKGTLSSGVEIAVASTAILETREWTRAMEMTYRRRIDTMSRVNHKNFINLIGYCEEDEPFNRMMVFEYAPNGTLFEHLHDKEMEHLDWNARTRIIMGTAYCLQYMHELNPPISHTKLVSSAIYLTDDYAAKVGEVPFSGQTGSKPRKPMSGDLDQSLLPLPPEPETNVYSFGVLMLEIISGKLSDSEEEGSILKWASKYLENDNLRDMIDPTLTTYKEEELEAICDVARHCLKLDESQRPKMKYVVQQLKEVINISQEQATPRLSPLWWAELEILSSEAT

SEQ ID NO: 80279 - protein, 653 aa, Arabidopsis thaliana
  peptide (1)..(653): Ceres Seq. ID no. 12655136
  misc_feature (1)..(653): Homolog of NCBI NO: 7268658 NR Description: putative protein (fragment) [Arabidopsis thaliana]
  misc_feature (1)..(653): Homolog of NCBI NO: 30684487 NR Description: leucine-rich repeat transmembrane protein kinase,
  misc_feature (17)..(653): Homolog of NCBI NO: 7486276 NR Description: hypothetical protein F28A21.50 - Arabidopsis (fragment) >gi|4539383|emb|CAB37449.1| putative protein
  misc_feature (1)..(653): Homolog of NCBI NO: 34903782 NR Description: unnamed protein product [Oryza sativa (japonica group)] >gi|7340883|dbj|BAA92973.1| unnamed protein product
  misc_feature (1)..(653): Homolog of NCBI NO: 34911074 NR Description: putative receptor protein kinase-like protein
  misc_feature (222)..(539): Homolog of NCBI NO: 15240717 NR Description: putative protein; protein id: At5g07150.1
  misc_feature (1)..(124): Homolog of NCBI NO: 15240717 NR Description: putative protein; protein id: At5g07150.1
  misc_feature (534)..(651): Homolog of NCBI NO: 15240717 NR Description: putative protein; protein id: At5g07150.1
  misc_feature (230)..(650): Homolog of NCBI NO: 15228810 NR Description: putative protein kinase; protein id: At3g56050.1, by cDNA: gi_15028142, supported by cDNA: gi_20259276, supported cDNA: gi_20466709 [Arabidopsis thaliana] >gi|11358664|pir||T47722
  misc_feature (324)..(651): Homolog of NCBI NO: 28916446 NR Description: ser-thr protein kinase [Gossypium hirsutum]
MFLIITLQSRSSLSLESEGFVLLKFRARVDSDPHGTLANWNVSDHDHFCSWFGVTCVDNKVQMLNLSGCSLGGTLAPELSQLSELRSLILSKNKLSGDIPNEFASFAKLEFLDLRDNNLNGVVPPELNKVLTPENLLLSGNKFAGFMTVKFLRLQSLYKVQMNKNRELSSVSADVLDCVNRKLGYWVRRESHGKNYVVNYHPSENETSIFKRRELLEETSNLAAMPAPDTPSPSPEIITIVFPRSSGSFPALTNAKKRIPPLIPPSSPPPLPTNNTIASDPPRKFEEKSKGFKDVWLYVVIGVAAFVAMLIIVAVIFFFRKRAVKSIGPWKTGLSGQLQKAFVTGVPKLNRSELETACEDFSNIIEAFDGYTVYKGTLSSGVEIAVASTAILETREWTRAMEMTYRRRIDTMSRVNHKNFINLIGYCEEDEPFNRMMVFEYAPNGTLFEHLHDKEMEHLDWNARTRIIMGTAYCLQYMHELNPPISHTKLVSSAIYLTDDYAAKVGEVPFSGQTGSKPRKPMSGDLDQSLLPLPPEPETNVYSFGVLMLEIISGKLSDSEEEGSILKWASKYLENDNLRDMIDPTLTTYKEEELEAICDVARHCLKLDESQRPKMKYVVQQLKEVINISQEQATPRLSPLWWAELEILSSEAT

SEQ ID NO: 80280 - protein, 591 aa, Arabidopsis thaliana
  peptide (1)..(591): Ceres Seq. ID no. 12655137
  misc_feature (1)..(591): Homolog of NCBI NO: 7268658 NR Description: putative protein (fragment) [Arabidopsis thaliana]
  misc_feature (1)..(591): Homolog of NCBI NO: 30684487 NR Description: leucine-rich repeat transmembrane protein kinase,
  misc_feature (1)..(591): Homolog of NCBI NO: 7486276 NR Description: hypothetical protein F28A21.50 - Arabidopsis (fragment) >gi|4539383|emb|CAB37449.1| putative protein
  misc_feature (1)..(591): Homolog of NCBI NO: 34903782 NR Description: unnamed protein product [Oryza sativa (japonica group)] >gi|7340883|dbj|BAA92973.1| unnamed protein product
  misc_feature (1)..(591): Homolog of NCBI NO: 34911074 NR Description: putative receptor protein kinase-like protein
  misc_feature (160)..(477): Homolog of NCBI NO: 15240717 NR Description: putative protein; protein id: At5g07150.1
  misc_feature (1)..(62): Homolog of NCBI NO: 15240717 NR Description: putative protein; protein id: At5g07150.1
  misc_feature (472)..(589): Homolog of NCBI NO: 15240717 NR Description: putative protein; protein id: At5g07150.1
  misc_feature (168)..(588): Homolog of NCBI NO: 15228810 NR Description: putative protein kinase; protein id: At3g56050.1, by cDNA: gi_15028142, supported by cDNA: gi_20259276, supported cDNA: gi_20466709 [Arabidopsis thaliana] >gi|11358664|pir||T47722
  misc_feature (262)..(589): Homolog of NCBI NO: 28916446 NR Description: ser-thr protein kinase [Gossypium hirsutum]
MLNLSGCSLGGTLAPELSQLSELRSLILSKNKLSGDIPNEFASFAKLEFLDLRDNNLNGVVPPELNKVLTPENLLLSGNKFAGFMTVKFLRLQSLYKVQMNKNRELSSVSADVLDCVNRKLGYWVRRESHGKNYVVNYHPSENETSIFKRRELLEETSNLAAMPAPDTPSPSPEIITIVFPRSSGSFPALTNAKKRIPPLIPPSSPPPLPTNNTIASDPPRKFEEKSKGFKDVWLYVVIGVAAFVAMLIIVAVIFFFRKRAVKSIGPWKTGLSGQLQKAFVTGVPKLNRSELETACEDFSNIIEAFDGYTVYKGTLSSGVEIAVASTAILETREWTRAMEMTYRRRIDTMSRVNHKNFINLIGYCEEDEPFNRMMVFEYAPNGTLFEHLHDKEMEHLDWNARTRIIMGTAYCLQYMHELNPPISHTKLVSSAIYLTDDYAAKVGEVPFSGQTGSKPRKPMSGDLDQSLLPLPPEPETNVYSFGVLMLEIISGKLSDSEEEGSILKWASKYLENDNLRDMIDPTLTTYKEEELEAICDVARHCLKLDESQRPKMKYVVQQLKEVINISQEQATPRLSPLWWAELEILSSEAT

SEQ ID NO: 80281 - DNA, 631 bp, Arabidopsis thaliana
  misc_feature (1)..(631): Ceres Seq. ID no. 12655144
  misc_feature: MA Experiment ID: 20000166 Result: Up-regulated in Transcription
  misc_feature: MA Experiment 20000166 PARAMETER Experiment Name: At_100uM_ABA_P Parameter: Age (day) Value: 14
  misc_feature: MA Experiment 20000166 PARAMETER Experiment Name: At_100uM_ABA_P Parameter: Organism Value: A. thaliana
  misc_feature: MA Experiment 20000166 PARAMETER Experiment Name: At_100uM_ABA_P Parameter: Plant Line Value: WS
  misc_feature: MA Experiment 20000166 PARAMETER Experiment Name: At_100uM_ABA_P Parameter: Timepoint (hr) Value: 1
  misc_feature: MA Experiment 20000166 PARAMETER Experiment Name: At_100uM_ABA_P Parameter: Tissue Value: Aerial
  misc_feature: MA Experiment 20000166 PARAMETER Experiment Name: At_100uM_ABA_P Parameter: Treatment Value: 100uM ABA vs. No Treatment
  misc_feature: MA Experiment ID: 20000179 Result: Down-regulated in Transcription
  misc_feature: MA Experiment 20000179 PARAMETER Experiment Name: At_Germinating_Seeds_P Parameter: Age (hr) Value: 6 vs. 0
  misc_feature: MA Experiment 20000179 PARAMETER Experiment Name: At_Germinating_Seeds_P Parameter: Tissue Value: Germinating Seeds
  misc_feature: MA Experiment ID: 20000180 Result: Down-regulated in Transcription
  misc_feature: MA Experiment 20000180 PARAMETER Experiment Name: At_Germinating_Seeds_P Parameter: Age (hr) Value: 24 vs. 0
  misc_feature: MA Experiment 20000180 PARAMETER Experiment Name: At_Germinating_Seeds_P Parameter: Tissue Value: Germinating Seeds
  misc_feature: MA Experiment ID: 20000182 Result: Up-regulated in Transcription
  misc_feature: MA Experiment 20000182 PARAMETER Experiment Name: At_2mM_SA_P Parameter: Age (day) Value: 14
  misc_feature: MA Experiment 20000182 PARAMETER Experiment Name: At_2mM_SA_P Parameter: Organism Value: A. thaliana
  misc_feature: MA Experiment 20000182 PARAMETER Experiment Name: At_2mM_SA_P Parameter: Plant Line Value: WS
  misc_feature: MA Experiment 20000182 PARAMETER Experiment Name: At_2mM_SA_P Parameter: Timepoint (hr) Value: 6
  misc_feature: MA Experiment 20000182 PARAMETER Experiment Name: At_2mM_SA_P Parameter: Tissue Value: Aerial
  misc_feature: MA Experiment 20000182 PARAMETER Experiment Name: At_2mM_SA_P Parameter: Treatment Value: 2mM SA vs. No Treatment
  misc_feature: MA Experiment ID: 20000184 Result: Up-regulated in Transcription
  misc_feature: MA Experiment 20000184 PARAMETER Experiment Name: At_Shoots__P Parameter: Age (day) Value: 7
  misc_feature: MA Experiment 20000184 PARAMETER Experiment Name: At_Shoots__P Parameter: Tissue Value: Shoots vs. Whole Plant
  misc_feature: MA Experiment ID: 20000267 Result: Up-regulated in Transcription
  misc_feature: MA Experiment 20000267 PARAMETER Experiment Name: At_Drought_P Parameter: Age (day) Value: 7
  misc_feature: MA Experiment 20000267 PARAMETER Experiment Name: At_Drought_P Parameter: Organism Value: A. thaliana
  misc_feature: MA Experiment 20000267 PARAMETER Experiment Name: At_Drought_P Parameter: Plant Line Value: WS
  misc_feature: MA Experiment 20000267 PARAMETER Experiment Name: At_Drought_P Parameter: Timepoint (hr) Value: 6
  misc_feature: MA Experiment 20000267 PARAMETER Experiment Name: At_Drought_P Parameter: Tissue Value: Whole Plant
  misc_feature: MA Experiment 20000267 PARAMETER Experiment Name: At_Drought_P Parameter: Treatment Value: Drought vs. No Drought
  misc_feature: MA Experiment ID: 20000436 Result: Up-regulated in Transcription
  misc_feature: MA Experiment 20000436 PARAMETER Experiment Name: At_Drought_P Parameter: Age (day) Value: 7
  misc_feature: MA Experiment 20000436 PARAMETER Experiment Name: At_Drought_P Parameter: Organism Value: A. thaliana
  misc_feature: MA Experiment 20000436 PARAMETER Experiment Name: At_Drought_P Parameter: Plant Line Value: WS
  misc_feature: MA Experiment 20000436 PARAMETER Experiment Name: At_Drought_P Parameter: Timepoint (hr) Value: 12
  misc_feature: MA Experiment 20000436 PARAMETER Experiment Name: At_Drought_P Parameter: Tissue Value: Whole Plant
  misc_feature: MA Experiment 20000436 PARAMETER Experiment Name: At_Drought_P Parameter: Treatment Value: Drought vs. No Drought
  misc_feature: MA Experiment ID: 20000437 Result: Up-regulated in Transcription
  misc_feature: MA Experiment 20000437 PARAMETER Experiment Name: At_Drought_P Parameter: Age (day) Value: 8
  misc_feature: MA Experiment 20000437 PARAMETER Experiment Name: At_Drought_P Parameter: Organism Value: A. thaliana
  misc_feature: MA Experiment 20000437 PARAMETER Experiment Name: At_Drought_P Parameter: Plant Line Value: WS
  misc_feature: MA Experiment 20000437 PARAMETER Experiment Name: At_Drought_P Parameter: Timepoint (hr) Value: 24
  misc_feature: MA Experiment 20000437 PARAMETER Experiment Name: At_Drought_P Parameter: Tissue Value: Whole Plant
  misc_feature: MA Experiment 20000437 PARAMETER Experiment Name: At_Drought_P Parameter: Treatment Value: Drought vs. No Drought
  misc_feature: MA Experiment ID: 20000453 Result: Up-regulated in Transcription
  misc_feature: MA Experiment 20000453 PARAMETER Experiment Name: At_100uM_ABA_P Parameter: Age (day) Value: 15
  misc_feature: MA Experiment 20000453 PARAMETER Experiment Name: At_100uM_ABA_P Parameter: Organism Value: A. thaliana
  misc_feature: MA Experiment 20000453 PARAMETER Experiment Name: At_100uM_ABA_P Parameter: Plant Line Value: WS
  misc_feature: MA Experiment 20000453 PARAMETER Experiment Name: At_100uM_ABA_P Parameter: Timepoint (hr) Value: 24
  misc_feature: MA Experiment 20000453 PARAMETER Experiment Name: At_100uM_ABA_P Parameter: Tissue Value: Aerial
  misc_feature: MA Experiment 20000453 PARAMETER Experiment Name: At_100uM_ABA_P Parameter: Treatment Value: 100uM ABA vs. No Treatment
  misc_feature: MA Experiment ID: 20001451 Result: Up-regulated in Transcription
  misc_feature: MA Experiment 20001451 PARAMETER Experiment Name: At_Far-red-induction_P Parameter: Age (day) Value: 7
  misc_feature: MA Experiment 20001451 PARAMETER Experiment Name: At_Far-red-induction_P Parameter: Light Value: Far-red vs. White
  misc_feature: MA Experiment 20001451 PARAMETER Experiment Name: At_Far-red-induction_P Parameter: Organism Value: A. thaliana
  misc_feature: MA Experiment 20001451 PARAMETER Experiment Name: At_Far-red-induction_P Parameter: Plant Line Value: Columbia
  misc_feature: MA Experiment 20001451 PARAMETER Experiment Name: At_Far-red-induction_P Parameter: Timepoint (hr) Value: 24
  misc_feature: MA Experiment 20001451 PARAMETER Experiment Name: At_Far-red-induction_P Parameter: Tissue Value: Whole Plant
  misc_feature: MA Experiment ID: 20001554 Result: Up-regulated in Transcription
  misc_feature: MA Experiment 20001554 PARAMETER Experiment Name: At_Drought_Soil_Dry_P Parameter: Age (day) Value: 21
  misc_feature: MA Experiment 20001554 PARAMETER Experiment Name: At_Drought_Soil_Dry_P Parameter: Organism Value: A. thaliana
  misc_feature: MA Experiment 20001554 PARAMETER Experiment Name: At_Drought_Soil_Dry_P Parameter: Plant Line Value: WS
  misc_feature: MA Experiment 20001554 PARAMETER Experiment Name: At_Drought_Soil_Dry_P Parameter: Post Timepoint (hr) Value: None
  misc_feature: MA Experiment 20001554 PARAMETER Experiment Name: At_Drought_Soil_Dry_P Parameter: Post-Treatment Value: None
  misc_feature: MA Experiment 20001554 PARAMETER Experiment Name: At_Drought_Soil_Dry_P Parameter: Timepoint (day) Value: 7
  misc_feature: MA Experiment 20001554 PARAMETER Experiment Name: At_Drought_Soil_Dry_P Parameter: Treatment Value: Drought vs. No Drought
  misc_feature: MA Experiment ID: 20001555 Result: Up-regulated in Transcription
  misc_feature: MA Experiment 20001555 PARAMETER Experiment Name: At_Drought_Soil_Dry_P Parameter: Age (day) Value: 24
  misc_feature: MA Experiment 20001555 PARAMETER Experiment Name: At_Drought_Soil_Dry_P Parameter: Organism Value: A. thaliana
  misc_feature: MA Experiment 20001555 PARAMETER Experiment Name: At_Drought_Soil_Dry_P Parameter: Plant Line Value: WS
  misc_feature: MA Experiment 20001555 PARAMETER Experiment Name: At_Drought_Soil_Dry_P Parameter: Post Timepoint (hr) Value: None
  misc_feature: MA Experiment 20001555 PARAMETER Experiment Name: At_Drought_Soil_Dry_P Parameter: Post-Treatment Value: None
  misc_feature: MA Experiment 20001555 PARAMETER Experiment Name: At_Drought_Soil_Dry_P Parameter: Timepoint (day) Value: 10
  misc_feature: MA Experiment 20001555 PARAMETER Experiment Name: At_Drought_Soil_Dry_P Parameter: Treatment Value: Drought vs. No Drought
  misc_feature: MA Experiment ID: 20001757 Result: Down-regulated in Transcription
  misc_feature: MA Experiment 20001757 PARAMETER Experiment Name: At_50mM_NH4NO3_L-to-H_P Parameter: Timepoint (hr) Value: 6
  misc_feature: MA Experiment 20001757 PARAMETER Experiment Name: At_50mM_NH4NO3_L-to-H_P Parameter: Tissue Value: Leaf
  misc_feature: MA Experiment 20001757 PARAMETER Experiment Name: At_50mM_NH4NO3_L-to-H_P Parameter: Treatment Value: 50mM NH4NO3 vs 100mM Mannitol
  misc_feature: MA Experiment ID: 20001904 Result: Up-regulated in Transcription
  misc_feature: MA Experiment 20001904 PARAMETER Experiment Name: At_Drought_Reproduction_P Parameter: Age (day) Value: 37
  misc_feature: MA Experiment 20001904 PARAMETER Experiment Name: At_Drought_Reproduction_P Parameter: Organism Value: A. thaliana
  misc_feature: MA Experiment 20001904 PARAMETER Experiment Name: At_Drought_Reproduction_P Parameter: Plant Line Value: WS
  misc_feature: MA Experiment 20001904 PARAMETER Experiment Name: At_Drought_Reproduction_P Parameter: Timepoint (day) Value: 7
  misc_feature: MA Experiment 20001904 PARAMETER Experiment Name: At_Drought_Reproduction_P Parameter: Tissue Value: Rosettes
  misc_feature: MA Experiment 20001904 PARAMETER Experiment Name: At_Drought_Reproduction_P Parameter: Treatment Value: Drought vs. No Drought
  misc_feature: MA Experiment ID: 20001905 Result: Up-regulated in Transcription
  misc_feature: MA Experiment 20001905 PARAMETER Experiment Name: At_Drought_Reproduction_P Parameter: Age (day) Value: 40
  misc_feature: MA Experiment 20001905 PARAMETER Experiment Name: At_Drought_Reproduction_P Parameter: Organism Value: A. thaliana
  misc_feature: MA Experiment 20001905 PARAMETER Experiment Name: At_Drought_Reproduction_P Parameter: Plant Line Value: WS
  misc_feature: MA Experiment 20001905 PARAMETER Experiment Name: At_Drought_Reproduction_P Parameter: Timepoint (day) Value: 10
  misc_feature: MA Experiment 20001905 PARAMETER Experiment Name: At_Drought_Reproduction_P Parameter: Tissue Value: Rosettes
  misc_feature: MA Experiment 20001905 PARAMETER Experiment Name: At_Drought_Reproduction_P Parameter: Treatment Value: Drought vs. No Drought
  misc_feature: MA Experiment ID: 20001906 Result: Up-regulated in Transcription
  misc_feature: MA Experiment 20001906 PARAMETER Experiment Name: At_Drought_Reproduction_P Parameter: Age (day) Value: 35
  misc_feature: MA Experiment 20001906 PARAMETER Experiment Name: At_Drought_Reproduction_P Parameter: Organism Value: A. thaliana
  misc_feature: MA Experiment 20001906 PARAMETER Experiment Name: At_Drought_Reproduction_P Parameter: Plant Line Value: WS
  misc_feature: MA Experiment 20001906 PARAMETER Experiment Name: At_Drought_Reproduction_P Parameter: Timepoint (day) Value: 5
  misc_feature: MA Experiment 20001906 PARAMETER Experiment Name: At_Drought_Reproduction_P Parameter: Tissue Value: Siliques
  misc_feature: MA Experiment 20001906 PARAMETER Experiment Name: At_Drought_Reproduction_P Parameter: Treatment Value: Drought vs. No Drought
  misc_feature: MA Experiment ID: 20001910 Result: Up-regulated in Transcription
  misc_feature: MA Experiment 20001910 PARAMETER Experiment Name: At_Drought_Reproduction_P Parameter: Age (day) Value: 37
  misc_feature: MA Experiment 20001910 PARAMETER Experiment Name: At_Drought_Reproduction_P Parameter: Organism Value: A. thaliana
  misc_feature: MA Experiment 20001910 PARAMETER Experiment Name: At_Drought_Reproduction_P Parameter: Plant Line Value: WS
  misc_feature: MA Experiment 20001910 PARAMETER Experiment Name: At_Drought_Reproduction_P Parameter: Timepoint (day) Value: 7
  misc_feature: MA Experiment 20001910 PARAMETER Experiment Name: At_Drought_Reproduction_P Parameter: Tissue Value: Flowers
  misc_feature: MA Experiment 20001910 PARAMETER Experiment Name: At_Drought_Reproduction_P Parameter: Treatment Value: Drought vs. No Drought
  misc_feature: MA Experiment ID: 20001911 Result: Up-regulated in Transcription
  misc_feature: MA Experiment 20001911 PARAMETER Experiment Name: At_Drought_Reproduction_P Parameter: Age (day) Value: 40
  misc_feature: MA Experiment 20001911 PARAMETER Experiment Name: At_Drought_Reproduction_P Parameter: Organism Value: A. thaliana
  misc_feature: MA Experiment 20001911 PARAMETER Experiment Name: At_Drought_Reproduction_P Parameter: Plant Line Value: WS
  misc_feature: MA Experiment 20001911 PARAMETER Experiment Name: At_Drought_Reproduction_P Parameter: Timepoint (day) Value: 10
  misc_feature: MA Experiment 20001911 PARAMETER Experiment Name: At_Drought_Reproduction_P Parameter: Tissue Value: Flowers
  misc_feature: MA Experiment 20001911 PARAMETER Experiment Name: At_Drought_Reproduction_P Parameter: Treatment Value: Drought vs. No Drought
gtgataaaactaagtaagaaatagcataaaagtaaaagggaatgtcgagtgaggagttgaggctggtttcgccgacgatagacaacgatgggaagttgccgagaaagtatacgatggcaggtcaaggtgttaagaaagacatctctcctcctcttgaatggtacaacgttccagaaggtacaaaaacgctagctttggtggtggaagacatcgatgcgcctgatcctagtggcccgctggtgccatggacggtgtgggttgtcgtcgacataccaccagagatgaaaggcctaccggaaggatattccggcaatgaggatcagactaccggtattcgggaagggaacaacgatcacaagattccgggatggcgtggacctctcttacctagtcacggtcaccgttttcagttcaagctttttgctctcgatgataaacccaagattggtcacacggtgacgaaagagagattgctgatcgcaattgaagggcacgtgctaggagaagccatcttgacgtgtttggcctaaaatatgtcgttcgtcgttatagtcataacaccgttggatatgtatcatagttaataattccatatcacgtattgaggattatcaatgaaataattctagtt

SEQ ID NO: 80282 - protein, 162 aa, Arabidopsis thaliana
  peptide (1)..(162): Ceres Seq. ID no. 12655145
  misc_feature (1)..(162): Homolog of NCBI NO: 15240946 NR Description: putative protein; protein id: At5g01300.1, by cDNA: gi_20465384 [Arabidopsis thaliana]
  misc_feature (1)..(161): Homolog of NCBI NO: 10799810 NR Description: cold-regulated protein [Hordeum vulgare subsp.
  misc_feature (1)..(161): Homolog of NCBI NO: 26017213 NR Description: cold regulated protein [Triticum aestivum]
  misc_feature (1)..(158): Homolog of NCBI NO: 21673435 NR Description: conserved hypothetical protein [Chlorobium TLS] >gi|21646536|gb|AAM71842.1| conserved hypothetical protein
  misc_feature (6)..(158): Homolog of NCBI NO: 17548245 NR Description: CONSERVED HYPOTHETICAL PROTEIN [Ralstonia >gi|17430491|emb|CAD17175.1| CONSERVED HYPOTHETICAL PROTEIN
  misc_feature (15)..(158): Homolog of NCBI NO: 15678301 NR Description: conserved protein [Methanothermobacter
  misc_feature (32)..(158): Homolog of NCBI NO: 30248206 NR Description: conserved hypothetical protein [Nitrosomonas ATCC 19718] >gi|30180091|emb|CAD84093.1| conserved hypothetical
  misc_feature (5)..(158): Homolog of NCBI NO: 23054005 NR Description: hypothetical protein [Geobacter metallireducens]
  misc_feature (6)..(158): Homolog of NCBI NO: 23130699 NR Description: hypothetical protein [Nostoc punctiforme]
  misc_feature (1)..(158): Homolog of NCBI NO: 20090292 NR Description: hypothetical protein (multi-domain)
MSSEELRLVSPTIDNDGKLPRKYTMAGQGVKKDISPPLEWYNVPEGTKTLALVVEDIDAPDPSGPLVPWTVWVVVDIPPEMKGLPEGYSGNEDQTTGIREGNNDHKIPGWRGPLLPSHGHRFQFKLFALDDKPKIGHTVTKERLLIAIEGHVLGEAILTCLA

SEQ ID NO: 80283 - protein, 138 aa, Arabidopsis thaliana
  peptide (1)..(138): Ceres Seq. ID no. 12655146
  misc_feature (1)..(138): Homolog of NCBI NO: 15240946 NR Description: putative protein; protein id: At5g01300.1, by cDNA: gi_20465384 [Arabidopsis thaliana]
  misc_feature (1)..(137): Homolog of NCBI NO: 10799810 NR Description: cold-regulated protein [Hordeum vulgare subsp.
  misc_feature (1)..(137): Homolog of NCBI NO: 26017213 NR Description: cold regulated protein [Triticum aestivum]
  misc_feature (1)..(134): Homolog of NCBI NO: 21673435 NR Description: conserved hypothetical protein [Chlorobium TLS] >gi|21646536|gb|AAM71842.1| conserved hypothetical protein
  misc_feature (1)..(134): Homolog of NCBI NO: 17548245 NR Description: CONSERVED HYPOTHETICAL PROTEIN [Ralstonia >gi|17430491|emb|CAD17175.1| CONSERVED HYPOTHETICAL PROTEIN
  misc_feature (1)..(134): Homolog of NCBI NO: 15678301 NR Description: conserved protein [Methanothermobacter
  misc_feature (8)..(134): Homolog of NCBI NO: 30248206 NR Description: conserved hypothetical protein [Nitrosomonas ATCC 19718] >gi|30180091|emb|CAD84093.1| conserved hypothetical
  misc_feature (1)..(134): Homolog of NCBI NO: 23054005 NR Description: hypothetical protein [Geobacter metallireducens]
  misc_feature (1)..(134): Homolog of NCBI NO: 23130699 NR Description: hypothetical protein [Nostoc punctiforme]
  misc_feature (1)..(134): Homolog of NCBI NO: 20090292 NR Description: hypothetical protein (multi-domain)
MAGQGVKKDISPPLEWYNVPEGTKTLALVVEDIDAPDPSGPLVPWTVWVVVDIPPEMKGLPEGYSGNEDQTTGIREGNNDHKIPGWRGPLLPSHGHRFQFKLFALDDKPKIGHTVTKERLLIAIEGHVLGEAILTCLA

SEQ ID NO: 80284 - protein, 82 aa, Arabidopsis thaliana
  peptide (1)..(82): Ceres Seq. ID no. 12655147
  misc_feature (1)..(82): Homolog of NCBI NO: 15240946 NR Description: putative protein; protein id: At5g01300.1, by cDNA: gi_20465384 [Arabidopsis thaliana]
  misc_feature (1)..(81): Homolog of NCBI NO: 10799810 NR Description: cold-regulated protein [Hordeum vulgare subsp.
  misc_feature (1)..(81): Homolog of NCBI NO: 26017213 NR Description: cold regulated protein [Triticum aestivum]
  misc_feature (1)..(78): Homolog of NCBI NO: 21673435 NR Description: conserved hypothetical protein [Chlorobium TLS] >gi|21646536|gb|AAM71842.1| conserved hypothetical protein
  misc_feature (1)..(78): Homolog of NCBI NO: 17548245 NR Description: CONSERVED HYPOTHETICAL PROTEIN [Ralstonia >gi|17430491|emb|CAD17175.1| CONSERVED HYPOTHETICAL PROTEIN
  misc_feature (1)..(78): Homolog of NCBI NO: 15678301 NR Description: conserved protein [Methanothermobacter
  misc_feature (1)..(78): Homolog of NCBI NO: 30248206 NR Description: conserved hypothetical protein [Nitrosomonas ATCC 19718] >gi|30180091|emb|CAD84093.1| conserved hypothetical
  misc_feature (1)..(78): Homolog of NCBI NO: 23054005 NR Description: hypothetical protein [Geobacter metallireducens]
  misc_feature (1)..(78): Homolog of NCBI NO: 23130699 NR Description: hypothetical protein [Nostoc punctiforme]
  misc_feature (1)..(78): Homolog of NCBI NO: 20090292 NR Description: hypothetical protein (multi-domain)
MKGLPEGYSGNEDQTTGIREGNNDHKIPGWRGPLLPSHGHRFQFKLFALDDKPKIGHTVTKERLLIAIEGHVLGEAILTCLA

SEQ ID NO: 80285 - DNA, 1362 bp, Arabidopsis thaliana
  misc_feature (1)..(1362): Ceres Seq. ID no. 12655152
  misc_feature: MA Experiment ID: 108434 Result: Up-regulated in Transcription
  misc_feature: MA Experiment 108434 PARAMETER Experiment Name: At_Root_Tips_cDNA_P Parameter: Tissue Value: Root Tips
  misc_feature: MA Experiment ID: 108461 Result: Up-regulated in Transcription
  misc_feature: MA Experiment 108461 PARAMETER Experiment Name: At_Germinating_Seeds_cDNA_P Parameter: Age (day) Value: 1 vs. 0
  misc_feature: MA Experiment 108461 PARAMETER Experiment Name: At_Germinating_Seeds_cDNA_P Parameter: Tissue Value: Germinating Seeds
  misc_feature: MA Experiment ID: 108462 Result: Up-regulated in Transcription
  misc_feature: MA Experiment 108462 PARAMETER Experiment Name: At_Germinating_Seeds_cDNA_P Parameter: Age (day) Value: 2 vs. 0
  misc_feature: MA Experiment 108462 PARAMETER Experiment Name: At_Germinating_Seeds_cDNA_P Parameter: Tissue Value: Germinating Seeds
atggcttctttaatgttatctctcggttccacttctctgttaccgcgcgagattaacaaggataagctaaagcttggaacttctgcttcgaacccgttcctaaaagcaaagtcttttagcagagtgactatgacggttgcagtgaagccttctcgtttcgagggtataactatggctccaccagaccctattcttggagtcagtgaagcattcaaagctgacactaacgggatgaaactcaatcttggtgttggtgcttatcgtactgaggaactccagccttatgtgcttaatgttgttaaaaaggcggagaatttgatgttggagagaggagataacaaagagtatcttccaattgaggggttggcagcattcaacaaggctactgctgagttgctatttggagctggtcatcctgttattaaggaacaaagagtagcaacaattcagggtctttcgggaacaggttcactgcgattagcagcggctcttatagagcgttatttccctggagcaaaagttgtgatctcatcaccaacctggggtaatcacaagaatatcttcaatgatgccaaagttccgtggtccgaataccgctactatgatccaaaaacaattggtttggattttgagggaatgatagcagatataaaggaagctccagaaggatccttcatcttgcttcacggatgtgctcacaacccaactggaattgacccaacaccagaacagtgggtaaaaattgctgatgtcattcaggaaaagaaccatatcccatttttcgatgttgcataccagggctttgctagtggaagccttgatgaagatgcagcatctgtgagattatttgctgagcggggaatggagttttttgttgctcagtcatatagtaaaaatttaggtttgtatgcagaaagaattggggcaatcaatgtcgtgtgctcctcagctgatgctgctacaagggtcaagagccagttgaaaaggattgctcggcctatgtactcgaatccaccagttcatggggcgagaatcgtggccaatgtagtgggtgatgtaactatgttcagtgaatggaaagcagagatggaaatgatggcaggaagaataaagacggttagacaagagctgtatgatagcctcgtttcaaaagacaagagcgggaaggactggtccttcattctgaagcaaattggcatgttctctttcaccggcctaaacaaagctcagagcgataacatgacggacaaatggcatgtgtatatgactaaagacgggaggatatcattggccggattatctctggccaaatgcgagtatcttgctgatgcgatcatcgactcataccataacgtaagctga

SEQ ID NO: 80286 - protein, 453 aa, Arabidopsis thaliana; identical to SEQ ID NO: 39108
  peptide (1)..(453): Ceres Seq. ID no. 12655153
  misc_feature (131)..(449): Pfam Name: Aminotransferase class I and II Pfam Description: Aminotransferase class I and II
  misc_feature (1)..(453): Homolog of NCBI NO: 15236129 NR Description: aspartate aminotransferase; protein id: supported by cDNA: 103854., supported by cDNA: 33414., supported cDNA: gi_15451159, supported by cDNA: gi_20148354 [Arabidopsis
  misc_feature (1)..(453): Homolog of NCBI NO: 531555 NR Description: aspartate aminotransferase [Arabidopsis thaliana]
  misc_feature (1)..(453): Homolog of NCBI NO: 21618222 NR Description: aspartate aminotransferase [Arabidopsis thaliana]
  misc_feature (1)..(453): Homolog of NCBI NO: 1076500 NR Description: aspartate transaminase (EC 2.6.1.1) - alfalfa
  misc_feature (1)..(453): Homolog of NCBI NO: 445118 NR Description: Asp aminotransferase
  misc_feature (1)..(453): Homolog of NCBI NO: 25990362 NR Description: aspartate aminotransferase [Phaseolus vulgaris]
  misc_feature (2)..(453): Homolog of NCBI NO: 2605932 NR Description: aspartate aminotransferase [Lotus corniculatus]
  misc_feature (1)..(453): Homolog of NCBI NO: 485495 NR Description: aspartate transaminase (EC 2.6.1.1) AAT5

SEQ ID NO: 80287 - protein, 449 aa, Arabidopsis thaliana; identical to SEQ ID NO: 39109
  peptide (1)..(449): Ceres Seq. ID no. 12655154
  misc_feature (127)..(445): Pfam Name: Aminotransferase class I and II Pfam Description: Aminotransferase class I and II
  misc_feature (1)..(449): Homolog of NCBI NO: 15236129 NR Description: aspartate aminotransferase; protein id: supported by cDNA: 103854., supported by cDNA: 33414., supported cDNA: gi_15451159, supported by cDNA: gi_20148354 [Arabidopsis
  misc_feature (1)..(449): Homolog of NCBI NO: 531555 NR Description: aspartate aminotransferase [Arabidopsis thaliana]
  misc_feature (1)..(449): Homolog of NCBI NO: 21618222 NR Description: aspartate aminotransferase [Arabidopsis thaliana]
  misc_feature (1)..(449): Homolog of NCBI NO: 1076500 NR Description: aspartate transaminase (EC 2.6.1.1) - alfalfa
  misc_feature (1)..(449): Homolog of NCBI NO: 445118 NR Description: Asp aminotransferase
  misc_feature (1)..(449): Homolog of NCBI NO: 25990362 NR Description: aspartate aminotransferase [Phaseolus vulgaris]
  misc_feature (1)..(449): Homolog of NCBI NO: 2605932 NR Description: aspartate aminotransferase [Lotus corniculatus]
  misc_feature (1)..(449): Homolog of NCBI NO: 485495 NR Description: aspartate transaminase (EC 2.6.1.1) AAT5

SEQ ID NO: 80288 - protein, 410 aa, Arabidopsis thaliana; identical to SEQ ID NO: 39110
  peptide (1)..(410): Ceres Seq. ID no. 12655155
  misc_feature (88)..(406): Pfam Name: Aminotransferase class I and II Pfam Description: Aminotransferase class I and II
  misc_feature (1)..(410): Homolog of NCBI NO: 15236129 NR Description: aspartate aminotransferase; protein id: supported by cDNA: 103854., supported by cDNA: 33414., supported cDNA: gi_15451159, supported by cDNA: gi_20148354 [Arabidopsis
  misc_feature (1)..(410): Homolog of NCBI NO: 531555 NR Description: aspartate aminotransferase [Arabidopsis thaliana]
  misc_feature (1)..(410): Homolog of NCBI NO: 21618222 NR Description: aspartate aminotransferase [Arabidopsis thaliana]
  misc_feature (1)..(410): Homolog of NCBI NO: 1076500 NR Description: aspartate transaminase (EC 2.6.1.1) - alfalfa
  misc_feature (1)..(410): Homolog of NCBI NO: 445118 NR Description: Asp aminotransferase
  misc_feature (1)..(410): Homolog of NCBI NO: 25990362 NR Description: aspartate aminotransferase [Phaseolus vulgaris]
  misc_feature (1)..(410): Homolog of NCBI NO: 2605932 NR Description: aspartate aminotransferase [Lotus corniculatus]
  misc_feature (1)..(410): Homolog of NCBI NO: 485495 NR Description: aspartate transaminase (EC 2.6.1.1) AAT5

SEQ ID NO: 80289 - DNA, 501 bp, Arabidopsis thaliana
  misc_feature (1)..(501): Ceres Seq. ID no. 12655196
  misc_feature: MA Experiment ID: 20000185 Result: Down-regulated in Transcription
  misc_feature: MA Experiment 20000185 PARAMETER Experiment Name: At_Roots__P Parameter: Age (day) Value: 7 vs. 21
  misc_feature: MA Experiment 20000185 PARAMETER Experiment Name: At_Roots__P Parameter: Organism Value: A. thaliana
  misc_feature: MA Experiment 20000185 PARAMETER Experiment Name: At_Roots__P Parameter: Tissue Value: Roots vs. Whole Plant
  misc_feature: MA Experiment ID: 20000439 Result: Down-regulated in Transcription
  misc_feature: MA Experiment 20000439 PARAMETER Experiment Name: At_Roots__P Parameter: Age (day) Value: 14 vs. 21
  misc_feature: MA Experiment 20000439 PARAMETER Experiment Name: At_Roots__P Parameter: Organism Value: A. thaliana
  misc_feature: MA Experiment 20000439 PARAMETER Experiment Name: At_Roots__P Parameter: Tissue Value: Roots vs. Whole Plant
  misc_feature: MA Experiment ID: 20001557 Result: Down-regulated in Transcription
  misc_feature: MA Experiment 20001557 PARAMETER Experiment Name: At_Drought_Soil_Dry_P Parameter: Age (day) Value: 27
  misc_feature: MA Experiment 20001557 PARAMETER Experiment Name: At_Drought_Soil_Dry_P Parameter: Organism Value: A. thaliana
  misc_feature: MA Experiment 20001557 PARAMETER Experiment Name: At_Drought_Soil_Dry_P Parameter: Plant Line Value: WS
  misc_feature: MA Experiment 20001557 PARAMETER Experiment Name: At_Drought_Soil_Dry_P Parameter: Post Timepoint (hr) Value: 3
  misc_feature: MA Experiment 20001557 PARAMETER Experiment Name: At_Drought_Soil_Dry_P Parameter: Post-Treatment Value: Re-Water vs. No Drought
  misc_feature: MA Experiment 20001557 PARAMETER Experiment Name: At_Drought_Soil_Dry_P Parameter: Timepoint (day) Value: 13
  misc_feature: MA Experiment 20001557 PARAMETER Experiment Name: At_Drought_Soil_Dry_P Parameter: Treatment Value: Drought vs. No Drought
atgcaaaacgaaataaggaaagtggtgacaaagggcaaggctgctggtgtgcttcgtttagtgtttcatgatgctggaacctttgaactggacgatcattctgtgtcttgggcggatatgatctctgtcgctgggtctgaagcagtttcaatatgtggcggcccaacaattccagtagttttgggaagacttgattcagcgcaacctgatccagaaggcaagctacctccagaaaccctgagtgcctcgggattgaaagaatgcttcaaaagaaaaggattttcgacccaggagcttgttgccttatctggggcacatacgattgggagtaaaggctttggagatccgacagtttttgacaatgcatactacaaaatccttcttgaaaaaccatggacgtgggtgaaacggtatgcagaagaccaagacaagttcttcgaagacttcacaaatgcttatatcaaactagtaaattctggggccaaatggaatatgttatga

SEQ ID NO: 80290 - protein, 166 aa, Arabidopsis thaliana
  peptide (1)..(166): Ceres Seq. ID no. 12655197
  misc_feature (5)..(141): Pfam Name: Peroxidase Pfam Description: Peroxidase
  misc_feature (1)..(166): Homolog of NCBI NO: 7487935 NR Description: L-ascorbate peroxidase homolog F10M6.50 -
  misc_feature (35)..(133): Homolog of NCBI NO: 30689347 NR Description: ascorbate peroxidase family [Arabidopsis thaliana]
  misc_feature (1)..(34): Homolog of NCBI NO: 30689347 NR Description: ascorbate peroxidase family [Arabidopsis thaliana]
  misc_feature (134)..(166): Homolog of NCBI NO: 30689347 NR Description: ascorbate peroxidase family [Arabidopsis thaliana]
  misc_feature (35)..(131): Homolog of NCBI NO: 27817866 NR Description: OJ1081_B12.15 [Oryza sativa (japonica
  misc_feature (1)..(34): Homolog of NCBI NO: 27817866 NR Description: OJ1081_B12.15 [Oryza sativa (japonica
  misc_feature (134)..(163): Homolog of NCBI NO: 27817866 NR Description: OJ1081_B12.15 [Oryza sativa (japonica
  misc_feature (35)..(128): Homolog of NCBI NO: 6682242 NR Description: putative ascorbate peroxidase [Arabidopsis
  misc_feature (35)..(128): Homolog of NCBI NO: 30680940 NR Description: ascorbate peroxidase (APX) [Arabidopsis thaliana]
  misc_feature (125)..(160): Homolog of NCBI NO: 6682242 NR Description: putative ascorbate peroxidase [Arabidopsis
MQNEIRKVVTKGKAAGVLRLVFHDAGTFELDDHSVSWADMISVAGSEAVSICGGPTIPVVLGRLDSAQPDPEGKLPPETLSASGLKECFKRKGFSTQELVALSGAHTIGSKGFGDPTVFDNAYYKILLEKPWTWVKRYAEDQDKFFEDFTNAYIKLVNSGAKWNML

SEQ ID NO: 80291 - protein, 127 aa, Arabidopsis thaliana
  peptide (1)..(127): Ceres Seq. ID no. 12655198
  misc_feature (1)..(102): Pfam Name: Peroxidase Pfam Description: Peroxidase
  misc_feature (1)..(127): Homolog of NCBI NO: 7487935 NR Description: L-ascorbate peroxidase homolog F10M6.50 -
  misc_feature (1)..(94): Homolog of NCBI NO: 30689347 NR Description: ascorbate peroxidase family [Arabidopsis thaliana]
  misc_feature (95)..(127): Homolog of NCBI NO: 30689347 NR Description: ascorbate peroxidase family [Arabidopsis thaliana]
  misc_feature (1)..(92): Homolog of NCBI NO: 27817866 NR Description: OJ1081_B12.15 [Oryza sativa (japonica
  misc_feature (95)..(124): Homolog of NCBI NO: 27817866 NR Description: OJ1081_B12.15 [Oryza sativa (japonica
  misc_feature (1)..(89): Homolog of NCBI NO: 6682242 NR Description: putative ascorbate peroxidase [Arabidopsis
  misc_feature (1)..(89): Homolog of NCBI NO: 30680940 NR Description: ascorbate peroxidase (APX) [Arabidopsis thaliana]
  misc_feature (86)..(121): Homolog of NCBI NO: 6682242 NR Description: putative ascorbate peroxidase [Arabidopsis
  misc_feature (86)..(121): Homolog of NCBI NO: 30680940 NR Description: ascorbate peroxidase (APX) [Arabidopsis thaliana]
  misc_feature (1)..(89): Homolog of NCBI NO: 555576 NR Description: ascorbate peroxidase [Arabidopsis thaliana]
MISVAGSEAVSICGGPTIPVVLGRLDSAQPDPEGKLPPETLSASGLKECFKRKGFSTQELVALSGAHTIGSKGFGDPTVFDNAYYKILLEKPWTWVKRYAEDQDKFFEDFTNAYIKLVNSGAKWNML

SEQ ID NO: 80292 - DNA, 2067 bp, Arabidopsis thaliana
  misc_feature (1)..(2067): Ceres Seq. ID no. 12655214
  misc_feature: MA Experiment ID: 20000307 Result: Down-regulated in Transcription
  misc_feature: MA Experiment 20000307 PARAMETER Experiment Name: At_Germinating_Seeds_Sub_P Parameter: Age (hr) Value: 24 vs. 0
  misc_feature: MA Experiment 20000307 PARAMETER Experiment Name: At_Germinating_Seeds_Sub_P Parameter: Organism Value: A. thaliana
  misc_feature: MA Experiment 20000307 PARAMETER Experiment Name: At_Germinating_Seeds_Sub_P Parameter: Plant Line Value: WS
  misc_feature: MA Experiment 20000307 PARAMETER Experiment Name: At_Germinating_Seeds_Sub_P Parameter: Tissue Value: Germinating Seeds
atggacgaagttactctttgtcttgcgcttaaagcatgtcgtggagacttgaaacgcggctgccaaatccacgggttttccacaacttctgggttcacttcctttgtttgtgtttcaaacgcagtaatgggtatgtaccgtaaagccggtcgctttgacaatgctttgtgcatatttgagaatctggttgatcctgatgttgtttcttggaacactatactctctgggtttgatgacaatcaaattgctctgaattttgttgttaggatgaaatctgctggagtagtttttgacgcattcacttattccactgctcttagcttctgtgtgggctctgaaggatttcttttaggattgcagttgcagtcaactgtggtgaaaaccggactggagtctgatcttgtcgttggaaactcgtttattacaatgtattcgcggtctggaagtttcagaggagctcggagagtttttgatgaaatgtcgtttaaggatatgatttcatggaactctttattgtcaggactttctcaagaaggcactttcgggtttgaagcagtggttatctttagggacatgatgcgagaaggtgtggagcttgatcacgtgtcttttactagcgtgattactacctgttgtcacgaaactgacttgaagctggccaggcaaattcatggtttgtgcataaaaagaggttatgaatcacttttagaagttggtaatattttgatgtcaaggtactccaagtgtggggttttggaagctgtgaaatcagtgtttcaccaaatgagtgagcggaatgttgtctcttggacaacaatgatttcctcgaataaagacgatgctgtgtccatcttccttaatatgcggtttgatggagtttaccctaacgaggtcacttttgttggattaatcaatgccgtgaagtgcaatgagcaaatcaaagaagggcttaaaattcatgggctatgcatcaagacaggctttgtttcagaaccatctgtaggcaacagtttcatcacattgtatgccaagtttgaggctctggaagatgccaagaaggcttttgaggatataactttccgggagattatatcctggaatgctatgatatctggatttgcacaaaatggattctctcatgaagctctcaagatgttcttatccgcagcagcagaaacaatgccgaatgaatacactttcggaagtgtcttgaatgcaatagcttttgcagaggatatatctgtaaagcaaggtcagcgttgccatgctcatttactgaaattgggtttgaatagttgtcctgttgtttcaagcgcgcttcttgatatgtacgccaagcgtgggaacattgatgaatctgagaaagtctttaacgagatgtctcaaaagaaccaatttgtttggacatcgataatatcagcctattcaagccacggtgattttgaaaccgtgatgaacttgttccacaagatgattaaagaaaacgtagcaccagacctagtcacttttctctctgtgttaacagcttgtaatagaaaaggaatggtagacaagggctatgagattttcaacatgatgatcgaagtctacaatcttgagccgtctcatgagcattactcatgtatggttgatatgcttggccgagctgggagattgaaagaagcagaagagcttatgagtgaggttcctggaggaccaggagagtcgatgcttcagagcatgctcgggtcttgtaggctgcacgggaatgtgaaaatgggagcaaaagtggctgagcttgcaatggaaatgaaaccggaactgtcaggttcttacgttcagatgtataacatctatgcagagaaagaagagtgggataaagctgcagagatcaggaaagcaatgaggaagaaaaacgtaagtaaagaagctggattcagttggatcgatgttggtgacactgaagggtctttaacgatgcaaggtttctcttcaggggataagtctcatccaaaatctgatgagatttatagaatggtggaaattattggattggagatgaatttggaggggaaagttgcagtttag

SEQ ID NO: 80293 - protein, 688 aa, Arabidopsis thaliana
  peptide (1)..(688): Ceres Seq. ID no. 12655215
  misc_feature (37)..(71): Pfam Name: PPR repeat Pfam Description: PPR repeat
  misc_feature (23)..(680): Homolog of NCBI NO: 34899332 NR Description: similar to selenium-binding protein [Oryza sativa
  misc_feature (20)..(674): Homolog of NCBI NO: 15226200 NR Description: putative selenium-binding protein; protein id:
  misc_feature (16)..(674): Homolog of NCBI NO: 15232006 NR Description: hypothetical protein; protein id: At3g09040.1 thaliana] >gi|5923669|gb|AAD56320.1|AC009326_7 hypothetical
  misc_feature (10)..(670): Homolog of NCBI NO: 15236324 NR Description: putative protein; protein id: At4g13650.1
  misc_feature (2)..(682): Homolog of NCBI NO: 38423978 NR Description: PPR-repeat protein-like [Oryza sativa (japonica
  misc_feature (2)..(674): Homolog of NCBI NO: 15235115 NR Description: putative protein; protein id: At4g39530.1
  misc_feature (1)..(686): Homolog of NCBI NO: 11357746 NR Description: hypothetical protein F2K15.30 - Arabidopsis >gi|6723387|emb|CAB66396.1| putative protein [Arabidopsis
  misc_feature (1)..(686): Homolog of NCBI NO: 30693150 NR Description: pentatricopeptide (PPR) repeat-containing protein
  misc_feature (2)..(675): Homolog of NCBI NO: 34915012 NR Description: P0458A05.10 [Oryza sativa (japonica
  misc_feature (8)..(674): Homolog of NCBI NO: 15220337 NR Description: hypothetical protein; protein id: At1g11290.1
MDEVTLCLALKACRGDLKRGCQIHGFSTTSGFTSFVCVSNAVMGMYRKAGRFDNALCIFENLVDPDVVSWNTILSGFDDNQIALNFVVRMKSAGVVFDAFTYSTALSFCVGSEGFLLGLQLQSTVVKTGLESDLVVGNSFITMYSRSGSFRGARRVFDEMSFKDMISWNSLLSGLSQEGTFGFEAVVIFRDMMREGVELDHVSFTSVITTCCHETDLKLARQIHGLCIKRGYESLLEVGNILMSRYSKCGVLEAVKSVFHQMSERNVVSWTTMISSNKDDAVSIFLNMRFDGVYPNEVTFVGLINAVKCNEQIKEGLKIHGLCIKTGFVSEPSVGNSFITLYAKFEALEDAKKAFEDITFREIISWNAMISGFAQNGFSHEALKMFLSAAAETMPNEYTFGSVLNAIAFAEDISVKQGQRCHAHLLKLGLNSCPVVSSALLDMYAKRGNIDESEKVFNEMSQKNQFVWTSIISAYSSHGDFETVMNLFHKMIKENVAPDLVTFLSVLTACNRKGMVDKGYEIFNMMIEVYNLEPSHEHYSCMVDMLGRAGRLKEAEELMSEVPGGPGESMLQSMLGSCRLHGNVKMGAKVAELAMEMKPELSGSYVQMYNIYAEKEEWDKAAEIRKAMRKKNVSKEAGFSWIDVGDTEGSLTMQGFSSGDKSHPKSDEIYRMVEIIGLEMNLEGKVAV

SEQ ID NO: 80294 - protein, 646 aa, Arabidopsis thaliana
  peptide (1)..(646): Ceres Seq. ID no. 12655216
  misc_feature (1)..(29): Pfam Name: PPR repeat Pfam Description: PPR repeat
  misc_feature (1)..(638): Homolog of NCBI NO: 34899332 NR Description: similar to selenium-binding protein [Oryza sativa
  misc_feature (1)..(632): Homolog of NCBI NO: 15226200 NR Description: putative selenium-binding protein; protein id:
  misc_feature (1)..(632): Homolog of NCBI NO: 15232006 NR Description: hypothetical protein; protein id: At3g09040.1 thaliana] >gi|5923669|gb|AAD56320.1|AC009326_7 hypothetical
  misc_feature (1)..(628): Homolog of NCBI NO: 15236324 NR Description: putative protein; protein id: At4g13650.1
  misc_feature (1)..(640): Homolog of NCBI NO: 38423978 NR Description: PPR-repeat protein-like [Oryza sativa (japonica
  misc_feature (1)..(632): Homolog of NCBI NO: 15235115 NR Description: putative protein; protein id: At4g39530.1
  misc_feature (1)..(644): Homolog of NCBI NO: 11357746 NR Description: hypothetical protein F2K15.30 - Arabidopsis >gi|6723387|emb|CAB66396.1| putative protein [Arabidopsis
  misc_feature (1)..(644): Homolog of NCBI NO: 30693150 NR Description: pentatricopeptide (PPR) repeat-containing protein
  misc_feature (1)..(633): Homolog of NCBI NO: 34915012 NR Description: P0458A05.10 [Oryza sativa (japonica
  misc_feature (1)..(632): Homolog of NCBI NO: 15220337 NR Description: hypothetical protein; protein id: At1g11290.1
MGMYRKAGRFDNALCIFENLVDPDVVSWNTILSGFDDNQIALNFVVRMKSAGVVFDAFTYSTALSFCVGSEGFLLGLQLQSTVVKTGLESDLVVGNSFITMYSRSGSFRGARRVFDEMSFKDMISWNSLLSGLSQEGTFGFEAVVIFRDMMREGVELDHVSFTSVITTCCHETDLKLARQIHGLCIKRGYESLLEVGNILMSRYSKCGVLEAVKSVFHQMSERNVVSWTTMISSNKDDAVSIFLNMRFDGVYPNEVTFVGLINAVKCNEQIKEGLKIHGLCIKTGFVSEPSVGNSFITLYAKFEALEDAKKAFEDITFREIISWNAMISGFAQNGFSHEALKMFLSAAAETMPNEYTFGSVLNAIAFAEDISVKQGQRCHAHLLKLGLNSCPVVSSALLDMYAKRGNIDESEKVFNEMSQKNQFVWTSIISAYSSHGDFETVMNLFHKMIKENVAPDLVTFLSVLTACNRKGMVDKGYEIFNMMIEVYNLEPSHEHYSCMVDMLGRAGRLKEAEELMSEVPGGPGESMLQSMLGSCRLHGNVKMGAKVAELAMEMKPELSGSYVQMYNIYAEKEEWDKAAEIRKAMRKKNVSKEAGFSWIDVGDTEGSLTMQGFSSGDKSHPKSDEIYRMVEIIGLEMNLEGKVAV

SEQ ID NO: 80295 - protein, 644 aa, Arabidopsis thaliana
  peptide (1)..(644): Ceres Seq. ID no. 12655217
  misc_feature (1)..(27): Pfam Name: PPR repeat Pfam Description: PPR repeat
  misc_feature (1)..(636): Homolog of NCBI NO: 34899332 NR Description: similar to selenium-binding protein [Oryza sativa
  misc_feature (1)..(630): Homolog of NCBI NO: 15226200 NR Description: putative selenium-binding protein; protein id:
  misc_feature (1)..(630): Homolog of NCBI NO: 15232006 NR Description: hypothetical protein; protein id: At3g09040.1 thaliana] >gi|5923669|gb|AAD56320.1|AC009326_7 hypothetical
  misc_feature (1)..(626): Homolog of NCBI NO: 15236324 NR Description: putative protein; protein id: At4g13650.1
  misc_feature (1)..(638): Homolog of NCBI NO: 38423978 NR Description: PPR-repeat protein-like [Oryza sativa (japonica
  misc_feature (1)..(630): Homolog of NCBI NO: 15235115 NR Description: putative protein; protein id: At4g39530.1
  misc_feature (1)..(642): Homolog of NCBI NO: 11357746 NR Description: hypothetical protein F2K15.30 - Arabidopsis >gi|6723387|emb|CAB66396.1| putative protein [Arabidopsis
  misc_feature (1)..(642): Homolog of NCBI NO: 30693150 NR Description: pentatricopeptide (PPR) repeat-containing protein
  misc_feature (1)..(631): Homolog of NCBI NO: 34915012 NR Description: P0458A05.10 [Oryza sativa (japonica
  misc_feature (1)..(630): Homolog of NCBI NO: 15220337 NR Description: hypothetical protein; protein id: At1g11290.1
MYRKAGRFDNALCIFENLVDPDVVSWNTILSGFDDNQIALNFVVRMKSAGVVFDAFTYSTALSFCVGSEGFLLGLQLQSTVVKTGLESDLVVGNSFITMYSRSGSFRGARRVFDEMSFKDMISWNSLLSGLSQEGTFGFEAVVIFRDMMREGVELDHVSFTSVITTCCHETDLKLARQIHGLCIKRGYESLLEVGNILMSRYSKCGVLEAVKSVFHQMSERNVVSWTTMISSNKDDAVSIFLNMRFDGVYPNEVTFVGLINAVKCNEQIKEGLKIHGLCIKTGFVSEPSVGNSFITLYAKFEALEDAKKAFEDITFREIISWNAMISGFAQNGFSHEALKMFLSAAAETMPNEYTFGSVLNAIAFAEDISVKQGQRCHAHLLKLGLNSCPVVSSALLDMYAKRGNIDESEKVFNEMSQKNQFVWTSIISAYSSHGDFETVMNLFHKMIKENVAPDLVTFLSVLTACNRKGMVDKGYEIFNMMIEVYNLEPSHEHYSCMVDMLGRAGRLKEAEELMSEVPGGPGESMLQSMLGSCRLHGNVKMGAKVAELAMEMKPELSGSYVQMYNIYAEKEEWDKAAEIRKAMRKKNVSKEAGFSWIDVGDTEGSLTMQGFSSGDKSHPKSDEIYRMVEIIGLEMNLEGKVAV

SEQ ID NO: 80296 - DNA, 2415 bp, Arabidopsis thaliana
  misc_feature (1)..(2415): Ceres Seq. ID no. 12655256
  misc_feature: MA Experiment ID: 20000227 Result: Up-regulated in Transcription
  misc_feature: MA Experiment 20000227 PARAMETER Experiment Name: At_Root-Tips-vs-Tops_P Parameter: Tissue Value: Root Tips vs. Root Tops
  misc_feature: MA Experiment ID: 20000234 Result: Up-regulated in Transcription
  misc_feature: MA Experiment 20000234 PARAMETER Experiment Name: At_Siliques_P Parameter: Age (day) Value: 21
  misc_feature: MA Experiment 20000234 PARAMETER Experiment Name: At_Siliques_P Parameter: Organism Value: A. thaliana
  misc_feature: MA Experiment 20000234 PARAMETER Experiment Name: At_Siliques_P Parameter: Plant Line Value: WS
  misc_feature: MA Experiment 20000234 PARAMETER Experiment Name: At_Siliques_P Parameter: Tissue Value: Less Than 5mm Siliques vs. Whole Plant
  misc_feature: MA Experiment ID: 20000235 Result: Up-regulated in Transcription
  misc_feature: MA Experiment 20000235 PARAMETER Experiment Name: At_Siliques_P Parameter: Age (day) Value: 21
  misc_feature: MA Experiment 20000235 PARAMETER Experiment Name: At_Siliques_P Parameter: Organism Value: A. thaliana
  misc_feature: MA Experiment 20000235 PARAMETER Experiment Name: At_Siliques_P Parameter: Plant Line Value: WS
  misc_feature: MA Experiment 20000235 PARAMETER Experiment Name: At_Siliques_P Parameter: Tissue Value: 5-10mm Siliques vs. Whole Plant
  misc_feature: MA Experiment ID: 20000264 Result: Up-regulated in Transcription
  misc_feature: MA Experiment 20000264 PARAMETER Experiment Name: At_Open_Flower_P Parameter: Age (day) Value: 21
  misc_feature: MA Experiment 20000264 PARAMETER Experiment Name: At_Open_Flower_P Parameter: Plant Line Value: WS
  misc_feature: MA Experiment 20000264 PARAMETER Experiment Name: At_Open_Flower_P Parameter: Tissue Value: Open Flower vs. Whole Plant
  misc_feature: MA Experiment ID: 20000265 Result: Up-regulated in Transcription
  misc_feature: MA Experiment 20000265 PARAMETER Experiment Name: At_Open_Flower_P Parameter: Age (day) Value: 21
  misc_feature: MA Experiment 20000265 PARAMETER Experiment Name: At_Open_Flower_P Parameter: Plant Line Value: WS
  misc_feature: MA Experiment 20000265 PARAMETER Experiment Name: At_Open_Flower_P Parameter: Tissue Value: Closed Flower vs. Whole Plant
  misc_feature: MA Experiment ID: 20000286 Result: Up-regulated in Transcription
  misc_feature: MA Experiment 20000286 PARAMETER Experiment Name: At_Open_Flower_P Parameter: Age (day) Value: 21
  misc_feature: MA Experiment 20000286 PARAMETER Experiment Name: At_Open_Flower_P Parameter: Plant Line Value: WS
  misc_feature: MA Experiment 20000286 PARAMETER Experiment Name: At_Open_Flower_P Parameter: Tissue Value: Half Open vs. Whole Plant
  misc_feature: MA Experiment ID: 20000438 Result: Up-regulated in Transcription
  misc_feature: MA Experiment 20000438 PARAMETER Experiment Name: At_Shoots__P Parameter: Age (day) Value: 14
  misc_feature: MA Experiment 20000438 PARAMETER Experiment Name: At_Shoots__P Parameter: Tissue Value: Shoots vs. Whole Plant
atgtcgctctctccttcttcctcgccggctccggcaacttccccgcctgccatgtcattacctccggcagattccgtacctgacacgtcatcacctccagctcctcctttgtctcctcttcccccaccattgagctctcctccgccgttgccttcaccaccgcctctctccgctcccaccgcttccccaccgcctcttccggttgaatccccaccgtctcctcctatagaatcaccaccgcctcctctactggaatcacctcctcctcctccgttggaatctccatctccaccgtctcctcacgtctcagctccttccggttcaccgccattacccttccttcccgccaaaccttctccgccgccttcttcacctccctccgagacagttccgccgggaaatacgatttctccaccacctcgttcacttccctccgaatcaaccccgccggtgaacacagcttctcctccaccgccatctcctcctcgccgccgtagtggccctaagccttcgtttcctcctcccatcaattcttctccaccaaatccttctccgaacactccgtcactcccagaaacttctcctccacctaaaccaccgctctcaacgacgccatttccctcctcatccactcccccgcctaagaagtcccctgcagcagtaactcttcctttctttgggccagcgggccaattaccggatgggaccgtagcacctcctattgggcctgttatagagcccaagacgagtccagccgaatcaatatctccgggaacgccacagccactggttccgaagagtctacctgtaacgacgtcgtatcaccgatcatccgccggattcttatttggcggtgtaatcgttggagctcttctactaattctgttaggtcttctctttgtcttctacagagctaccagaaatagaaataacaacagcagctctgctcatcatcaatccaaaactccctcaaaagttcaacatcatcggggcggtaatgctggtacgaaccaggcacatgttatcacaatgccaccaccaatccatgctaaatatatatctagtggaggttgtgatacgaaggagaacaattctgttgcgaaaaacatttcaatgccatctggaatgttctcctacgaagaactttcaaaagcaactggtggattttcagaggagaaccttttgggagaaggcggtttcggatatgttcacaaaggagtgttgaaaaacgggacagaagttgcggtgaagcagctgaagattgggagctatcaaggggaaagagaattccaagctgaggttgacacaatcagtagggttcatcataagcacctcgtttcattggttggttattgcgttaatggagataaaagactcttggtttacgagtttgttcctaaagataccttggagttccacttgcatgagaacagaggaagcgtgttggaatgggaaatgaggctcaggattgctgtaggagcagcaaaaggattagcttatcttcatgaggattgcagtccaactataattcaccgtgatatcaaagcagctaatatccttctagattccaaatttgaggcaaaggtctctgactttggactagccaagtttttctcagacaccaattcatcattcactcatatctctactcgagtggtaggaactttcggatacatggctccagaatacgcgtccagtggtaaagtaactgataaatcagatgtatattcctttggggtcgtgcttctagaactcatcactggacgtccatcaattttcgccaaagattcttccacaaaccagagtttagtagactgggcgaggccattgcttacgaaagcaatctctggagaaagttttgactttcttgtagactcaaggttggagaagaattacgatacaactcagatggcaaacatggctgcttgtgctgctgcttgcatacgccaatcagcttggcttcggcctagaatgagccaggtagtacgtgctcttgaaggcgaggtggccctgagaaaggtcgaagagactgggaatagcgtgacctatagctcttctgaaaacccgaatgacatcacaccacggtatggaacaaataagaggagattcgacacaggttcaagcgatggttacacttcagaatatggagttaacccttctcagtcgagcagtgaacatcaacaggtgaatacttagttcacaggttcaatagggcaagtttcaccacaattattgggttttcggatacagtcatcttgggttaacataaaatgttgtaagaaattagactacttcattcatttgtagttaaggggtccgaagaacactgcttgtgttttgttaaatgtataaattggttgtaatattggggcacaagtttaattatgttgcaaatactttgtttgcttctgatcg

SEQ ID NO: 80297 - protein, 731 aa, Arabidopsis thaliana
  peptide (1)..(731): Ceres Seq. ID no. 12655257
  misc_feature (2)..(273): Pfam Name: Formin Homology 2 Domain Pfam Description: Formin Homology 2 Domain
  misc_feature (45)..(731): Homolog of NCBI NO: 15230108 NR Description: protein kinase, putative; protein id: At3g24400.1
  misc_feature (345)..(727): Homolog of NCBI NO: 13877617 NR Description: protein kinase-like protein [Arabidopsis thaliana]
  misc_feature (18)..(160): Homolog of NCBI NO: 13877617 NR Description: protein kinase-like protein [Arabidopsis thaliana]
  misc_feature (156)..(243): Homolog of NCBI NO: 13877617 NR Description: protein kinase-like protein [Arabidopsis thaliana]
  misc_feature (345)..(727): Homolog of NCBI NO: 15230130 NR Description: protein kinase, putative; protein id: supported by cDNA: 17909., supported by cDNA: gi_13877616,
  misc_feature (18)..(160): Homolog of NCBI NO: 15230130 NR Description: protein kinase, putative; protein id: supported by cDNA: 17909., supported by cDNA: gi_13877616,
  misc_feature (156)..(221): Homolog of NCBI NO: 15230130 NR Description: protein kinase, putative; protein id: supported by cDNA: 17909., supported by cDNA: gi_13877616,
  misc_feature (6)..(714): Homolog of NCBI NO: 15222649 NR Description: Pto kinase interactor, putative; protein id: [Arabidopsis thaliana] >gi|25403034|pir||F86387 probable Pto
  misc_feature (5)..(725): Homolog of NCBI NO: 15221470 NR Description: protein kinase, putative; protein id: supported by cDNA: gi_21280864 [Arabidopsis thaliana]
  misc_feature (32)..(666): Homolog of NCBI NO: 15240947 NR Description: putative protein; protein id: At5g38560.1, by cDNA: gi_15983496, supported by cDNA: gi_18700152 [Arabidopsis >gi|10176824|dbj|BAB10146.1| contains similarity to protein
MSLSPSSSPAPATSPPAMSLPPADSVPDTSSPPAPPLSPLPPPLSSPPPLPSPPPLSAPTASPPPLPVESPPSPPIESPPPPLLESPPPPPLESPSPPSPHVSAPSGSPPLPFLPAKPSPPPSSPPSETVPPGNTISPPPRSLPSESTPPVNTASPPPPSPPRRRSGPKPSFPPPINSSPPNPSPNTPSLPETSPPPKPPLSTTPFPSSSTPPPKKSPAAVTLPFFGPAGQLPDGTVAPPIGPVIEPKTSPAESISPGTPQPLVPKSLPVTTSYHRSSAGFLFGGVIVGALLLILLGLLFVFYRATRNRNNNSSSAHHQSKTPSKVQHHRGGNAGTNQAHVITMPPPIHAKYISSGGCDTKENNSVAKNISMPSGMFSYEELSKATGGFSEENLLGEGGFGYVHKGVLKNGTEVAVKQLKIGSYQGEREFQAEVDTISRVHHKHLVSLVGYCVNGDKRLLVYEFVPKDTLEFHLHENRGSVLEWEMRLRIAVGAAKGLAYLHEDCSPTIIHRDIKAANILLDSKFEAKVSDFGLAKFFSDTNSSFTHISTRVVGTFGYMAPEYASSGKVTDKSDVYSFGVVLLELITGRPSIFAKDSSTNQSLVDWARPLLTKAISGESFDFLVDSRLEKNYDTTQMANMAACAAACIRQSAWLRPRMSQVVRALEGEVALRKVEETGNSVTYSSSENPNDITPRYGTNKRRFDTGSSDGYTSEYGVNPSQSSSEHQQVNT

SEQ ID NO: 80298 - protein, 714 aa, Arabidopsis thaliana
  peptide (1)..(714): Ceres Seq. ID no. 12655258
  misc_feature (1)..(256): Pfam Name: Formin Homology 2 Domain Pfam Description: Formin Homology 2 Domain
  misc_feature (28)..(714): Homolog of NCBI NO: 15230108 NR Description: protein kinase, putative; protein id: At3g24400.1
  misc_feature (328)..(710): Homolog of NCBI NO: 13877617 NR Description: protein kinase-like protein [Arabidopsis thaliana]
  misc_feature (1)..(143): Homolog of NCBI NO: 13877617 NR Description: protein kinase-like protein [Arabidopsis thaliana]
  misc_feature (139)..(226): Homolog of NCBI NO: 13877617 NR Description: protein kinase-like protein [Arabidopsis thaliana]
  misc_feature (328)..(710): Homolog of NCBI NO: 15230130 NR Description: protein kinase, putative; protein id: supported by cDNA: 17909., supported by cDNA: gi_13877616,
  misc_feature (1)..(143): Homolog of NCBI NO: 15230130 NR Description: protein kinase, putative; protein id: supported by cDNA: 17909., supported by cDNA: gi_13877616,
  misc_feature (139)..(204): Homolog of NCBI NO: 15230130 NR Description: protein kinase, putative; protein id: supported by cDNA: 17909., supported by cDNA: gi_13877616,
  misc_feature (1)..(697): Homolog of NCBI NO: 15222649 NR Description: Pto kinase interactor, putative; protein id: [Arabidopsis thaliana] >gi|25403034|pir||F86387 probable Pto
  misc_feature (1)..(708): Homolog of NCBI NO: 15221470 NR Description: protein kinase, putative; protein id: supported by cDNA: gi_21280864 [Arabidopsis thaliana]
  misc_feature (15)..(649): Homolog of NCBI NO: 15240947 NR Description: putative protein; protein id: At5g38560.1, by cDNA: gi_15983496, supported by cDNA: gi_18700152 [Arabidopsis >gi|10176824|dbj|BAB10146.1| contains similarity to protein
MSLPPADSVPDTSSPPAPPLSPLPPPLSSPPPLPSPPPLSAPTASPPPLPVESPPSPPIESPPPPLLESPPPPPLESPSPPSPHVSAPSGSPPLPFLPAKPSPPPSSPPSETVPPGNTISPPPRSLPSESTPPVNTASPPPPSPPRRRSGPKPSFPPPINSSPPNPSPNTPSLPETSPPPKPPLSTTPFPSSSTPPPKKSPAAVTLPFFGPAGQLPDGTVAPPIGPVIEPKTSPAESISPGTPQPLVPKSLPVTTSYHRSSAGFLFGGVIVGALLLILLGLLFVFYRATRNRNNNSSSAHHQSKTPSKVQHHRGGNAGTNQAHVITMPPPIHAKYISSGGCDTKENNSVAKNISMPSGMFSYEELSKATGGFSEENLLGEGGFGYVHKGVLKNGTEVAVKQLKIGSYQGEREFQAEVDTISRVHHKHLVSLVGYCVNGDKRLLVYEFVPKDTLEFHLHENRGSVLEWEMRLRIAVGAAKGLAYLHEDCSPTIIHRDIKAANILLDSKFEAKVSDFGLAKFFSDTNSSFTHISTRVVGTFGYMAPEYASSGKVTDKSDVYSFGVVLLELITGRPSIFAKDSSTNQSLVDWARPLLTKAISGESFDFLVDSRLEKNYDTTQMANMAACAAACIRQSAWLRPRMSQVVRALEGEVALRKVEETGNSVTYSSSENPNDITPRYGTNKRRFDTGSSDGYTSEYGVNPSQSSSEHQQVNT

SEQ ID NO: 80299 - protein, 388 aa, Arabidopsis thaliana
  peptide (1)..(388): Ceres Seq. ID no. 12655259
  misc_feature (1)..(388): Homolog of NCBI NO: 15230108 NR Description: protein kinase, putative; protein id: At3g24400.1
  misc_feature (2)..(384): Homolog of NCBI NO: 13877617 NR Description: protein kinase-like protein [Arabidopsis thaliana]
  misc_feature (2)..(384): Homolog of NCBI NO: 15230130 NR Description: protein kinase, putative; protein id: supported by cDNA: 17909., supported by cDNA: gi_13877616,
  misc_feature (1)..(371): Homolog of NCBI NO: 15222649 NR Description: Pto kinase interactor, putative; protein id: [Arabidopsis thaliana] >gi|25403034|pir||F86387 probable Pto
  misc_feature (1)..(382): Homolog of NCBI NO: 15221470 NR Description: protein kinase, putative; protein id: supported by cDNA: gi_21280864 [Arabidopsis thaliana]
  misc_feature (1)..(323): Homolog of NCBI NO: 15240947 NR Description: putative protein; protein id: At5g38560.1, by cDNA: gi_15983496, supported by cDNA: gi_18700152 [Arabidopsis >gi|10176824|dbj|BAB10146.1| contains similarity to protein
  misc_feature (2)..(384): Homolog of NCBI NO: 13447449 NR Description: receptor protein kinase PERK1 [Brassica napus]
  misc_feature (1)..(381): Homolog of NCBI NO: 15240947 NR Description: putative protein; protein id: At5g38560.1, by cDNA: gi_15983496, supported by cDNA: gi_18700152 [Arabidopsis >gi|10176824|dbj|BAB10146.1| contains similarity to protein
  misc_feature (1)..(381): Homolog of NCBI NO: 15223161 NR Description: putative protein kinase; protein id: At1g70460.1
  misc_feature (12)..(360): Homolog of NCBI NO: 34904234 NR Description: putative receptor protein kinase PERK1 [Oryza
MPPPIHAKYISSGGCDTKENNSVAKNISMPSGMFSYEELSKATGGFSEENLLGEGGFGYVHKGVLKNGTEVAVKQLKIGSYQGEREFQAEVDTISRVHHKHLVSLVGYCVNGDKRLLVYEFVPKDTLEFHLHENRGSVLEWEMRLRIAVGAAKGLAYLHEDCSPTIIHRDIKAANILLDSKFEAKVSDFGLAKFFSDTNSSFTHISTRVVGTFGYMAPEYASSGKVTDKSDVYSFGVVLLELITGRPSIFAKDSSTNQSLVDWARPLLTKAISGESFDFLVDSRLEKNYDTTQMANMAACAAACIRQSAWLRPRMSQVVRALEGEVALRKVEETGNSVTYSSSENPNDITPRYGTNKRRFDTGSSDGYTSEYGVNPSQSSSEHQQVNT

SEQ ID NO: 80300 - DNA, 1035 bp, Arabidopsis thaliana
  misc_feature (1)..(1035): Ceres Seq. ID no. 12655301
  misc_feature: MA Experiment ID: 20000307 Result: Up-regulated in Transcription
  misc_feature: MA Experiment 20000307 PARAMETER Experiment Name: At_Germinating_Seeds_Sub_P Parameter: Age (hr) Value: 24 vs. 0
  misc_feature: MA Experiment 20000307 PARAMETER Experiment Name: At_Germinating_Seeds_Sub_P Parameter: Organism Value: A. thaliana
  misc_feature: MA Experiment 20000307 PARAMETER Experiment Name: At_Germinating_Seeds_Sub_P Parameter: Plant Line Value: WS
  misc_feature: MA Experiment 20000307 PARAMETER Experiment Name: At_Germinating_Seeds_Sub_P Parameter: Tissue Value: Germinating Seeds
  misc_feature: MA Experiment ID: 20000328 Result: Up-regulated in Transcription
  misc_feature: MA Experiment 20000328 PARAMETER Experiment Name: At_42deg_Heat_Sub_P Parameter: Age (day) Value: 14
  misc_feature: MA Experiment 20000328 PARAMETER Experiment Name: At_42deg_Heat_Sub_P Parameter: Organism Value: A. thaliana
  misc_feature: MA Experiment 20000328 PARAMETER Experiment Name: At_42deg_Heat_Sub_P Parameter: Plant Line Value: WS
  misc_feature: MA Experiment 20000328 PARAMETER Experiment Name: At_42deg_Heat_Sub_P Parameter: Temperature (deg C) Value: 42 vs. 22
  misc_feature: MA Experiment 20000328 PARAMETER Experiment Name: At_42deg_Heat_Sub_P Parameter: Timepoint (hr) Value: 6
  misc_feature: MA Experiment 20000328 PARAMETER Experiment Name: At_42deg_Heat_Sub_P Parameter: Tissue Value: Aerial
  misc_feature: MA Experiment ID: 20000355 Result: Down-regulated in Transcription
  misc_feature: MA Experiment 20000355 PARAMETER Experiment Name: At_Siliques_Sub_P Parameter: Age (day) Value: 21
  misc_feature: MA Experiment 20000355 PARAMETER Experiment Name: At_Siliques_Sub_P Parameter: Organism Value: A. thaliana
  misc_feature: MA Experiment 20000355 PARAMETER Experiment Name: At_Siliques_Sub_P Parameter: Plant Line Value: WS
  misc_feature: MA Experiment 20000355 PARAMETER Experiment Name: At_Siliques_Sub_P Parameter: Tissue Value: Less Than 5mm Siliques vs. Whole Plant
atggcgtcgatccttatctccggagctgccggagtctcgattcctctagttggaaccctacttccgttaaacggtggcttaatgaggggagccaaagcgttcgcagcaggagttatcctcgcaacagggttcgttcacatgctctcgggcggatccaaagctttgtccgacccatgtctgccggagtttccatggaaaatgttcccttttccagaattcttcgccatggtcgcggcgcttcttactctgctcgcggatttcatgatcacgggatactacgagaggaaacaggagaagatgatgaaccagtccgtcgagtcgcttggtacgcaagtttcggttatgtctgacccaggtcttgaatcgggttttctgagagatcaagaagatggaggggcgttgcatatcgtggggatgcgggctcacgcggagcatcaccgtcatagcctctccatgggtgccgaaggttttgaggctctctctaagagaagtggtgtttccggtcatggacacggccacagccacggccacggggacgtaggcttggacagtggtgtgaggcacgttgttgtttctcagatacttgaaatgggaatagtgtcacattcaataatcataggaatatcgcttggagtatcacatagcccatgcaccatacgtcctctccttctcgctctttccttccaccaattcttcgaaggttttgccctcggtggctgcgtcgcagaggccagactaaccccgcgtggatctgccatgatggctttcttcttcgccatcactactccgatcggtgtagcggtgggaacggccattgcctcatcttacaactcttatagcgttgcagcattggtggctgaaggagtgctcgattctctctctgcggggatacttgtgtacatggcgcttgtggatttgatcgctgcggatttcttgagcaagaagatgagtgttgatttcagagttcaagttgtttcttattgctttttgtttcttggagctgggatgatgtctgctcttgcaatttgggcttga

SEQ ID NO: 80301 - protein, 344 aa, Arabidopsis thaliana
  peptide (1)..(344): Ceres Seq. ID no. 12655302
  misc_feature (1)..(341): Pfam Name: ZIP Zinc transporter Pfam Description: ZIP Zinc transporter
  misc_feature (1)..(344): Homolog of NCBI NO: 15234037 NR Description: putative protein; protein id: At4g33020.1
  misc_feature (1)..(344): Homolog of NCBI NO: 18406954 NR Description: putative iron-regulated transporter; protein id: supported by cDNA: 15980. [Arabidopsis thaliana]
  misc_feature (1)..(344): Homolog of NCBI NO: 21553732 NR Description: putative iron-regulated transporter [Arabidopsis
  misc_feature (1)..(344): Homolog of NCBI NO: 30682009 NR Description: metal transporter, putative (ZIP4) [Arabidopsis
  misc_feature (1)..(343): Homolog of NCBI NO: 12006859 NR Description: putative Zn transporter ZNT4 [Thlaspi
  misc_feature (1)..(343): Homolog of NCBI NO: 14582257 NR Description: ZIP-like zinc transporter [Thlaspi caerulescens]
  misc_feature (1)..(344): Homolog of NCBI NO: 7381054 NR Description: Zn and Cd transporter ZNT1 [Thlaspi caerulescens]
  misc_feature (1)..(344): Homolog of NCBI NO: 14582255 NR Description: ZIP-like zinc transporter [Thlaspi caerulescens]
  misc_feature (1)..(309): Homolog of NCBI NO: 28070974 NR Description: putative Zn transporter [Thlaspi caerulescens]
  misc_feature (1)..(344): Homolog of NCBI NO: 30526082 NR Description: putative ZIP-like zinc transporter [Oryza sativa
MASILISGAAGVSIPLVGTLLPLNGGLMRGAKAFAAGVILATGFVHMLSGGSKALSDPCLPEFPWKMFPFPEFFAMVAALLTLLADFMITGYYERKQEKMMNQSVESLGTQVSVMSDPGLESGFLRDQEDGGALHIVGMRAHAEHHRHSLSMGAEGFEALSKRSGVSGHGHGHSHGHGDVGLDSGVRHVVVSQILEMGIVSHSIIIGISLGVSHSPCTIRPLLLALSFHQFFEGFALGGCVAEARLTPRGSAMMAFFFAITTPIGVAVGTAIASSYNSYSVAALVAEGVLDSLSAGILVYMALVDLIAADFLSKKMSVDFRVQVVSYCFLFLGAGMMSALAIWA

SEQ ID NO: 80302 - protein, 317 aa, Arabidopsis thaliana
  peptide (1)..(317): Ceres Seq. ID no. 12655303
  misc_feature (1)..(314): Pfam Name: ZIP Zinc transporter Pfam Description: ZIP Zinc transporter
  misc_feature (1)..(317): Homolog of NCBI NO: 15234037 NR Description: putative protein; protein id: At4g33020.1
  misc_feature (1)..(317): Homolog of NCBI NO: 18406954 NR Description: putative iron-regulated transporter; protein id: supported by cDNA: 15980. [Arabidopsis thaliana]
  misc_feature (1)..(317): Homolog of NCBI NO: 21553732 NR Description: putative iron-regulated transporter [Arabidopsis
  misc_feature (1)..(317): Homolog of NCBI NO: 30682009 NR Description: metal transporter, putative (ZIP4) [Arabidopsis
  misc_feature (1)..(316): Homolog of NCBI NO: 12006859 NR Description: putative Zn transporter ZNT4 [Thlaspi
  misc_feature (1)..(316): Homolog of NCBI NO: 14582257 NR Description: ZIP-like zinc transporter [Thlaspi caerulescens]
  misc_feature (1)..(317): Homolog of NCBI NO: 7381054 NR Description: Zn and Cd transporter ZNT1 [Thlaspi caerulescens]
  misc_feature (1)..(317): Homolog of NCBI NO: 14582255 NR Description: ZIP-like zinc transporter [Thlaspi caerulescens]
  misc_feature (1)..(282): Homolog of NCBI NO: 28070974 NR Description: putative Zn transporter [Thlaspi caerulescens]
  misc_feature (1)..(317): Homolog of NCBI NO: 30526082 NR Description: putative ZIP-like zinc transporter [Oryza sativa
MRGAKAFAAGVILATGFVHMLSGGSKALSDPCLPEFPWKMFPFPEFFAMVAALLTLLADFMITGYYERKQEKMMNQSVESLGTQVSVMSDPGLESGFLRDQEDGGALHIVGMRAHAEHHRHSLSMGAEGFEALSKRSGVSGHGHGHSHGHGDVGLDSGVRHVVVSQILEMGIVSHSIIIGISLGVSHSPCTIRPLLLALSFHQFFEGFALGGCVAEARLTPRGSAMMAFFFAITTPIGVAVGTAIASSYNSYSVAALVAEGVLDSLSAGILVYMALVDLIAADFLSKKMSVDFRVQVVSYCFLFLGAGMMSALAIWA

SEQ ID NO: 80303 - protein, 298 aa, Arabidopsis thaliana
  peptide (1)..(298): Ceres Seq. ID no. 12655304
  misc_feature (1)..(295): Pfam Name: ZIP Zinc transporter Pfam Description: ZIP Zinc transporter
  misc_feature (1)..(298): Homolog of NCBI NO: 15234037 NR Description: putative protein; protein id: At4g33020.1
  misc_feature (1)..(298): Homolog of NCBI NO: 18406954 NR Description: putative iron-regulated transporter; protein id: supported by cDNA: 15980. [Arabidopsis thaliana]
  misc_feature (1)..(298): Homolog of NCBI NO: 21553732 NR Description: putative iron-regulated transporter [Arabidopsis
  misc_feature (1)..(298): Homolog of NCBI NO: 30682009 NR Description: metal transporter, putative (ZIP4) [Arabidopsis
  misc_feature (1)..(297): Homolog of NCBI NO: 12006859 NR Description: putative Zn transporter ZNT4 [Thlaspi
  misc_feature (1)..(297): Homolog of NCBI NO: 14582257 NR Description: ZIP-like zinc transporter [Thlaspi caerulescens]
  misc_feature (1)..(298): Homolog of NCBI NO: 7381054 NR Description: Zn and Cd transporter ZNT1 [Thlaspi caerulescens]
  misc_feature (1)..(298): Homolog of NCBI NO: 14582255 NR Description: ZIP-like zinc transporter [Thlaspi caerulescens]
  misc_feature (1)..(263): Homolog of NCBI NO: 28070974 NR Description: putative Zn transporter [Thlaspi caerulescens]
  misc_feature (1)..(298): Homolog of NCBI NO: 30526082 NR Description: putative ZIP-like zinc transporter [Oryza sativa
MLSGGSKALSDPCLPEFPWKMFPFPEFFAMVAALLTLLADFMITGYYERKQEKMMNQSVESLGTQVSVMSDPGLESGFLRDQEDGGALHIVGMRAHAEHHRHSLSMGAEGFEALSKRSGVSGHGHGHSHGHGDVGLDSGVRHVVVSQILEMGIVSHSIIIGISLGVSHSPCTIRPLLLALSFHQFFEGFALGGCVAEARLTPRGSAMMAFFFAITTPIGVAVGTAIASSYNSYSVAALVAEGVLDSLSAGILVYMALVDLIAADFLSKKMSVDFRVQVVSYCFLFLGAGMMSALAIWA

SEQ ID NO: 80304 - DNA, 2073 bp, Arabidopsis thaliana
  misc_feature (1)..(2073): Ceres Seq. ID no. 12655309
  misc_feature: MA Experiment ID: 20000306 Result: Down-regulated in Transcription
  misc_feature: MA Experiment 20000306 PARAMETER Experiment Name: At_Germinating_Seeds_Sub_P Parameter: Age (hr) Value: 6 vs. 0
  misc_feature: MA Experiment 20000306 PARAMETER Experiment Name: At_Germinating_Seeds_Sub_P Parameter: Organism Value: A. thaliana
  misc_feature: MA Experiment 20000306 PARAMETER Experiment Name: At_Germinating_Seeds_Sub_P Parameter: Plant Line Value: WS
  misc_feature: MA Experiment 20000306 PARAMETER Experiment Name: At_Germinating_Seeds_Sub_P Parameter: Tissue Value: Germinating Seeds
  misc_feature: MA Experiment ID: 20000307 Result: Down-regulated in Transcription
  misc_feature: MA Experiment 20000307 PARAMETER Experiment Name: At_Germinating_Seeds_Sub_P Parameter: Age (hr) Value: 24 vs. 0
  misc_feature: MA Experiment 20000307 PARAMETER Experiment Name: At_Germinating_Seeds_Sub_P Parameter: Organism Value: A. thaliana
  misc_feature: MA Experiment 20000307 PARAMETER Experiment Name: At_Germinating_Seeds_Sub_P Parameter: Plant Line Value: WS
  misc_feature: MA Experiment 20000307 PARAMETER Experiment Name: At_Germinating_Seeds_Sub_P Parameter: Tissue Value: Germinating Seeds
  misc_feature: MA Experiment ID: 20000314 Result: Up-regulated in Transcription
  misc_feature: MA Experiment 20000314 PARAMETER Experiment Name: At_14day_Shoots-Roots_Sub_P Parameter: Age (day) Value: 14
  misc_feature: MA Experiment 20000314 PARAMETER Experiment Name: At_14day_Shoots-Roots_Sub_P Parameter: Organism Value: A. thaliana
  misc_feature: MA Experiment 20000314 PARAMETER Experiment Name: At_14day_Shoots-Roots_Sub_P Parameter: Plant Line Value: WS
  misc_feature: MA Experiment 20000314 PARAMETER Experiment Name: At_14day_Shoots-Roots_Sub_P Parameter: Tissue Value: Roots vs. Whole Plant
  misc_feature: MA Experiment ID: 20000328 Result: Up-regulated in Transcription
  misc_feature: MA Experiment 20000328 PARAMETER Experiment Name: At_42deg_Heat_Sub_P Parameter: Age (day) Value: 14
  misc_feature: MA Experiment 20000328 PARAMETER Experiment Name: At_42deg_Heat_Sub_P Parameter: Organism Value: A. thaliana
  misc_feature: MA Experiment 20000328 PARAMETER Experiment Name: At_42deg_Heat_Sub_P Parameter: Plant Line Value: WS
  misc_feature: MA Experiment 20000328 PARAMETER Experiment Name: At_42deg_Heat_Sub_P Parameter: Temperature (deg C) Value: 42 vs. 22
  misc_feature: MA Experiment 20000328 PARAMETER Experiment Name: At_42deg_Heat_Sub_P Parameter: Timepoint (hr) Value: 6
  misc_feature: MA Experiment 20000328 PARAMETER Experiment Name: At_42deg_Heat_Sub_P Parameter: Tissue Value: Aerial
  misc_feature: MA Experiment ID: 20000329 Result: Up-regulated in Transcription
  misc_feature: MA Experiment 20000329 PARAMETER Experiment Name: At_4deg_Cold_Sub_P Parameter: Age (day) Value: 14
  misc_feature: MA Experiment 20000329 PARAMETER Experiment Name: At_4deg_Cold_Sub_P Parameter: Organism Value: A. thaliana
  misc_feature: MA Experiment 20000329 PARAMETER Experiment Name: At_4deg_Cold_Sub_P Parameter: Plant Line Value: WS
  misc_feature: MA Experiment 20000329 PARAMETER Experiment Name: At_4deg_Cold_Sub_P Parameter: Temperature (deg C) Value: 4 vs. 22
  misc_feature: MA Experiment 20000329 PARAMETER Experiment Name: At_4deg_Cold_Sub_P Parameter: Timepoint (hr) Value: 6
  misc_feature: MA Experiment 20000329 PARAMETER Experiment Name: At_4deg_Cold_Sub_P Parameter: Tissue Value: Aerial
  misc_feature: MA Experiment ID: 20000352 Result: Up-regulated in Transcription
  misc_feature: MA Experiment 20000352 PARAMETER Experiment Name: At_Drought_Sub_P Parameter: Age (day) Value: 7
  misc_feature: MA Experiment 20000352 PARAMETER Experiment Name: At_Drought_Sub_P Parameter: Organism Value: A. thaliana
  misc_feature: MA Experiment 20000352 PARAMETER Experiment Name: At_Drought_Sub_P Parameter: Plant Line Value: WS
  misc_feature: MA Experiment 20000352 PARAMETER Experiment Name: At_Drought_Sub_P Parameter: Timepoint (hr) Value: 6
  misc_feature: MA Experiment 20000352 PARAMETER Experiment Name: At_Drought_Sub_P Parameter: Tissue Value: Whole Plant
  misc_feature: MA Experiment 20000352 PARAMETER Experiment Name: At_Drought_Sub_P Parameter: Treatment Value: Drought vs. No Drought
  misc_feature: MA Experiment ID: 20000634 Result: Down-regulated in Transcription
  misc_feature: MA Experiment 20000634 PARAMETER Experiment Name: At_10percent_PEG_Sub_P Parameter: Age (day) Value: 12
  misc_feature: MA Experiment 20000634 PARAMETER Experiment Name: At_10percent_PEG_Sub_P Parameter: Organism Value: A. thaliana
  misc_feature: MA Experiment 20000634 PARAMETER Experiment Name: At_10percent_PEG_Sub_P Parameter: Plant Line Value: WS
  misc_feature: MA Experiment 20000634 PARAMETER Experiment Name: At_10percent_PEG_Sub_P Parameter: Timepoint (day) Value: 12
  misc_feature: MA Experiment 20000634 PARAMETER Experiment Name: At_10percent_PEG_Sub_P Parameter: Tissue Value: Whole Plant
  misc_feature: MA Experiment 20000634 PARAMETER Experiment Name: At_10percent_PEG_Sub_P Parameter: Treatment Value: 10% PEG vs. No Treatment
atcccaaaaataaaaagagtatatctctcacacacatacacaaacttgacagttttttaatttctctgttagtgaactcaaaccttcccatttccatggacaccaaaatcggatcgatcgatgattgcaagccgacgaacggcgacgtctgtagtccaacaaacggcaccgtcgcaacaatccacaactctgttccttcctccgctatcaccatcaactactgcgacgcgactctcggccgtcacttagctcgtcgtctcgtccaagccggcgttacggatgttttctctgttcccggagatttcaacctcactttgcttgatcacctcatggctgagccggacctcaacctaatcggatgttgtaacgagctaaacgccggttacgctgccgacggttacgctagatctcgtggagtcggcgcttgcgttgttaccttcaccgttggtggactcagcgttttaaacgcgatcgctggtgcttacagcgagaatcttcctcttatctgtatcgtcggaggtcctaactctaacgattatggcactaaccggattcttcatcacaccattggattacctgattttagccaagagcttaggtgcttccaaacggtgacttgttatcaggcggtggtgaacaatttagatgatgctcatgaacagattgataaagcaatatcaacagctttgaaagagagcaagcctgtgtatataagtgtaagctgtaacttagcagcgattcctcatcatacatttagccgtgatcctgtccctttttctctagctccaagattgagcaacaagatgggtttagaagctgcggtggaagcaacattggagtttctgaataaggctgtgaagccagttatggttggtggtcctaagttgcgtgtggctaaagcttgtgatgcctttgttgagctagctgatgcttcaggctatgctttggcgatgatgccttctgcgaaaggctttgtaccagagcaccatcctcatttcattggaacttattggggagcagtgagcactcctttttgctctgagattgtggaatctgcggatgcttacatttttgcaggtccaatcttcaacgactatagctctgttggttactcgcttctcctcaagaaagaaaaagccatcgttgtgcaacctgatcgtatcactgtggccaatggtcctacttttggttgcattttgatgagcgatttcttcagggaattgtctaagagggtgaagcgtaacgagactgcatatgagaactaccataggatctttgtccctgaaggtaagccattgaagtgtgaatcaagagagccattgagagttaacacaatgttccagcacattcagaagatgctctctagtgaaaccgctgtgattgctgaaaccggtgattcttggttcaattgccaaaaactaaagctgccaaaaggatgtgggtacgagtttcagatgcagtatggatcgattgggtggtctgttggtgcaactctaggatacgcacaggcatcaccagagaagcgagtgttggcattcatcggtgatgggagtttccaagtcacggttcaggacatatcaacaatgctgcgtaatggacagaagacgatcatcttcttgattaacaatggtggctacaccattgaagtagagattcatgacggtccttataacgtgattaagaactggaactacactggtctcgttgacgccattcataacggtgaaggcaattgctggactgcaaaggtgagatacgaagaggagttagtggaggcgattacgacagcgacgacggagaagaaagattgtctatgtttcatagaagtgattcttcacaaggatgatacgagcaaagagttgcttgagtggggctcacgcgtctctgctgctaacagccgtcctcccaatcctcagtagaagaagcaacacagaatcttcaatgcttcttaccaatttagtgacattttctgataagtgttgatttttcgaccgttgggtttaatcatgtttcaaacttattagtatctctttccatgtacgctttatcatggaataaagtaaagctcctttt

SEQ ID NO: 80305 - protein, 638 aa, Arabidopsis thaliana
  peptide (1)..(638): Ceres Seq. ID no. 12655310
  misc_feature (32)..(638): Homolog of NCBI NO: 15240950 NR Description: pyruvate decarboxylase-like protein; protein id:
  misc_feature (75)..(638): Homolog of NCBI NO: 28393679 NR Description: putative pyruvate decarboxylase [Arabidopsis
  misc_feature (32)..(638): Homolog of NCBI NO: 29373077 NR Description: pyruvate decarboxylase 1 [Lotus corniculatus]
  misc_feature (48)..(638): Homolog of NCBI NO: 15240952 NR Description: pyruvate decarboxylase-like protein; protein id:
  misc_feature (32)..(638): Homolog of NCBI NO: 10121330 NR Description: pyruvate decarboxylase [Fragaria x ananassa]
  misc_feature (32)..(638): Homolog of NCBI NO: 17225598 NR Description: pyruvate decarboxylase [Fragaria x ananassa]
  misc_feature (32)..(638): Homolog of NCBI NO: 15240423 NR Description: pyruvate decarboxylase (gb|AAB16855.1); protein At5g54960.1 [Arabidopsis thaliana] >gi|9758276|dbj|BAB08775.1|
  misc_feature (43)..(638): Homolog of NCBI NO: 24745919 NR Description: pyruvate decarboxylase [Solanum tuberosum]
  misc_feature (77)..(601): Homolog of NCBI NO: 11268382 NR Description: probable pyruvate decarboxylase (EC 4.1.1.1) - yeast (Schizosaccharomyces pombe) >gi|1749736|dbj|BAA13925.1|
  misc_feature (79)..(244): Homolog of NCBI NO: 6320588 NR Description: Aro10p [Saccharomyces cerevisiae]
PKNKKSISLTHIHKLDSFLISLLVNSNLPISMDTKIGSIDDCKPTNGDVCSPTNGTVATIHNSVPSSAITINYCDATLGRHLARRLVQAGVTDVFSVPGDFNLTLLDHLMAEPDLNLIGCCNELNAGYAADGYARSRGVGACVVTFTVGGLSVLNAIAGAYSENLPLICIVGGPNSNDYGTNRILHHTIGLPDFSQELRCFQTVTCYQAVVNNLDDAHEQIDKAISTALKESKPVYISVSCNLAAIPHHTFSRDPVPFSLAPRLSNKMGLEAAVEATLEFLNKAVKPVMVGGPKLRVAKACDAFVELADASGYALAMMPSAKGFVPEHHPHFIGTYWGAVSTPFCSEIVESADAYIFAGPIFNDYSSVGYSLLLKKEKAIVVQPDRITVANGPTFGCILMSDFFRELSKRVKRNETAYENYHRIFVPEGKPLKCESREPLRVNTMFQHIQKMLSSETAVIAETGDSWFNCQKLKLPKGCGYEFQMQYGSIGWSVGATLGYAQASPEKRVLAFIGDGSFQVTVQDISTMLRNGQKTIIFLINNGGYTIEVEIHDGPYNVIKNWNYTGLVDAIHNGEGNCWTAKVRYEEELVEAITTATTEKKDCLCFIEVILHKDDTSKELLEWGSRVSAANSRPPNPQ

SEQ ID NO: 80306 - protein, 607 aa, Arabidopsis thaliana
  peptide (1)..(607): Ceres Seq. ID no. 12655311
  misc_feature (1)..(607): Homolog of NCBI NO: 15240950 NR Description: pyruvate decarboxylase-like protein; protein id:
  misc_feature (44)..(607): Homolog of NCBI NO: 28393679 NR Description: putative pyruvate decarboxylase [Arabidopsis
  misc_feature (1)..(607): Homolog of NCBI NO: 29373077 NR Description: pyruvate decarboxylase 1 [Lotus corniculatus]
  misc_feature (17)..(607): Homolog of NCBI NO: 15240952 NR Description: pyruvate decarboxylase-like protein; protein id:
  misc_feature (1)..(607): Homolog of NCBI NO: 10121330 NR Description: pyruvate decarboxylase [Fragaria x ananassa]
  misc_feature (1)..(607): Homolog of NCBI NO: 17225598 NR Description: pyruvate decarboxylase [Fragaria x ananassa]
  misc_feature (1)..(607): Homolog of NCBI NO: 15240423 NR Description: pyruvate decarboxylase (gb|AAB16855.1); protein At5g54960.1 [Arabidopsis thaliana] >gi|9758276|dbj|BAB08775.1|
  misc_feature (12)..(607): Homolog of NCBI NO: 24745919 NR Description: pyruvate decarboxylase [Solanum tuberosum]
  misc_feature (46)..(570): Homolog of NCBI NO: 11268382 NR Description: probable pyruvate decarboxylase (EC 4.1.1.1) - yeast (Schizosaccharomyces pombe) >gi|1749736|dbj|BAA13925.1|
  misc_feature (48)..(213): Homolog of NCBI NO: 6320588 NR Description: Aro10p [Saccharomyces cerevisiae]
MDTKIGSIDDCKPTNGDVCSPTNGTVATIHNSVPSSAITINYCDATLGRHLARRLVQAGVTDVFSVPGDFNLTLLDHLMAEPDLNLIGCCNELNAGYAADGYARSRGVGACVVTFTVGGLSVLNAIAGAYSENLPLICIVGGPNSNDYGTNRILHHTIGLPDFSQELRCFQTVTCYQAVVNNLDDAHEQIDKAISTALKESKPVYISVSCNLAAIPHHTFSRDPVPFSLAPRLSNKMGLEAAVEATLEFLNKAVKPVMVGGPKLRVAKACDAFVELADASGYALAMMPSAKGFVPEHHPHFIGTYWGAVSTPFCSEIVESADAYIFAGPIFNDYSSVGYSLLLKKEKAIVVQPDRITVANGPTFGCILMSDFFRELSKRVKRNETAYENYHRIFVPEGKPLKCESREPLRVNTMFQHIQKMLSSETAVIAETGDSWFNCQKLKLPKGCGYEFQMQYGSIGWSVGATLGYAQASPEKRVLAFIGDGSFQVTVQDISTMLRNGQKTIIFLINNGGYTIEVEIHDGPYNVIKNWNYTGLVDAIHNGEGNCWTAKVRYEEELVEAITTATTEKKDCLCFIEVILHKDDTSKELLEWGSRVSAANSRPPNPQ

SEQ ID NO: 80307 - protein, 529 aa, Arabidopsis thaliana
  peptide (1)..(529): Ceres Seq. ID no. 12655312
  misc_feature (1)..(529): Homolog of NCBI NO: 15240950 NR Description: pyruvate decarboxylase-like protein; protein id:
  misc_feature (1)..(529): Homolog of NCBI NO: 28393679 NR Description: putative pyruvate decarboxylase [Arabidopsis
  misc_feature (1)..(529): Homolog of NCBI NO: 29373077 NR Description: pyruvate decarboxylase 1 [Lotus corniculatus]
  misc_feature (1)..(529): Homolog of NCBI NO: 15240952 NR Description: pyruvate decarboxylase-like protein; protein id:
  misc_feature (1)..(529): Homolog of NCBI NO: 10121330 NR Description: pyruvate decarboxylase [Fragaria x ananassa]
  misc_feature (1)..(529): Homolog of NCBI NO: 17225598 NR Description: pyruvate decarboxylase [Fragaria x ananassa]
  misc_feature (1)..(529): Homolog of NCBI NO: 15240423 NR Description: pyruvate decarboxylase (gb|AAB16855.1); protein At5g54960.1 [Arabidopsis thaliana] >gi|9758276|dbj|BAB08775.1|
  misc_feature (1)..(529): Homolog of NCBI NO: 24745919 NR Description: pyruvate decarboxylase [Solanum tuberosum]
  misc_feature (1)..(492): Homolog of NCBI NO: 11268382 NR Description: probable pyruvate decarboxylase (EC 4.1.1.1) - yeast (Schizosaccharomyces pombe) >gi|1749736|dbj|BAA13925.1|
  misc_feature (1)..(135): Homolog of NCBI NO: 6320588 NR Description: Aro10p [Saccharomyces cerevisiae]
MAEPDLNLIGCCNELNAGYAADGYARSRGVGACVVTFTVGGLSVLNAIAGAYSENLPLICIVGGPNSNDYGTNRILHHTIGLPDFSQELRCFQTVTCYQAVVNNLDDAHEQIDKAISTALKESKPVYISVSCNLAAIPHHTFSRDPVPFSLAPRLSNKMGLEAAVEATLEFLNKAVKPVMVGGPKLRVAKACDAFVELADASGYALAMMPSAKGFVPEHHPHFIGTYWGAVSTPFCSEIVESADAYIFAGPIFNDYSSVGYSLLLKKEKAIVVQPDRITVANGPTFGCILMSDFFRELSKRVKRNETAYENYHRIFVPEGKPLKCESREPLRVNTMFQHIQKMLSSETAVIAETGDSWFNCQKLKLPKGCGYEFQMQYGSIGWSVGATLGYAQASPEKRVLAFIGDGSFQVTVQDISTMLRNGQKTIIFLINNGGYTIEVEIHDGPYNVIKNWNYTGLVDAIHNGEGNCWTAKVRYEEELVEAITTATTEKKDCLCFIEVILHKDDTSKELLEWGSRVSAANSRPPNPQ

SEQ ID NO: 80308 - DNA, 1452 bp, Arabidopsis thaliana
  misc_feature (1)..(1452): Ceres Seq. ID no. 12655313
  misc_feature: MA Experiment ID: 20000184 Result: Down-regulated in Transcription
  misc_feature: MA Experiment 20000184 PARAMETER Experiment Name: At_Shoots__P Parameter: Age (day) Value: 7
  misc_feature: MA Experiment 20000184 PARAMETER Experiment Name: At_Shoots__P Parameter: Tissue Value: Shoots vs. Whole Plant
  misc_feature: MA Experiment ID: 20000495 Result: Down-regulated in Transcription
  misc_feature: MA Experiment 20000495 PARAMETER Experiment Name: At_Guard_Cells_P Parameter: Harvest Date Value: 8/2/2002
  misc_feature: MA Experiment 20000495 PARAMETER Experiment Name: At_Guard_Cells_P Parameter: Organism Value: A. thaliana
  misc_feature: MA Experiment 20000495 PARAMETER Experiment Name: At_Guard_Cells_P Parameter: Tissue Value: Guard Cells vs. Leaves
  misc_feature: MA Experiment ID: 20000496 Result: Down-regulated in Transcription
  misc_feature: MA Experiment 20000496 PARAMETER Experiment Name: At_Guard_Cells_P Parameter: Harvest Date Value: 7/19/2002
  misc_feature: MA Experiment 20000496 PARAMETER Experiment Name: At_Guard_Cells_P Parameter: Organism Value: Canola
  misc_feature: MA Experiment 20000496 PARAMETER Experiment Name: At_Guard_Cells_P Parameter: Tissue Value: Guard Cells vs. Leaves
  misc_feature: MA Experiment ID: 20001557 Result: Down-regulated in Transcription
  misc_feature: MA Experiment 20001557 PARAMETER Experiment Name: At_Drought_Soil_Dry_P Parameter: Age (day) Value: 27
  misc_feature: MA Experiment 20001557 PARAMETER Experiment Name: At_Drought_Soil_Dry_P Parameter: Organism Value: A. thaliana
  misc_feature: MA Experiment 20001557 PARAMETER Experiment Name: At_Drought_Soil_Dry_P Parameter: Plant Line Value: WS
  misc_feature: MA Experiment 20001557 PARAMETER Experiment Name: At_Drought_Soil_Dry_P Parameter: Post Timepoint (hr) Value: 3
  misc_feature: MA Experiment 20001557 PARAMETER Experiment Name: At_Drought_Soil_Dry_P Parameter: Post-Treatment Value: Re-Water vs. No Drought
  misc_feature: MA Experiment 20001557 PARAMETER Experiment Name: At_Drought_Soil_Dry_P Parameter: Timepoint (day) Value: 13
  misc_feature: MA Experiment 20001557 PARAMETER Experiment Name: At_Drought_Soil_Dry_P Parameter: Treatment Value: Drought vs. No Drought
  misc_feature: MA Experiment ID: 20001560 Result: Down-regulated in Transcription
  misc_feature: MA Experiment 20001560 PARAMETER Experiment Name: At_Drought_Soil_Dry_P Parameter: Age (day) Value: 28
  misc_feature: MA Experiment 20001560 PARAMETER Experiment Name: At_Drought_Soil_Dry_P Parameter: Organism Value: A. thaliana
  misc_feature: MA Experiment 20001560 PARAMETER Experiment Name: At_Drought_Soil_Dry_P Parameter: Plant Line Value: WS
  misc_feature: MA Experiment 20001560 PARAMETER Experiment Name: At_Drought_Soil_Dry_P Parameter: Post Timepoint (hr) Value: None
  misc_feature: MA Experiment 20001560 PARAMETER Experiment Name: At_Drought_Soil_Dry_P Parameter: Post-Treatment Value: None
  misc_feature: MA Experiment 20001560 PARAMETER Experiment Name: At_Drought_Soil_Dry_P Parameter: Timepoint (day) Value: 14
  misc_feature: MA Experiment 20001560 PARAMETER Experiment Name: At_Drought_Soil_Dry_P Parameter: Treatment Value: Drought vs. No Drought
atggaggatatacaggaggaagagaacggtacggacgaggaggttctgggatcgagcttgaccatggagaaagtggccgcagcgaagcagtacatcgagaatcactacaaagctcagaacaagaacattcaagagaggaaagagagacggtggatcttagaaagaaagttggcgtcttctggagtgccaaaagaggagcaaatcaacatgattaaagacctggagagaaaagagacagagtttatgaggcttaaaaggaacaagattagtgtcgatgactttgagcttttgactatcattggaagaggtgcttttggtgaggttcgcttatgtcgggagagaaagtctggaaatatttatgccatgaagaagttaaagaaatctgaaatggtcatgagaggacaggttgagcatgtcagagcagagaggaacctgctggctgaggttgaaagccattatattgtgaagctttactattcatttcaggatcccgagtatctgtatctgattatggaatatctccccggtggtgatatgatgaccttgctcatgagggaggacacattacgggaagatgttgccagattttatattgctcaaagtgtcctggccattgaatccatacacagatacaactatattcatagggatatcaaacctgataacctacttttggacaaagatgggcacatgaaactctcggactttgggctctgtaagcctcttgattgtagaaatttaccttcaattcaggagaatagggccacggatgatgaaactatgtcagaacctatggatgttgatagatgctttcctgacactgataacaagagaagctggcgcagtccccaggaacaacttcagcattggcagatgaatcgcagaaaactagcattttcaactgtgggaacaccggactatattgctcctgaagttttgctgaagaaaggatatggcatggaatgtgattggtggtcattaggtgcaattatgtacgaaatgctcgttgggtatcctcctttttatgctgatgaccctatatcaacttgcagaaagatcgtccattggagaaaccatttgaaatttcctgaggatgcgaagttttcatctgaggcaaaagatcttatctgcaggttgctgtgcaacgttgaccataggcttggtactggaggaggagcccagcaaatcaaggatcatccttggttcaaggatgttgtgtgggaaaagctctatgaaatggaggctgcgtacaaaccagaagtgaacgacgagctagatacacaaaattttatgaagtttgatgaagtgaattctcctgcacctgaaagaactagatcaggactctccaggaagatgcttcttgctcccaaggatttaagttttgttggctacacatacaagaactttgacgctgtaaaaggattgcgtcattcacttggtaaattcacatga

SEQ ID NO: 80309 - protein, 483 aa, Arabidopsis thaliana
  peptide (1)..(483): Ceres Seq. ID no. 12655314
  misc_feature (94)..(402): Pfam Name: Protein kinase domain Pfam Description: Protein kinase domain
  misc_feature (1)..(483): Homolog of NCBI NO: 15234064 NR Description: putative protein kinase; protein id: At4g33080.1
  misc_feature (1)..(479): Homolog of NCBI NO: 27311789 NR Description: putative protein kinase [Arabidopsis thaliana]
  misc_feature (1)..(479): Homolog of NCBI NO: 31088228 NR Description: protein kinase [Raphanus sativus]
  misc_feature (1)..(479): Homolog of NCBI NO: 31088226 NR Description: protein kinase [Raphanus sativus]
  misc_feature (22)..(478): Homolog of NCBI NO: 34906336 NR Description: unnamed protein product [Oryza sativa (japonica group)] >gi|9558490|dbj|BAB03409.1| unnamed protein product
  misc_feature (22)..(481): Homolog of NCBI NO: 541824 NR Description: protein kinase (EC 2.7.1.-) - spinach
  misc_feature (6)..(479): Homolog of NCBI NO: 18399030 NR Description: putative protein kinase; protein id: At2g19400.1 thaliana] >gi|20197015|gb|AAC16470.2| putative protein kinase
  misc_feature (6)..(475): Homolog of NCBI NO: 7446410 NR Description: protein kinase F27F23.20 (EC 2.7.1.-) -
  misc_feature (454)..(479): Homolog of NCBI NO: 7446410 NR Description: protein kinase F27F23.20 (EC 2.7.1.-) -
  misc_feature (13)..(472): Homolog of NCBI NO: 30682806 NR Description: protein kinase [Arabidopsis thaliana] protein kinase [Arabidopsis thaliana] >gi|22135803|gb|AAM91088.1| [Arabidopsis thaliana] >gi|23308449|gb|AAN18194.1|
MEDIQEEENGTDEEVLGSSLTMEKVAAAKQYIENHYKAQNKNIQERKERRWILERKLASSGVPKEEQINMIKDLERKETEFMRLKRNKISVDDFELLTIIGRGAFGEVRLCRERKSGNIYAMKKLKKSEMVMRGQVEHVRAERNLLAEVESHYIVKLYYSFQDPEYLYLIMEYLPGGDMMTLLMREDTLREDVARFYIAQSVLAIESIHRYNYIHRDIKPDNLLLDKDGHMKLSDFGLCKPLDCRNLPSIQENRATDDETMSEPMDVDRCFPDTDNKRSWRSPQEQLQHWQMNRRKLAFSTVGTPDYIAPEVLLKKGYGMECDWWSLGAIMYEMLVGYPPFYADDPISTCRKIVHWRNHLKFPEDAKFSSEAKDLICRLLCNVDHRLGTGGGAQQIKDHPWFKDVVWEKLYEMEAAYKPEVNDELDTQNFMKFDEVNSPAPERTRSGLSRKMLLAPKDLSFVGYTYKNFDAVKGLRHSLGKFT

SEQ ID NO: 80310 - protein, 462 aa, Arabidopsis thaliana
  peptide (1)..(462): Ceres Seq. ID no. 12655315
  misc_feature (73)..(381): Pfam Name: Protein kinase domain Pfam Description: Protein kinase domain
  misc_feature (1)..(462): Homolog of NCBI NO: 15234064 NR Description: putative protein kinase; protein id: At4g33080.1
  misc_feature (1)..(458): Homolog of NCBI NO: 27311789 NR Description: putative protein kinase [Arabidopsis thaliana]
  misc_feature (1)..(458): Homolog of NCBI NO: 31088228 NR Description: protein kinase [Raphanus sativus]
  misc_feature (1)..(458): Homolog of NCBI NO: 31088226 NR Description: protein kinase [Raphanus sativus]
  misc_feature (1)..(457): Homolog of NCBI NO: 34906336 NR Description: unnamed protein product [Oryza sativa (japonica group)] >gi|9558490|dbj|BAB03409.1| unnamed protein product
  misc_feature (1)..(460): Homolog of NCBI NO: 541824 NR Description: protein kinase (EC 2.7.1.-) - spinach
  misc_feature (1)..(458): Homolog of NCBI NO: 18399030 NR Description: putative protein kinase; protein id: At2g19400.1 thaliana] >gi|20197015|gb|AAC16470.2| putative protein kinase
  misc_feature (1)..(454): Homolog of NCBI NO: 7446410 NR Description: protein kinase F27F23.20 (EC 2.7.1.-) -
  misc_feature (433)..(458): Homolog of NCBI NO: 7446410 NR Description: protein kinase F27F23.20 (EC 2.7.1.-) -
  misc_feature (1)..(451): Homolog of NCBI NO: 30682806 NR Description: protein kinase [Arabidopsis thaliana] protein kinase [Arabidopsis thaliana] >gi|22135803|gb|AAM91088.1| [Arabidopsis thaliana] >gi|23308449|gb|AAN18194.1|
MEKVAAAKQYIENHYKAQNKNIQERKERRWILERKLASSGVPKEEQINMIKDLERKETEFMRLKRNKISVDDFELLTIIGRGAFGEVRLCRERKSGNIYAMKKLKKSEMVMRGQVEHVRAERNLLAEVESHYIVKLYYSFQDPEYLYLIMEYLPGGDMMTLLMREDTLREDVARFYIAQSVLAIESIHRYNYIHRDIKPDNLLLDKDGHMKLSDFGLCKPLDCRNLPSIQENRATDDETMSEPMDVDRCFPDTDNKRSWRSPQEQLQHWQMNRRKLAFSTVGTPDYIAPEVLLKKGYGMECDWWSLGAIMYEMLVGYPPFYADDPISTCRKIVHWRNHLKFPEDAKFSSEAKDLICRLLCNVDHRLGTGGGAQQIKDHPWFKDVVWEKLYEMEAAYKPEVNDELDTQNFMKFDEVNSPAPERTRSGLSRKMLLAPKDLSFVGYTYKNFDAVKGLRHSLGKFT

SEQ ID NO: 80311 - protein, 414 aa, Arabidopsis thaliana
  peptide (1)..(414): Ceres Seq. ID no. 12655316
  misc_feature (25)..(333): Pfam Name: Protein kinase domain Pfam Description: Protein kinase domain
  misc_feature (1)..(414): Homolog of NCBI NO: 15234064 NR Description: putative protein kinase; protein id: At4g33080.1
  misc_feature (1)..(410): Homolog of NCBI NO: 27311789 NR Description: putative protein kinase [Arabidopsis thaliana]
  misc_feature (1)..(410): Homolog of NCBI NO: 31088228 NR Description: protein kinase [Raphanus sativus]
  misc_feature (1)..(410): Homolog of NCBI NO: 31088226 NR Description: protein kinase [Raphanus sativus]
  misc_feature (1)..(409): Homolog of NCBI NO: 34906336 NR Description: unnamed protein product [Oryza sativa (japonica group)] >gi|9558490|dbj|BAB03409.1| unnamed protein product
  misc_feature (1)..(412): Homolog of NCBI NO: 541824 NR Description: protein kinase (EC 2.7.1.-) - spinach
  misc_feature (1)..(410): Homolog of NCBI NO: 18399030 NR Description: putative protein kinase; protein id: At2g19400.1 thaliana] >gi|20197015|gb|AAC16470.2| putative protein kinase
  misc_feature (1)..(406): Homolog of NCBI NO: 7446410 NR Description: protein kinase F27F23.20 (EC 2.7.1.-) -
  misc_feature (385)..(410): Homolog of NCBI NO: 7446410 NR Description: protein kinase F27F23.20 (EC 2.7.1.-) -
  misc_feature (1)..(403): Homolog of NCBI NO: 30682806 NR Description: protein kinase [Arabidopsis thaliana] protein kinase [Arabidopsis thaliana] >gi|22135803|gb|AAM91088.1| [Arabidopsis thaliana] >gi|23308449|gb|AAN18194.1|
MIKDLERKETEFMRLKRNKISVDDFELLTIIGRGAFGEVRLCRERKSGNIYAMKKLKKSEMVMRGQVEHVRAERNLLAEVESHYIVKLYYSFQDPEYLYLIMEYLPGGDMMTLLMREDTLREDVARFYIAQSVLAIESIHRYNYIHRDIKPDNLLLDKDGHMKLSDFGLCKPLDCRNLPSIQENRATDDETMSEPMDVDRCFPDTDNKRSWRSPQEQLQHWQMNRRKLAFSTVGTPDYIAPEVLLKKGYGMECDWWSLGAIMYEMLVGYPPFYADDPISTCRKIVHWRNHLKFPEDAKFSSEAKDLICRLLCNVDHRLGTGGGAQQIKDHPWFKDVVWEKLYEMEAAYKPEVNDELDTQNFMKFDEVNSPAPERTRSGLSRKMLLAPKDLSFVGYTYKNFDAVKGLRHSLGKFT

SEQ ID NO: 80312 - DNA, 2973 bp, Arabidopsis thaliana
  misc_feature (1)..(2973): Ceres Seq. ID no. 12655327
  misc_feature: MA Experiment ID: 20000307 Result: Down-regulated in Transcription
  misc_feature: MA Experiment 20000307 PARAMETER Experiment Name: At_Germinating_Seeds_Sub_P Parameter: Age (hr) Value: 24 vs. 0
  misc_feature: MA Experiment 20000307 PARAMETER Experiment Name: At_Germinating_Seeds_Sub_P Parameter: Organism Value: A. thaliana
  misc_feature: MA Experiment 20000307 PARAMETER Experiment Name: At_Germinating_Seeds_Sub_P Parameter: Plant Line Value: WS
  misc_feature: MA Experiment 20000307 PARAMETER Experiment Name: At_Germinating_Seeds_Sub_P Parameter: Tissue Value: Germinating Seeds
  misc_feature: MA Experiment ID: 20000315 Result: Down-regulated in Transcription
  misc_feature: MA Experiment 20000315 PARAMETER Experiment Name: At_14day_Shoots-Roots_Sub_P Parameter: Age (day) Value: 14
  misc_feature: MA Experiment 20000315 PARAMETER Experiment Name: At_14day_Shoots-Roots_Sub_P Parameter: Organism Value: A. thaliana
  misc_feature: MA Experiment 20000315 PARAMETER Experiment Name: At_14day_Shoots-Roots_Sub_P Parameter: Plant Line Value: WS
  misc_feature: MA Experiment 20000315 PARAMETER Experiment Name: At_14day_Shoots-Roots_Sub_P Parameter: Tissue Value: Shoots vs. Whole Plant
atgcgatcaacctccaaggccatccctttctcctttcacacatctctcattgttcaatgtctccgtcctctgcgttttacttctgctgcttcgccgtcttcatcttcctcgtcttcgtcacaatggttcggctttcttcggaatgcaatcacctcgtcggacttgatgctcggaaaatgtacacacgcacgtatcctaaccttcgaggaaaacccagaacgattcctgattaacaatctcatctccatgtactccaagtgtggatcactcacttatgctcgccgagtgttcgataaaatgcctgacagagatcttgtttcctggaactcgattttagctgcctatgctcagtcttccgaatgcgttgtcgagaacattcaacaagcttttcttcttttcaggatattacgccaggacgttgtgtataccagtcgaatgactctgtctccaatgttgaaactttgtttgcattctgggtatgtgtgggcttcagagtcatttcatgggtatgcttgcaagattggtttggacggtgatgaatttgttgccggagctcttgttaacatatatttgaagtttggtaaggttaaggaaggtaaggttttgtttgaggagatgccttatagagatgtggtgttatggaacttgatgttgaaggcttatctggaaatgggttttaaggaagaagcaatagacctctcttctgcatttcattcaagtggtttaaatcccaatgaaatcactctgcgtttacttgctagaatttcaggtgatgattctgatgcaggacaagtgaaatcctttgcaaatggtaatgatgcttcttctgtttcagaaataatattcaggaacaaaggattgagtgaatatctccattcaggccagtattcagctcttctcaaatgttttgcggatatggtagagtccgacgtggaatgtgatcaagtcacatttattttaatgttagctacagctgttaaagtagatagtttagcattagggcagcaagttcattgtatggcattgaagttaggacttgatttgatgcttactgtttcgaatagtctaataaacatgtactgtaaactgagaaaattcggtttcgctaggacagtatttgacaatatgagtgaacgagatttgatttcgtggaattcagttattgccggaatagctcaaaatggcttagaagtagaagcagtgtgtctgtttatgcagctgttacgttgcggcctcaaaccagaccagtatactatgacgagtgttctaaaggctgcttcttctcttcctgaaggcttgtcgttgagtaaacaagtacatgttcatgcaattaaaatcaataatgtttctgatagttttgtctctactgctctgattgatgcctactctcggaacagatgtatgaaagaggcagagattttgtttgagaggcataattttgatctcgtcgcttggaatgccatgatggctggttatacccaaagtcatgacggtcataagactctgaagctttttgctttgatgcataaacagggagagagatctgatgatttcacgctcgcaacagtgtttaagacatgtggtttcttgtttgccataaatcaaggaaagcaagtccatgcttatgcaatcaaatctggatatgacttagatctatgggtcagcagtgggattttggatatgtatgtaaaatgtggcgatatgagtgcagcacaatttgcctttgatagtattcccgtacctgacgatgttgcttggacgactatgatatcaggatgcatagaaaatggagaagaagaaagagcgtttcatgtttttagccagatgaggctcatgggagtgttgcctgatgaatttacaatagccacacttgcgaaagcaagctcttgtttgacggcattagaacaggggcgccaaattcatgcaaatgccctcaagttgaattgtacgaatgaccctttcgttggaacttcacttgtggacatgtatgctaagtgtggaagcatagacgatgcatattgtttgtttaaaagaatagagatgatgaacatcactgcctggaatgccatgttagtgggattagctcaacatggggaagggaaagaaacgctccagcttttcaaacagatgaaatctctgggtataaaacctgataaggtcacatttatcggcgttctttctgcttgcagtcactcaggcttggtatcagaggcatacaagcatatgcgatcaatgcatggagactatggcattaaacctgaaatagaacactactcttgtttggctgatgcgcttggccgtgctggacttgttaaacaggctgaaaatttgatcgagtcaatgtccatggaagcttcagcatcgatgtacagaactttgcttgcagcttgccgagttcaaggggacacagaaacagggaagagagtggcaactaagcttttggagctagagccactggactcatcagcttatgttcttttatccaatatgtatgctgctgcttccaaatgggatgagatgaaacttgcccggacgatgatgaaagggcacaaagtgaaaaaagacccgggtttcagttggatcgaggtgaaaaacaagatacatatatttgtcgtggatgataggtcaaaccggcaaaccgagttgatatacaggaaagtaaaagacatgataagagacatcaaacaagaagggtatgttcctgagacagatttcacacttgtagatgtggaagaagaagagaaagagcgtgccctgtactaccacagtgagaagctagcagttgctttcggacttttgagcactcctccatccacaccaatccgtgtgattaagaatctacgcgtctgtggagattgtcacaacgcgatgaaatatatagcaaaggtgtataatagagagattgtacttagagatgcaaaccggtttcaccggttcaaggatggtatttgctcatgtggtgattattggtag

SEQ ID NO: 80313 - protein, 990 aa, Arabidopsis thaliana
  peptide (1)..(990): Ceres Seq. ID no. 12655328
  misc_feature (483)..(517): Pfam Name: PPR repeat Pfam Description: PPR repeat
  misc_feature (273)..(990): Homolog of NCBI NO: 34903762 NR Description: unnamed protein product [Oryza sativa (japonica group)] >gi|7340873|dbj|BAA92963.1| unnamed protein product
  misc_feature (69)..(249): Homolog of NCBI NO: 34903762 NR Description: unnamed protein product [Oryza sativa (japonica group)] >gi|7340873|dbj|BAA92963.1| unnamed protein product
  misc_feature (78)..(990): Homolog of NCBI NO: 25354624 NR Description: protein F3O9.28 [imported] - Arabidopsis thaliana
  misc_feature (314)..(990): Homolog of NCBI NO: 18394615 NR Description: hypothetical protein; protein id: At1g18485.1
  misc_feature (54)..(230): Homolog of NCBI NO: 18394615 NR Description: hypothetical protein; protein id: At1g18485.1
  misc_feature (273)..(990): Homolog of NCBI NO: 15219258 NR Description: hypothetical protein; protein id: At1g16480.1
  misc_feature (144)..(265): Homolog of NCBI NO: 15219258 NR Description: hypothetical protein; protein id: At1g16480.1
  misc_feature (80)..(257): Homolog of NCBI NO: 15219258 NR Description: hypothetical protein; protein id: At1g16480.1
  misc_feature (244)..(990): Homolog of NCBI NO: 15232837 NR Description: hypothetical protein; protein id: At3g02010.1 thaliana] >gi|6091739|gb|AAF03451.1|AC010797_27 hypothetical [Arabidopsis thaliana] >gi|6513930|gb|AAF14834.1|AC011664_16
  misc_feature (173)..(236): Homolog of NCBI NO: 15232837 NR Description: hypothetical protein; protein id: At3g02010.1 thaliana] >gi|6091739|gb|AAF03451.1|AC010797_27 hypothetical [Arabidopsis thaliana] >gi|6513930|gb|AAF14834.1|AC011664_16
MRSTSKAIPFSFHTSLIVQCLRPLRFTSAASPSSSSSSSSQWFGFLRNAITSSDLMLGKCTHARILTFEENPERFLINNLISMYSKCGSLTYARRVFDKMPDRDLVSWNSILAAYAQSSECVVENIQQAFLLFRILRQDVVYTSRMTLSPMLKLCLHSGYVWASESFHGYACKIGLDGDEFVAGALVNIYLKFGKVKEGKVLFEEMPYRDVVLWNLMLKAYLEMGFKEEAIDLSSAFHSSGLNPNEITLRLLARISGDDSDAGQVKSFANGNDASSVSEIIFRNKGLSEYLHSGQYSALLKCFADMVESDVECDQVTFILMLATAVKVDSLALGQQVHCMALKLGLDLMLTVSNSLINMYCKLRKFGFARTVFDNMSERDLISWNSVIAGIAQNGLEVEAVCLFMQLLRCGLKPDQYTMTSVLKAASSLPEGLSLSKQVHVHAIKINNVSDSFVSTALIDAYSRNRCMKEAEILFERHNFDLVAWNAMMAGYTQSHDGHKTLKLFALMHKQGERSDDFTLATVFKTCGFLFAINQGKQVHAYAIKSGYDLDLWVSSGILDMYVKCGDMSAAQFAFDSIPVPDDVAWTTMISGCIENGEEERAFHVFSQMRLMGVLPDEFTIATLAKASSCLTALEQGRQIHANALKLNCTNDPFVGTSLVDMYAKCGSIDDAYCLFKRIEMMNITAWNAMLVGLAQHGEGKETLQLFKQMKSLGIKPDKVTFIGVLSACSHSGLVSEAYKHMRSMHGDYGIKPEIEHYSCLADALGRAGLVKQAENLIESMSMEASASMYRTLLAACRVQGDTETGKRVATKLLELEPLDSSAYVLLSNMYAAASKWDEMKLARTMMKGHKVKKDPGFSWIEVKNKIHIFVVDDRSNRQTELIYRKVKDMIRDIKQEGYVPETDFTLVDVEEEEKERALYYHSEKLAVAFGLLSTPPSTPIRVIKNLRVCGDCHNAMKYIAKVYNREIVLRDANRFHRFKDGICSCGDYW

SEQ ID NO: 80314 - protein, 935 aa, Arabidopsis thaliana
  peptide (1)..(935): Ceres Seq. ID no. 12655329
  misc_feature (428)..(462): Pfam Name: PPR repeat Pfam Description: PPR repeat
  misc_feature (218)..(935): Homolog of NCBI NO: 34903762 NR Description: unnamed protein product [Oryza sativa (japonica group)] >gi|7340873|dbj|BAA92963.1| unnamed protein product
  misc_feature (14)..(194): Homolog of NCBI NO: 34903762 NR Description: unnamed protein product [Oryza sativa (japonica group)] >gi|7340873|dbj|BAA92963.1| unnamed protein product
  misc_feature (23)..(935): Homolog of NCBI NO: 25354624 NR Description: protein F3O9.28 [imported] - Arabidopsis thaliana
  misc_feature (259)..(935): Homolog of NCBI NO: 18394615 NR Description: hypothetical protein; protein id: At1g18485.1
  misc_feature (1)..(175): Homolog of NCBI NO: 18394615 NR Description: hypothetical protein; protein id: At1g18485.1
  misc_feature (218)..(935): Homolog of NCBI NO: 15219258 NR Description: hypothetical protein; protein id: At1g16480.1
  misc_feature (89)..(210): Homolog of NCBI NO: 15219258 NR Description: hypothetical protein; protein id: At1g16480.1
  misc_feature (25)..(202): Homolog of NCBI NO: 15219258 NR Description: hypothetical protein; protein id: At1g16480.1
  misc_feature (189)..(935): Homolog of NCBI NO: 15232837 NR Description: hypothetical protein; protein id: At3g02010.1 thaliana] >gi|6091739|gb|AAF03451.1|AC010797_27 hypothetical [Arabidopsis thaliana] >gi|6513930|gb|AAF14834.1|AC011664_16
  misc_feature (118)..(181): Homolog of NCBI NO: 15232837 NR Description: hypothetical protein; protein id: At3g02010.1 thaliana] >gi|6091739|gb|AAF03451.1|AC010797_27 hypothetical [Arabidopsis thaliana] >gi|6513930|gb|AAF14834.1|AC011664_16
MLGKCTHARILTFEENPERFLINNLISMYSKCGSLTYARRVFDKMPDRDLVSWNSILAAYAQSSECVVENIQQAFLLFRILRQDVVYTSRMTLSPMLKLCLHSGYVWASESFHGYACKIGLDGDEFVAGALVNIYLKFGKVKEGKVLFEEMPYRDVVLWNLMLKAYLEMGFKEEAIDLSSAFHSSGLNPNEITLRLLARISGDDSDAGQVKSFANGNDASSVSEIIFRNKGLSEYLHSGQYSALLKCFADMVESDVECDQVTFILMLATAVKVDSLALGQQVHCMALKLGLDLMLTVSNSLINMYCKLRKFGFARTVFDNMSERDLISWNSVIAGIAQNGLEVEAVCLFMQLLRCGLKPDQYTMTSVLKAASSLPEGLSLSKQVHVHAIKINNVSDSFVSTALIDAYSRNRCMKEAEILFERHNFDLVAWNAMMAGYTQSHDGHKTLKLFALMHKQGERSDDFTLATVFKTCGFLFAINQGKQVHAYAIKSGYDLDLWVSSGILDMYVKCGDMSAAQFAFDSIPVPDDVAWTTMISGCIENGEEERAFHVFSQMRLMGVLPDEFTIATLAKASSCLTALEQGRQIHANALKLNCTNDPFVGTSLVDMYAKCGSIDDAYCLFKRIEMMNITAWNAMLVGLAQHGEGKETLQLFKQMKSLGIKPDKVTFIGVLSACSHSGLVSEAYKHMRSMHGDYGIKPEIEHYSCLADALGRAGLVKQAENLIESMSMEASASMYRTLLAACRVQGDTETGKRVATKLLELEPLDSSAYVLLSNMYAAASKWDEMKLARTMMKGHKVKKDPGFSWIEVKNKIHIFVVDDRSNRQTELIYRKVKDMIRDIKQEGYVPETDFTLVDVEEEEKERALYYHSEKLAVAFGLLSTPPSTPIRVIKNLRVCGDCHNAMKYIAKVYNREIVLRDANRFHRFKDGICSCGDYW

SEQ ID NO: 80315 - protein, 908 aa, Arabidopsis thaliana
  peptide (1)..(908): Ceres Seq. ID no. 12655330
  misc_feature (401)..(435): Pfam Name: PPR repeat Pfam Description: PPR repeat
  misc_feature (191)..(908): Homolog of NCBI NO: 34903762 NR Description: unnamed protein product [Oryza sativa (japonica group)] >gi|7340873|dbj|BAA92963.1| unnamed protein product
  misc_feature (1)..(167): Homolog of NCBI NO: 34903762 NR Description: unnamed protein product [Oryza sativa (japonica group)] >gi|7340873|dbj|BAA92963.1| unnamed protein product
  misc_feature (1)..(908): Homolog of NCBI NO: 25354624 NR Description: protein F3O9.28 [imported] - Arabidopsis thaliana
  misc_feature (232)..(908): Homolog of NCBI NO: 18394615 NR Description: hypothetical protein; protein id: At1g18485.1
  misc_feature (1)..(148): Homolog of NCBI NO: 18394615 NR Description: hypothetical protein; protein id: At1g18485.1
  misc_feature (191)..(908): Homolog of NCBI NO: 15219258 NR Description: hypothetical protein; protein id: At1g16480.1
  misc_feature (62)..(183): Homolog of NCBI NO: 15219258 NR Description: hypothetical protein; protein id: At1g16480.1
  misc_feature (1)..(175): Homolog of NCBI NO: 15219258 NR Description: hypothetical protein; protein id: At1g16480.1
  misc_feature (162)..(908): Homolog of NCBI NO: 15232837 NR Description: hypothetical protein; protein id: At3g02010.1 thaliana] >gi|6091739|gb|AAF03451.1|AC010797_27 hypothetical [Arabidopsis thaliana] >gi|6513930|gb|AAF14834.1|AC011664_16
  misc_feature (91)..(154): Homolog of NCBI NO: 15232837 NR Description: hypothetical protein; protein id: At3g02010.1 thaliana] >gi|6091739|gb|AAF03451.1|AC010797_27 hypothetical [Arabidopsis thaliana] >gi|6513930|gb|AAF14834.1|AC011664_16
MYSKCGSLTYARRVFDKMPDRDLVSWNSILAAYAQSSECVVENIQQAFLLFRILRQDVVYTSRMTLSPMLKLCLHSGYVWASESFHGYACKIGLDGDEFVAGALVNIYLKFGKVKEGKVLFEEMPYRDVVLWNLMLKAYLEMGFKEEAIDLSSAFHSSGLNPNEITLRLLARISGDDSDAGQVKSFANGNDASSVSEIIFRNKGLSEYLHSGQYSALLKCFADMVESDVECDQVTFILMLATAVKVDSLALGQQVHCMALKLGLDLMLTVSNSLINMYCKLRKFGFARTVFDNMSERDLISWNSVIAGIAQNGLEVEAVCLFMQLLRCGLKPDQYTMTSVLKAASSLPEGLSLSKQVHVHAIKINNVSDSFVSTALIDAYSRNRCMKEAEILFERHNFDLVAWNAMMAGYTQSHDGHKTLKLFALMHKQGERSDDFTLATVFKTCGFLFAINQGKQVHAYAIKSGYDLDLWVSSGILDMYVKCGDMSAAQFAFDSIPVPDDVAWTTMISGCIENGEEERAFHVFSQMRLMGVLPDEFTIATLAKASSCLTALEQGRQIHANALKLNCTNDPFVGTSLVDMYAKCGSIDDAYCLFKRIEMMNITAWNAMLVGLAQHGEGKETLQLFKQMKSLGIKPDKVTFIGVLSACSHSGLVSEAYKHMRSMHGDYGIKPEIEHYSCLADALGRAGLVKQAENLIESMSMEASASMYRTLLAACRVQGDTETGKRVATKLLELEPLDSSAYVLLSNMYAAASKWDEMKLARTMMKGHKVKKDPGFSWIEVKNKIHIFVVDDRSNRQTELIYRKVKDMIRDIKQEGYVPETDFTLVDVEEEEKERALYYHSEKLAVAFGLLSTPPSTPIRVIKNLRVCGDCHNAMKYIAKVYNREIVLRDANRFHRFKDGICSCGDYW

SEQ ID NO: 80316 - DNA, 2226 bp, Arabidopsis thaliana
  misc_feature (1)..(2226): Ceres Seq. ID no. 12655349
  misc_feature: MA Experiment ID: 20000180 Result: Down-regulated in Transcription
  misc_feature: MA Experiment 20000180 PARAMETER Experiment Name: At_Germinating_Seeds_P Parameter: Age (hr) Value: 24 vs. 0
  misc_feature: MA Experiment 20000180 PARAMETER Experiment Name: At_Germinating_Seeds_P Parameter: Tissue Value: Germinating Seeds
  misc_feature: MA Experiment ID: 20000227 Result: Up-regulated in Transcription
  misc_feature: MA Experiment 20000227 PARAMETER Experiment Name: At_Root-Tips-vs-Tops_P Parameter: Tissue Value: Root Tips vs. Root Tops
  misc_feature: MA Experiment ID: 20000234 Result: Up-regulated in Transcription
  misc_feature: MA Experiment 20000234 PARAMETER Experiment Name: At_Siliques_P Parameter: Age (day) Value: 21
  misc_feature: MA Experiment 20000234 PARAMETER Experiment Name: At_Siliques_P Parameter: Organism Value: A. thaliana
  misc_feature: MA Experiment 20000234 PARAMETER Experiment Name: At_Siliques_P Parameter: Plant Line Value: WS
  misc_feature: MA Experiment 20000234 PARAMETER Experiment Name: At_Siliques_P Parameter: Tissue Value: Less Than 5mm Siliques vs. Whole Plant
  misc_feature: MA Experiment ID: 20000286 Result: Up-regulated in Transcription
  misc_feature: MA Experiment 20000286 PARAMETER Experiment Name: At_Open_Flower_P Parameter: Age (day) Value: 21
  misc_feature: MA Experiment 20000286 PARAMETER Experiment Name: At_Open_Flower_P Parameter: Plant Line Value: WS
  misc_feature: MA Experiment 20000286 PARAMETER Experiment Name: At_Open_Flower_P Parameter: Tissue Value: Half Open vs. Whole Plant
  misc_feature: MA Experiment ID: 20001451 Result: Down-regulated in Transcription
  misc_feature: MA Experiment 20001451 PARAMETER Experiment Name: At_Far-red-induction_P Parameter: Age (day) Value: 7
  misc_feature: MA Experiment 20001451 PARAMETER Experiment Name: At_Far-red-induction_P Parameter: Light Value: Far-red vs. White
  misc_feature: MA Experiment 20001451 PARAMETER Experiment Name: At_Far-red-induction_P Parameter: Organism Value: A. thaliana
  misc_feature: MA Experiment 20001451 PARAMETER Experiment Name: At_Far-red-induction_P Parameter: Plant Line Value: Columbia
  misc_feature: MA Experiment 20001451 PARAMETER Experiment Name: At_Far-red-induction_P Parameter: Timepoint (hr) Value: 24
  misc_feature: MA Experiment 20001451 PARAMETER Experiment Name: At_Far-red-induction_P Parameter: Tissue Value: Whole Plant
  misc_feature: MA Experiment ID: 20001911 Result: Down-regulated in Transcription
  misc_feature: MA Experiment 20001911 PARAMETER Experiment Name: At_Drought_Reproduction_P Parameter: Age (day) Value: 40
  misc_feature: MA Experiment 20001911 PARAMETER Experiment Name: At_Drought_Reproduction_P Parameter: Organism Value: A. thaliana
  misc_feature: MA Experiment 20001911 PARAMETER Experiment Name: At_Drought_Reproduction_P Parameter: Plant Line Value: WS
  misc_feature: MA Experiment 20001911 PARAMETER Experiment Name: At_Drought_Reproduction_P Parameter: Timepoint (day) Value: 10
  misc_feature: MA Experiment 20001911 PARAMETER Experiment Name: At_Drought_Reproduction_P Parameter: Tissue Value: Flowers
  misc_feature: MA Experiment 20001911 PARAMETER Experiment Name: At_Drought_Reproduction_P Parameter: Treatment Value: Drought vs. No Drought
aaaattcgaactttacgctcttctctcttcttcttcaacttcccaccttcgtttgaataatctcattgccgttattctctctagctcttcccatttccaggattcttcgatatgggagcatctcacagtcatgaagatctagagatctgttcctccgatgaagatgaatatgaagaatatgaagaaggaagagagggagaggaagaggaagagacgtttcaggactcgcgggatgatacgttaggtatatcttcctccggtggtcgtcgtctccggcctaaatctccttcatcatcactcgacgacgttgaggcaaaactccaagccctgaagctgaaatacccattgacgcaatcagccccgtctactcagaactcagctcggcttttccgctacatcaatggcaacactcccaaagccaaatgggtcacagctgagaaactgactgcttattgtttcgtcaagactaacaaaggagatgaagatgatgaagacgacgatgagaacggagatgtggaaaacgaatggtggattttgaaagtcggaagcaagatccgtgaaaaggtatcagatgaaatgcaattgaaagcttataaagatcaacgccgtgttgatttcgttgctaaagctgtttgggctatgaaattcgccagcagtgaagatttttcggtttttgtaagcagctataacaattgcttgtttgagaacaatcatggtgttgagtttaatgaggctaacaaggcaaaaatctatgggaaagatttcattgggtgggctaatcctgaagctgctgatgattccatgtgggaagatgctgatgatattttgcttcaaagcccaggaggaggatctgcaactccggctagagatacacaggatttgactgaggcctttgaagaagctacaagtgagggcatacatagcttagctctaggtgctttagataatagctttctagttggagattctggtattcaggttttcaagaacatgagacaggggattcaagggaaaggtgtttgtgttaactttgagcctggttatggtcgaactcattcttcagcaccgaagaaggctcttctcatgagagctgagactaatatgctgctcatgagtcctatgagccaaacgcctcattcacgaggtatccatcagcttgacattgaaaccgggaaaattatttcagagtggaagtttgagaaagatggagtggatatctctatgagtgacattactaatgatggtaaaggtgctcaattggatccatctgcgtcaacgtttcttggtctggataacaataggctttgcaggtgggatatgcgtgaccgatatgggatggttcaggatcttgctactgcgaatactccagtcttgaattgggcacaggggcatcagttttctagagggactaactttcagtgctttgcaactactggtgatggctcaattgttgttggctctcttgatggcaaaattagactctactcgagcaacactatgaggcaggcaaagacggctttccctggacttggtgcacctgttactcatgtggatgctacattcgatgggaaatggattgttggtacaactgacacatatttgattgttatctgtacccttttcactgacaaaagtggcaaaacaaagaccggcttcgagggtcgcatgggaaataagattgccgcaccaaggttgcttaagttgaggcctcttgatgcacatttagctggatctgacaacaagttccgcaatgctcagttttcttgggtcacggaggatgggaaacaggagcgtcatgtggtagctactgttggcaagttcagtgtgatatggaactttcagcaggtgaagaatggatctcatgaatgctaccatgatcaggaagggctgaagaaatgctactgctacaagatagtccttcgaaatgaatctatagtggacagtcgcttcatgaatgacaactttgcaatctctggttcacctgaagcgcctttggtcattgcaacgcctatgaaagtcagctctttcagcttatccagcaagcgatgaaacaagcaagtgatggaccggaccactagttattttcatttgaattctagtctatttgtaaccatgtgaaattacaatgttctggctcttagaacgatgttagattcagagataagacacctagcaatgttgctaaattactttggtctggctttgacttttaagatgtttggtcgt

SEQ ID NO: 80317 - protein, 645 aa, Arabidopsis thaliana
  peptide (1)..(645): Ceres Seq. ID no. 12655350
  misc_feature (1)..(645): Homolog of NCBI NO: 7488984 NR Description: dem protein - tomato >gi|2190419|emb|CAA73973.1|
  misc_feature (1)..(645): Homolog of NCBI NO: 37223342 NR Description: DEM2 [Lycopersicon esculentum]
  misc_feature (1)..(645): Homolog of NCBI NO: 37223344 NR Description: DEM2 [Lycopersicon esculentum]
  misc_feature (1)..(645): Homolog of NCBI NO: 15230321 NR Description: dem-like protein; protein id: At3g19240.1 thaliana] >gi|9294626|dbj|BAB02965.1| dem protein [Arabidopsis
  misc_feature (161)..(642): Homolog of NCBI NO: 729273 NR Description: CYPRO4 PROTEIN >gi|322804|pir||S28592 cypro4
  misc_feature (118)..(587): Homolog of NCBI NO: 28829296 NR Description: similar to hypothetical protein
  misc_feature (335)..(587): Homolog of NCBI NO: 7491392 NR Description: hypothetical protein SPBC1685.14c - fission yeast
  misc_feature (335)..(587): Homolog of NCBI NO: 19112010 NR Description: hypothetical protein [Schizosaccharomyces pombe]
  misc_feature (344)..(587): Homolog of NCBI NO: 40744400 NR Description: hypothetical protein AN3005.2 [Aspergillus
  misc_feature (427)..(582): Homolog of NCBI NO: 29250423 NR Description: GLP_39_35815_38013 [Giardia lamblia ATCC 50803]
MGASHSHEDLEICSSDEDEYEEYEEGREGEEEEETFQDSRDDTLGISSSGGRRLRPKSPSSSLDDVEAKLQALKLKYPLTQSAPSTQNSARLFRYINGNTPKAKWVTAEKLTAYCFVKTNKGDEDDEDDDENGDVENEWWILKVGSKIREKVSDEMQLKAYKDQRRVDFVAKAVWAMKFASSEDFSVFVSSYNNCLFENNHGVEFNEANKAKIYGKDFIGWANPEAADDSMWEDADDILLQSPGGGSATPARDTQDLTEAFEEATSEGIHSLALGALDNSFLVGDSGIQVFKNMRQGIQGKGVCVNFEPGYGRTHSSAPKKALLMRAETNMLLMSPMSQTPHSRGIHQLDIETGKIISEWKFEKDGVDISMSDITNDGKGAQLDPSASTFLGLDNNRLCRWDMRDRYGMVQDLATANTPVLNWAQGHQFSRGTNFQCFATTGDGSIVVGSLDGKIRLYSSNTMRQAKTAFPGLGAPVTHVDATFDGKWIVGTTDTYLIVICTLFTDKSGKTKTGFEGRMGNKIAAPRLLKLRPLDAHLAGSDNKFRNAQFSWVTEDGKQERHVVATVGKFSVIWNFQQVKNGSHECYHDQEGLKKCYCYKIVLRNESIVDSRFMNDNFAISGSPEAPLVIATPMKVSSFSLSSKR

SEQ ID NO: 80318 - protein, 490 aa, Arabidopsis thaliana
  peptide (1)..(490): Ceres Seq. ID no. 12655351
  misc_feature (1)..(490): Homolog of NCBI NO: 7488984 NR Description: dem protein - tomato >gi|2190419|emb|CAA73973.1|
  misc_feature (1)..(490): Homolog of NCBI NO: 37223342 NR Description: DEM2 [Lycopersicon esculentum]
  misc_feature (1)..(490): Homolog of NCBI NO: 37223344 NR Description: DEM2 [Lycopersicon esculentum]
  misc_feature (1)..(490): Homolog of NCBI NO: 15230321 NR Description: dem-like protein; protein id: At3g19240.1 thaliana] >gi|9294626|dbj|BAB02965.1| dem protein [Arabidopsis
  misc_feature (6)..(487): Homolog of NCBI NO: 729273 NR Description: CYPRO4 PROTEIN >gi|322804|pir||S28592 cypro4
  misc_feature (1)..(432): Homolog of NCBI NO: 28829296 NR Description: similar to hypothetical protein
  misc_feature (180)..(432): Homolog of NCBI NO: 7491392 NR Description: hypothetical protein SPBC1685.14c - fission yeast
  misc_feature (180)..(432): Homolog of NCBI NO: 19112010 NR Description: hypothetical protein [Schizosaccharomyces pombe]
  misc_feature (189)..(432): Homolog of NCBI NO: 40744400 NR Description: hypothetical protein AN3005.2 [Aspergillus
  misc_feature (272)..(427): Homolog of NCBI NO: 29250423 NR Description: GLP_39_35815_38013 [Giardia lamblia ATCC 50803]
MQLKAYKDQRRVDFVAKAVWAMKFASSEDFSVFVSSYNNCLFENNHGVEFNEANKAKIYGKDFIGWANPEAADDSMWEDADDILLQSPGGGSATPARDTQDLTEAFEEATSEGIHSLALGALDNSFLVGDSGIQVFKNMRQGIQGKGVCVNFEPGYGRTHSSAPKKALLMRAETNMLLMSPMSQTPHSRGIHQLDIETGKIISEWKFEKDGVDISMSDITNDGKGAQLDPSASTFLGLDNNRLCRWDMRDRYGMVQDLATANTPVLNWAQGHQFSRGTNFQCFATTGDGSIVVGSLDGKIRLYSSNTMRQAKTAFPGLGAPVTHVDATFDGKWIVGTTDTYLIVICTLFTDKSGKTKTGFEGRMGNKIAAPRLLKLRPLDAHLAGSDNKFRNAQFSWVTEDGKQERHVVATVGKFSVIWNFQQVKNGSHECYHDQEGLKKCYCYKIVLRNESIVDSRFMNDNFAISGSPEAPLVIATPMKVSSFSLSSKR

SEQ ID NO: 80319 - protein, 469 aa, Arabidopsis thaliana
  peptide (1)..(469): Ceres Seq. ID no. 12655352
  misc_feature (1)..(469): Homolog of NCBI NO: 7488984 NR Description: dem protein - tomato >gi|2190419|emb|CAA73973.1|
  misc_feature (1)..(469): Homolog of NCBI NO: 37223342 NR Description: DEM2 [Lycopersicon esculentum]
  misc_feature (1)..(469): Homolog of NCBI NO: 37223344 NR Description: DEM2 [Lycopersicon esculentum]
  misc_feature (1)..(469): Homolog of NCBI NO: 15230321 NR Description: dem-like protein; protein id: At3g19240.1 thaliana] >gi|9294626|dbj|BAB02965.1| dem protein [Arabidopsis
  misc_feature (1)..(466): Homolog of NCBI NO: 729273 NR Description: CYPRO4 PROTEIN >gi|322804|pir||S28592 cypro4
  misc_feature (1)..(411): Homolog of NCBI NO: 28829296 NR Description: similar to hypothetical protein
  misc_feature (159)..(411): Homolog of NCBI NO: 7491392 NR Description: hypothetical protein SPBC1685.14c - fission yeast
  misc_feature (159)..(411): Homolog of NCBI NO: 19112010 NR Description: hypothetical protein [Schizosaccharomyces pombe]
  misc_feature (168)..(411): Homolog of NCBI NO: 40744400 NR Description: hypothetical protein AN3005.2 [Aspergillus
  misc_feature (251)..(406): Homolog of NCBI NO: 29250423 NR Description: GLP_39_35815_38013 [Giardia lamblia ATCC 50803]
MKFASSEDFSVFVSSYNNCLFENNHGVEFNEANKAKIYGKDFIGWANPEAADDSMWEDADDILLQSPGGGSATPARDTQDLTEAFEEATSEGIHSLALGALDNSFLVGDSGIQVFKNMRQGIQGKGVCVNFEPGYGRTHSSAPKKALLMRAETNMLLMSPMSQTPHSRGIHQLDIETGKIISEWKFEKDGVDISMSDITNDGKGAQLDPSASTFLGLDNNRLCRWDMRDRYGMVQDLATANTPVLNWAQGHQFSRGTNFQCFATTGDGSIVVGSLDGKIRLYSSNTMRQAKTAFPGLGAPVTHVDATFDGKWIVGTTDTYLIVICTLFTDKSGKTKTGFEGRMGNKIAAPRLLKLRPLDAHLAGSDNKFRNAQFSWVTEDGKQERHVVATVGKFSVIWNFQQVKNGSHECYHDQEGLKKCYCYKIVLRNESIVDSRFMNDNFAISGSPEAPLVIATPMKVSSFSLSSKR

SEQ ID NO: 80320 - DNA, 1107 bp, Arabidopsis thaliana
  misc_feature (1)..(1107): Ceres Seq. ID no. 12655357
  misc_feature: MA Experiment ID: 20000355 Result: Down-regulated in Transcription
  misc_feature: MA Experiment 20000355 PARAMETER Experiment Name: At_Siliques_Sub_P Parameter: Age (day) Value: 21
  misc_feature: MA Experiment 20000355 PARAMETER Experiment Name: At_Siliques_Sub_P Parameter: Organism Value: A. thaliana
  misc_feature: MA Experiment 20000355 PARAMETER Experiment Name: At_Siliques_Sub_P Parameter: Plant Line Value: WS
  misc_feature: MA Experiment 20000355 PARAMETER Experiment Name: At_Siliques_Sub_P Parameter: Tissue Value: Less Than 5mm Siliques vs. Whole Plant
  misc_feature: MA Experiment ID: 20000440 Result: Down-regulated in Transcription
  misc_feature: MA Experiment 20000440 PARAMETER Experiment Name: At_Closed-Flower__Sub_P Parameter: Tissue Value: Closed Flower vs. Whole Plant
atggagatgtctagaggaagcaacagttttgacaataagaagcctagttgccaaagaggtcactggagacctgttgaagatgacaatctccggcaactcgttgaacaatacggtcccaagaactggaattttattgctcaacatctctatggaagatcagggaaaagctgtagattaagatggtacaaccaacttgatccaaacatcaccaagaaacccttcaccgaggaggaagaagagagactgcttaaagctcatcggatccaagggaatcgttgggcctccatagcccgactgttccccgggaggaccgacaacgctgtcaaaaaccattttcatgtcatcatggctagacgcaaacgggaaaacttctcttccacggctacttctacgttcaaccaaacttggcatactgttttgagccctagttctagtcttacaaggctaaatagatcccatttcgggctatggaggtatcgaaaggataagagttgcggtctctggccttactcttttgtttcaccacctacgaatggtcaatttggatcttcatctgtctctaacgtacaccacgaaatttatcttgagaggagaaagtcgaaagagttggtggatcctcagaattacacatttcatgcagccacaccagatcataagatgacttcaaatgaagatggaccatccatgggagatgatggtgagaagaacgatgttactttcattgattttcttggtgttggattagcttcttaggttataacatcacaagtcaaagcttttaagggtttctatcattagggttaggcatcattttcagccttttgcttccttaaactctcatatggatcttctatcaattataactctcatttcctatatcattcaaatatatacatatccataacatgtaggtgtgtatctatacgtgtatcacatgcacttaattaagattggtgaatatacatacacatataagtttgtctatatcatcagtatattgcatgcatggtttattgtttgatacagaatcatgtaacaaatacgtatacacaaagatatgctcaaagaaagatatgctaactaacttttctaagtgtatttagaccc

SEQ ID NO: 80321 - protein, 250 aa, Arabidopsis thaliana
  peptide (1)..(250): Ceres Seq. ID no. 12655358
  misc_feature (19)..(65): Pfam Name: Myb-like DNA-binding domain Pfam Description: Myb-like DNA-binding domain
  misc_feature (1)..(250): Homolog of NCBI NO: 15234199 NR Description: myb family transcription factor; protein id:
  misc_feature (80)..(250): Homolog of NCBI NO: 11358554 NR Description: myb-related transcription factor MYB69 [imported] Arabidopsis thaliana (fragment) >gi|3941496|gb|AAC83624.1|
  misc_feature (17)..(247): Homolog of NCBI NO: 15219462 NR Description: myb family transcription factor(MYB54); protein
  misc_feature (17)..(247): Homolog of NCBI NO: 11358543 NR Description: myb-related transcription factor MYB54 [imported] Arabidopsis thaliana >gi|3941472|gb|AAC83612.1| putative
  misc_feature (17)..(122): Homolog of NCBI NO: 15220910 NR Description: myb family trnscription factor; protein id: supported by cDNA: 267121., supported by cDNA: gi_3941467
  misc_feature (17)..(122): Homolog of NCBI NO: 21554916 NR Description: myb-like protein, putative [Arabidopsis thaliana]
  misc_feature (17)..(122): Homolog of NCBI NO: 25513679 NR Description: F2H15.17 protein - Arabidopsis thaliana
  misc_feature (16)..(248): Homolog of NCBI NO: 6979341 NR Description: myb-like protein [Oryza sativa]
  misc_feature (17)..(122): Homolog of NCBI NO: 11358541 NR Description: myb-related transcription factor MYB52 [imported] Arabidopsis thaliana >gi|3941468|gb|AAC83610.1| putative
  misc_feature (17)..(250): Homolog of NCBI NO: 21321780 NR Description: putative Myb/Myb-related protein [Oryza sativa
MEMSRGSNSFDNKKPSCQRGHWRPVEDDNLRQLVEQYGPKNWNFIAQHLYGRSGKSCRLRWYNQLDPNITKKPFTEEEEERLLKAHRIQGNRWASIARLFPGRTDNAVKNHFHVIMARRKRENFSSTATSTFNQTWHTVLSPSSSLTRLNRSHFGLWRYRKDKSCGLWPYSFVSPPTNGQFGSSSVSNVHHEIYLERRKSKELVDPQNYTFHAATPDHKMTSNEDGPSMGDDGEKNDVTFIDFLGVGLAS

SEQ ID NO: 80322 - protein, 248 aa, Arabidopsis thaliana
  peptide (1)..(248): Ceres Seq. ID no. 12655359
  misc_feature (17)..(63): Pfam Name: Myb-like DNA-binding domain Pfam Description: Myb-like DNA-binding domain
  misc_feature (1)..(248): Homolog of NCBI NO: 15234199 NR Description: myb family transcription factor; protein id:
  misc_feature (78)..(248): Homolog of NCBI NO: 11358554 NR Description: myb-related transcription factor MYB69 [imported] Arabidopsis thaliana (fragment) >gi|3941496|gb|AAC83624.1|
  misc_feature (15)..(245): Homolog of NCBI NO: 15219462 NR Description: myb family transcription factor(MYB54); protein
  misc_feature (15)..(245): Homolog of NCBI NO: 11358543 NR Description: myb-related transcription factor MYB54 [imported] Arabidopsis thaliana >gi|3941472|gb|AAC83612.1| putative
  misc_feature (15)..(120): Homolog of NCBI NO: 15220910 NR Description: myb family trnscription factor; protein id: supported by cDNA: 267121., supported by cDNA: gi_3941467
  misc_feature (15)..(120): Homolog of NCBI NO: 21554916 NR Description: myb-like protein, putative [Arabidopsis thaliana]
  misc_feature (15)..(120): Homolog of NCBI NO: 25513679 NR Description: F2H15.17 protein - Arabidopsis thaliana
  misc_feature (14)..(246): Homolog of NCBI NO: 6979341 NR Description: myb-like protein [Oryza sativa]
  misc_feature (15)..(120): Homolog of NCBI NO: 11358541 NR Description: myb-related transcription factor MYB52 [imported] Arabidopsis thaliana >gi|3941468|gb|AAC83610.1| putative
  misc_feature (15)..(248): Homolog of NCBI NO: 21321780 NR Description: putative Myb/Myb-related protein [Oryza sativa
MSRGSNSFDNKKPSCQRGHWRPVEDDNLRQLVEQYGPKNWNFIAQHLYGRSGKSCRLRWYNQLDPNITKKPFTEEEEERLLKAHRIQGNRWASIARLFPGRTDNAVKNHFHVIMARRKRENFSSTATSTFNQTWHTVLSPSSSLTRLNRSHFGLWRYRKDKSCGLWPYSFVSPPTNGQFGSSSVSNVHHEIYLERRKSKELVDPQNYTFHAATPDHKMTSNEDGPSMGDDGEKNDVTFIDFLGVGLAS

SEQ ID NO: 80323 - protein, 135 aa, Arabidopsis thaliana
  peptide (1)..(135): Ceres Seq. ID no. 12655360
  misc_feature (1)..(135): Homolog of NCBI NO: 15234199 NR Description: myb family transcription factor; protein id:
  misc_feature (1)..(135): Homolog of NCBI NO: 11358554 NR Description: myb-related transcription factor MYB69 [imported] Arabidopsis thaliana (fragment) >gi|3941496|gb|AAC83624.1|
  misc_feature (1)..(132): Homolog of NCBI NO: 15219462 NR Description: myb family transcription factor(MYB54); protein
  misc_feature (1)..(132): Homolog of NCBI NO: 11358543 NR Description: myb-related transcription factor MYB54 [imported] Arabidopsis thaliana >gi|3941472|gb|AAC83612.1| putative
  misc_feature (1)..(133): Homolog of NCBI NO: 6979341 NR Description: myb-like protein [Oryza sativa]
  misc_feature (1)..(135): Homolog of NCBI NO: 21321780 NR Description: putative Myb/Myb-related protein [Oryza sativa
  misc_feature (1)..(11): Homolog of NCBI NO: 15222362 NR Description: MYB-family transcription factor, putative; id: At1g69560.1, supported by cDNA: gi_7644365 [Arabidopsis
  misc_feature (1)..(11): Homolog of NCBI NO: 18396049 NR Description: myb-related protein, putative; protein id: supported by cDNA: gi_13430157 [Arabidopsis thaliana]
  misc_feature (1)..(11): Homolog of NCBI NO: 25403271 NR Description: protein T24P13.16 [imported] - Arabidopsis >gi|9295726|gb|AAF87032.1|AC006535_10 T24P13.16 [Arabidopsis
  misc_feature (1)..(35): Homolog of NCBI NO: 18406019 NR Description: expressed protein; protein id: At3g29020.1, by cDNA: gi_9864076 [Arabidopsis thaliana]
MARRKRENFSSTATSTFNQTWHTVLSPSSSLTRLNRSHFGLWRYRKDKSCGLWPYSFVSPPTNGQFGSSSVSNVHHEIYLERRKSKELVDPQNYTFHAATPDHKMTSNEDGPSMGDDGEKNDVTFIDFLGVGLAS

SEQ ID NO: 80324 - DNA, 2925 bp, Arabidopsis thaliana
  misc_feature (1)..(2925): Ceres Seq. ID no. 12655377
  misc_feature: MA Experiment ID: 20000173 Result: Down-regulated in Transcription
  misc_feature: MA Experiment 20000173 PARAMETER Experiment Name: At_42deg_Heat_P Parameter: Age (day) Value: 14
  misc_feature: MA Experiment 20000173 PARAMETER Experiment Name: At_42deg_Heat_P Parameter: Organism Value: A. thaliana
  misc_feature: MA Experiment 20000173 PARAMETER Experiment Name: At_42deg_Heat_P Parameter: Plant Line Value: WS
  misc_feature: MA Experiment 20000173 PARAMETER Experiment Name: At_42deg_Heat_P Parameter: Temperature (deg C) Value: 42 vs. 22
  misc_feature: MA Experiment 20000173 PARAMETER Experiment Name: At_42deg_Heat_P Parameter: Timepoint (hr) Value: 6
  misc_feature: MA Experiment 20000173 PARAMETER Experiment Name: At_42deg_Heat_P Parameter: Tissue Value: Aerial
  misc_feature: MA Experiment ID: 20000179 Result: Up-regulated in Transcription
  misc_feature: MA Experiment 20000179 PARAMETER Experiment Name: At_Germinating_Seeds_P Parameter: Age (hr) Value: 6 vs. 0
  misc_feature: MA Experiment 20000179 PARAMETER Experiment Name: At_Germinating_Seeds_P Parameter: Tissue Value: Germinating Seeds
  misc_feature: MA Experiment ID: 20000180 Result: Up-regulated in Transcription
  misc_feature: MA Experiment 20000180 PARAMETER Experiment Name: At_Germinating_Seeds_P Parameter: Age (hr) Value: 24 vs. 0
  misc_feature: MA Experiment 20000180 PARAMETER Experiment Name: At_Germinating_Seeds_P Parameter: Tissue Value: Germinating Seeds
accaattccaatcctgtttccttggatcagagatacgaatctgaatcacaatctcgagatcttcagtgttttccaacggtgattgatgtttcacgtggaagaagaaagcagtggaggcgatgggtctgagattgatgaggagtttggcggagacgattcaacgacgtcattgtcgcgatgggtgttcgatgagaaagatgattatgaggttaatgaagattacgacgatgatggatatgatgagcataatcacccggaaatggattccgatgaggaggatgacaatgtggagcagcgtttgattcgcactagccctgccgttgactctttcgatgtagatgctcttgagattcctggaactcagaaaaacgaaatcgaggacactggtataggaaagaaactcatacttgctttgcagacacttggggttgtatttggtgatattggaactagcccattgtataccttcactgtcatgttcagaagatctccaattaacgacaaagaagatattattggagccttgtcattggttatatacactttaatattgattcctcttgtaaagtatgtacattttgttctttgggccaatgacgatggcgaaggtgggacgtttgctttgtattcgttgatctgccggcatgcaaatgttagccttatcccaaatcaacttccatcagatgctcgcatatcaggctttggtttgaaggttccgtctccagaacttgaaagatcattgataattaaagaaagacttgaggcgtcaatggccttgaaaaagcttcttctgattttagttcttgccggcactgctatggtgattgctgatgctgttgttacgccagcaatgtcagtaatgtctgctatcggtggtctgaaggttggagttggtgttatagaacaagatcaggtggtcgtgatatcagtcagctttcttgtgatcttgttcagtgtacaaaaatatggaaccagcaaattggggcttgttttgggtcctgctttacttctgtggtttttttgtctagcgggcattggaatttacaacctcgtaaaatatgacagcagcgtttttaaagcgttcaatcctgcatatatctatttctttttcaagagaaactctgtaaatgcttggtatgcacttgggggttgcgttttatgtgcaactggatcggaggccatgtttgcagatcttagctatttctctgttcactctatccagcttacttttatccttctggtgttaccttgcctcttgctgggttatttgggtcaagccgcatacctctctgaaaacttcagcgctgccggggatgctttcttttcgtcagttccaagttctttgttctggccagtctttctcatttctaatgttgctgctttaattgccagtcgtgcaatgacaacagccacatttacatgcatcaaacagtcaatagcactaggctgtttcccacgtcttaaaatcattcacacctcaaagaaattcattggacagatttatataccggttcttaactggtcccttctggtggtgtgtctgatcgttgtctgctctacctcaaatatcttcgcgattggaaacgcttatggcatcgcagagctgggaattatgatgactacaacaattttggtgacccttatcatgcttcttatctggcagacgaacatcatagttgtgagcatgtttgcaattgtttccctgatagtcgaactggttttcttctcatccgtttgttcaagtgtggctgatggaagttggataatcttggtttttgctacaattatgtttctcataatgtttgtttggaactacgggagtaaactgaagtatgaaactgaagtccagaaaaagctaccaatggacctactacgagaactgggcagtaaccttgggacaattagagcacccggtattggtctactttataatgagctagctaaaggagttccggcaatatttggtcattttctaaccacccttcctgcaatccattccatggttatcttcgtgtgtataaagtatgtccctgttccaagtgtgcctcagaccgagagatttcttttcagacgtgtatgcccaagaagctatcatttattccgctgtgtagccaggtatggatacaaagatgtgcggaaggaaagtcaccaggcgtttgagcagatactgattgagagtctagaaaaatttatacgtaaggaagcacaggagcgtgcacttgagagtgacggagaccataatgatacagattctgaggatgatacgactctgtccagagttctgatagcacccaatggaagtgtgtattcacttggagtgcctctcttagctgagcacatgaattcgtcaaacaagcgacccatggagagaagaaaggccagcatagattttggggcaggtccttcatcggcgttggatgtggagcagagtctagaaaaagaattgtcgtttatacacaaagcgaaagagtcaggggtggtgtatctactgggacatggggacataagggctactaaggattcttggtttctgaagaagctggtaataaattacttgtatgctttcttgaggaagaactccaggagagggataacaaacctaagcgttccgcatacacatttgatgcaagttggaatgacttatatggtatgaacaagaccccgatcaaactactggttttcatctactcgcaagtctcatgaattgtcgaagaacatgaaacacttaccaattcaagagattttttttttcttttacacattgttgcaaaagtgtgatggagttataaaagtacaggagaaacaaaatgatttttttgtattgagagttgctatttgattctgtgtttgttatttattgattgatttgtattggcttgtcccagtcttgagtattggaatatagaatgaaggacttgctcttgc

SEQ ID NO: 80325 - protein, 855 aa, Arabidopsis thaliana
  peptide (1)..(855): Ceres Seq. ID no. 12655378
  misc_feature (41)..(855): Homolog of NCBI NO: 38345796 NR Description: OSJNBa0085I10.13 [Oryza sativa (japonica
  misc_feature (97)..(855): Homolog of NCBI NO: 18250714 NR Description: putative potasium transporter [Oryza sativa
  misc_feature (21)..(855): Homolog of NCBI NO: 18138061 NR Description: putative potassium transporter [Vicia faba]
  misc_feature (60)..(855): Homolog of NCBI NO: 15219006 NR Description: potassium transporter, putative; protein id: [Arabidopsis thaliana] >gi|7488029|pir||T02268 potassium
  misc_feature (94)..(676): Homolog of NCBI NO: 18250712 NR Description: putative potasium transporter [Oryza sativa
  misc_feature (106)..(855): Homolog of NCBI NO: 18250706 NR Description: putative potasium transporter [Oryza sativa
  misc_feature (218)..(855): Homolog of NCBI NO: 38568028 NR Description: OSJNBa0070C17.23 [Oryza sativa (japonica
  misc_feature (106)..(174): Homolog of NCBI NO: 38568028 NR Description: OSJNBa0070C17.23 [Oryza sativa (japonica
  misc_feature (59)..(855): Homolog of NCBI NO: 30017546 NR Description: putative potassium transporter [Oryza sativa
  misc_feature (106)..(853): Homolog of NCBI NO: 30686261 NR Description: potassium transporter (KUP4/KT3/TRH1/POT3) thaliana] >gi|11181958|emb|CAC16137.1| tiny root hair 1 protein thaliana] >gi|11181960|emb|CAC16138.1| tiny root hair 1 protein
MFHVEEESSGGDGSEIDEEFGGDDSTTSLSRWVFDEKDDYEVNEDYDDDGYDEHNHPEMDSDEEDDNVEQRLIRTSPAVDSFDVDALEIPGTQKNEIEDTGIGKKLILALQTLGVVFGDIGTSPLYTFTVMFRRSPINDKEDIIGALSLVIYTLILIPLVKYVHFVLWANDDGEGGTFALYSLICRHANVSLIPNQLPSDARISGFGLKVPSPELERSLIIKERLEASMALKKLLLILVLAGTAMVIADAVVTPAMSVMSAIGGLKVGVGVIEQDQVVVISVSFLVILFSVQKYGTSKLGLVLGPALLLWFFCLAGIGIYNLVKYDSSVFKAFNPAYIYFFFKRNSVNAWYALGGCVLCATGSEAMFADLSYFSVHSIQLTFILLVLPCLLLGYLGQAAYLSENFSAAGDAFFSSVPSSLFWPVFLISNVAALIASRAMTTATFTCIKQSIALGCFPRLKIIHTSKKFIGQIYIPVLNWSLLVVCLIVVCSTSNIFAIGNAYGIAELGIMMTTTILVTLIMLLIWQTNIIVVSMFAIVSLIVELVFFSSVCSSVADGSWIILVFATIMFLIMFVWNYGSKLKYETEVQKKLPMDLLRELGSNLGTIRAPGIGLLYNELAKGVPAIFGHFLTTLPAIHSMVIFVCIKYVPVPSVPQTERFLFRRVCPRSYHLFRCVARYGYKDVRKESHQAFEQILIESLEKFIRKEAQERALESDGDHNDTDSEDDTTLSRVLIAPNGSVYSLGVPLLAEHMNSSNKRPMERRKASIDFGAGPSSALDVEQSLEKELSFIHKAKESGVVYLLGHGDIRATKDSWFLKKLVINYLYAFLRKNSRRGITNLSVPHTHLMQVGMTYMV

SEQ ID NO: 80326 - protein, 797 aa, Arabidopsis thaliana
  peptide (1)..(797): Ceres Seq. ID no. 12655379
  misc_feature (1)..(797): Homolog of NCBI NO: 38345796 NR Description: OSJNBa0085I10.13 [Oryza sativa (japonica
  misc_feature (39)..(797): Homolog of NCBI NO: 18250714 NR Description: putative potasium transporter [Oryza sativa
  misc_feature (1)..(797): Homolog of NCBI NO: 18138061 NR Description: putative potassium transporter [Vicia faba]
  misc_feature (2)..(797): Homolog of NCBI NO: 15219006 NR Description: potassium transporter, putative; protein id: [Arabidopsis thaliana] >gi|7488029|pir||T02268 potassium
  misc_feature (36)..(618): Homolog of NCBI NO: 18250712 NR Description: putative potasium transporter [Oryza sativa
  misc_feature (48)..(797): Homolog of NCBI NO: 18250706 NR Description: putative potasium transporter [Oryza sativa
  misc_feature (160)..(797): Homolog of NCBI NO: 38568028 NR Description: OSJNBa0070C17.23 [Oryza sativa (japonica
  misc_feature (48)..(116): Homolog of NCBI NO: 38568028 NR Description: OSJNBa0070C17.23 [Oryza sativa (japonica
  misc_feature (1)..(797): Homolog of NCBI NO: 30017546 NR Description: putative potassium transporter [Oryza sativa
  misc_feature (48)..(795): Homolog of NCBI NO: 30686261 NR Description: potassium transporter (KUP4/KT3/TRH1/POT3) thaliana] >gi|11181958|emb|CAC16137.1| tiny root hair 1 protein thaliana] >gi|11181960|emb|CAC16138.1| tiny root hair 1 protein
MDSDEEDDNVEQRLIRTSPAVDSFDVDALEIPGTQKNEIEDTGIGKKLILALQTLGVVFGDIGTSPLYTFTVMFRRSPINDKEDIIGALSLVIYTLILIPLVKYVHFVLWANDDGEGGTFALYSLICRHANVSLIPNQLPSDARISGFGLKVPSPELERSLIIKERLEASMALKKLLLILVLAGTAMVIADAVVTPAMSVMSAIGGLKVGVGVIEQDQVVVISVSFLVILFSVQKYGTSKLGLVLGPALLLWFFCLAGIGIYNLVKYDSSVFKAFNPAYIYFFFKRNSVNAWYALGGCVLCATGSEAMFADLSYFSVHSIQLTFILLVLPCLLLGYLGQAAYLSENFSAAGDAFFSSVPSSLFWPVFLISNVAALIASRAMTTATFTCIKQSIALGCFPRLKIIHTSKKFIGQIYIPVLNWSLLVVCLIVVCSTSNIFAIGNAYGIAELGIMMTTTILVTLIMLLIWQTNIIVVSMFAIVSLIVELVFFSSVCSSVADGSWIILVFATIMFLIMFVWNYGSKLKYETEVQKKLPMDLLRELGSNLGTIRAPGIGLLYNELAKGVPAIFGHFLTTLPAIHSMVIFVCIKYVPVPSVPQTERFLFRRVCPRSYHLFRCVARYGYKDVRKESHQAFEQILIESLEKFIRKEAQERALESDGDHNDTDSEDDTTLSRVLIAPNGSVYSLGVPLLAEHMNSSNKRPMERRKASIDFGAGPSSALDVEQSLEKELSFIHKAKESGVVYLLGHGDIRATKDSWFLKKLVINYLYAFLRKNSRRGITNLSVPHTHLMQVGMTYMV

SEQ ID NO: 80327 - protein, 725 aa, Arabidopsis thaliana
  peptide (1)..(725): Ceres Seq. ID no. 12655380
  misc_feature (1)..(725): Homolog of NCBI NO: 38345796 NR Description: OSJNBa0085I10.13 [Oryza sativa (japonica
  misc_feature (1)..(725): Homolog of NCBI NO: 18250714 NR Description: putative potasium transporter [Oryza sativa
  misc_feature (1)..(725): Homolog of NCBI NO: 18138061 NR Description: putative potassium transporter [Vicia faba]
  misc_feature (1)..(725): Homolog of NCBI NO: 15219006 NR Description: potassium transporter, putative; protein id: [Arabidopsis thaliana] >gi|7488029|pir||T02268 potassium
  misc_feature (1)..(546): Homolog of NCBI NO: 18250712 NR Description: putative potasium transporter [Oryza sativa
  misc_feature (1)..(725): Homolog of NCBI NO: 18250706 NR Description: putative potasium transporter [Oryza sativa
  misc_feature (88)..(725): Homolog of NCBI NO: 38568028 NR Description: OSJNBa0070C17.23 [Oryza sativa (japonica
  misc_feature (1)..(44): Homolog of NCBI NO: 38568028 NR Description: OSJNBa0070C17.23 [Oryza sativa (japonica
  misc_feature (1)..(725): Homolog of NCBI NO: 30017546 NR Description: putative potassium transporter [Oryza sativa
  misc_feature (1)..(723): Homolog of NCBI NO: 30686261 NR Description: potassium transporter (KUP4/KT3/TRH1/POT3) thaliana] >gi|11181958|emb|CAC16137.1| tiny root hair 1 protein thaliana] >gi|11181960|emb|CAC16138.1| tiny root hair 1 protein
MFRRSPINDKEDIIGALSLVIYTLILIPLVKYVHFVLWANDDGEGGTFALYSLICRHANVSLIPNQLPSDARISGFGLKVPSPELERSLIIKERLEASMALKKLLLILVLAGTAMVIADAVVTPAMSVMSAIGGLKVGVGVIEQDQVVVISVSFLVILFSVQKYGTSKLGLVLGPALLLWFFCLAGIGIYNLVKYDSSVFKAFNPAYIYFFFKRNSVNAWYALGGCVLCATGSEAMFADLSYFSVHSIQLTFILLVLPCLLLGYLGQAAYLSENFSAAGDAFFSSVPSSLFWPVFLISNVAALIASRAMTTATFTCIKQSIALGCFPRLKIIHTSKKFIGQIYIPVLNWSLLVVCLIVVCSTSNIFAIGNAYGIAELGIMMTTTILVTLIMLLIWQTNIIVVSMFAIVSLIVELVFFSSVCSSVADGSWIILVFATIMFLIMFVWNYGSKLKYETEVQKKLPMDLLRELGSNLGTIRAPGIGLLYNELAKGVPAIFGHFLTTLPAIHSMVIFVCIKYVPVPSVPQTERFLFRRVCPRSYHLFRCVARYGYKDVRKESHQAFEQILIESLEKFIRKEAQERALESDGDHNDTDSEDDTTLSRVLIAPNGSVYSLGVPLLAEHMNSSNKRPMERRKASIDFGAGPSSALDVEQSLEKELSFIHKAKESGVVYLLGHGDIRATKDSWFLKKLVINYLYAFLRKNSRRGITNLSVPHTHLMQVGMTYMV

SEQ ID NO: 80328 - DNA, 1386 bp, Arabidopsis thaliana
  misc_feature (1)..(1386): Ceres Seq. ID no. 12655396
  misc_feature: MA Experiment ID: 108434 Result: Up-regulated in Transcription
  misc_feature: MA Experiment 108434 PARAMETER Experiment Name: At_Root_Tips_cDNA_P Parameter: Tissue Value: Root Tips
  misc_feature: MA Experiment ID: 108462 Result: Down-regulated in Transcription
  misc_feature: MA Experiment 108462 PARAMETER Experiment Name: At_Germinating_Seeds_cDNA_P Parameter: Age (day) Value: 2 vs. 0
  misc_feature: MA Experiment 108462 PARAMETER Experiment Name: At_Germinating_Seeds_cDNA_P Parameter: Tissue Value: Germinating Seeds
  misc_feature: MA Experiment ID: 108463 Result: Down-regulated in Transcription
  misc_feature: MA Experiment 108463 PARAMETER Experiment Name: At_Germinating_Seeds_cDNA_P Parameter: Age (day) Value: 3 vs. 0
  misc_feature: MA Experiment 108463 PARAMETER Experiment Name: At_Germinating_Seeds_cDNA_P Parameter: Tissue Value: Germinating Seeds
  misc_feature: MA Experiment ID: 108464 Result: Down-regulated in Transcription
  misc_feature: MA Experiment 108464 PARAMETER Experiment Name: At_Germinating_Seeds_cDNA_P Parameter: Age (day) Value: 4 vs. 0
  misc_feature: MA Experiment 108464 PARAMETER Experiment Name: At_Germinating_Seeds_cDNA_P Parameter: Tissue Value: Germinating Seeds
  misc_feature: MA Experiment ID: 108595 Result: Down-regulated in Transcription
  misc_feature: MA Experiment 108595 PARAMETER Experiment Name: At_Ler-pi_Ovule_cDNA_P Parameter: Plant Line Value: null
  misc_feature: MA Experiment ID: 20000087 Result: Down-regulated in Transcription
  misc_feature: MA Experiment 20000087 PARAMETER Experiment Name: At_100uM_ABA_Mutants_cDNA_P Parameter: Plant Line Value: WS
  misc_feature: MA Experiment 20000087 PARAMETER Experiment Name: At_100uM_ABA_Mutants_cDNA_P Parameter: Timepoint (hr) Value: 6
  misc_feature: MA Experiment 20000087 PARAMETER Experiment Name: At_100uM_ABA_Mutants_cDNA_P Parameter: Tissue Value: Aerial
  misc_feature: MA Experiment 20000087 PARAMETER Experiment Name: At_100uM_ABA_Mutants_cDNA_P Parameter: Treatment Value: 100uM ABA vs. No Treatment
atgtcgtcgacccatcagttagtttcttcgatgatctcttcttcctcatccactttcttagccccttcaaattttaatctcagaactcgaaatgcttgcttacccatggcaaaacgggtcaatacttgcaaatgtgttgctacgccgcaagagaagatcgagtataagaccaaagtgtcacggaattcaaacatgtccaaacttcaggctggatacctattcccggagattgcaagaagaaggtctgcacacttgttgaaatatccagatgcacaagttataagtcttggaataggcgacacaactgagccaattcctgaagtgatcacttctgctatggcaaagaaagctcatgagttgtcaacaatagagggatatagtggttatggtgctgaacaaggtgcaaagccactgagagctgctattgcgaaaacattctacggtggccttggcataggggatgatgacgtttttgtttctgatggagctaaatgtgatatctcacgtctccaggttatgtttggttccaatgttacaattgctgttcaggatccttcatatccggcttatgtggactccagtgttattatgggtcagactgggcaatttaacactgatgtgcaaaagtatggaaacatcgagtacatgagatgcactccagagaatggcttctttcccgacttgtccaccgttggcaggacagatataattttcttctgttccccaaataaccctacgggtgctgctgccacgagagagcaactaacgcagttagttgagtttgcaaagaagaacggttctataatagtgtatgattccgcctatgcaatgtacatgtctgatgataacccacgatccatcttcgaaatccctggagcagaggaggtcgctatggagacagcttcgttcagcaaatatgctggtttcactggagttcgacttggttggactgtcatcccgaaaaagctactctattcagacggtttccctgttgccaaagacttcaatcggattatctgcacttgtttcaatggtgcatctaatatctctcaagctggtgctcttgcttgccttacacccgaaggacttgaggcaatgcataaggtgattggattctataaagaaaacacaaacataatcattgacacattcacatctctcgggtatgatgtatatggaggaaagaatgcgccttacgtatgggttcacttcccgaaccaaagctcatgggatgtgtttgctgagattctggagaagactcatgtggttacaactccaggaagtgggtttggaccagggggtgaagggttcgttcgtgtcagtgcctttggtcacagagagaacatcttagaggcatgtcgaagattcaagcagctttacaaatga

SEQ ID NO: 80329 - protein, 461 aa, Arabidopsis thaliana [sequence omitted]

SEQ ID NO: 80330 - protein, 451 aa, Arabidopsis thaliana; identical to SEQ ID NO: 76835
  peptide (1)..(451): Ceres Seq. ID no. 12655398
  misc_feature (138)..(450): Pfam Name: Aminotransferase class I and II Pfam Description: Aminotransferase class I and II
  misc_feature (1)..(451): Homolog of NCBI NO: 18418270 NR Description: putative protein; protein id: At4g33680.1, by cDNA: gi_15912290, supported by cDNA: gi_17529043 [Arabidopsis >gi|15912291|gb|AAL08279.1| AT4g33680/T16L1_170 [Arabidopsis
  misc_feature (26)..(451): Homolog of NCBI NO: 7447845 NR Description: probable transaminase (EC 2.6.1.-) T16L1.170 - Arabidopsis thaliana >gi|3549670|emb|CAA20581.1| putative [Arabidopsis thaliana] >gi|7270317|emb|CAB80085.1| putative
  misc_feature (3)..(451): Homolog of NCBI NO: 37703720 NR Description: putative aminotransferase AGD2 [Oryza sativa
  misc_feature (46)..(447): Homolog of NCBI NO: 37703722 NR Description: putative aminotransferase ALD1 [Oryza sativa
  misc_feature (46)..(447): Homolog of NCBI NO: 24414269 NR Description: Putative transaminase [Oryza sativa (japonica
  misc_feature (41)..(450): Homolog of NCBI NO: 18397344 NR Description: putative aspartate aminotransferase; protein id: supported by cDNA: gi_15982837 [Arabidopsis thaliana] At2g13810/F13J11.16 [Arabidopsis thaliana]
  misc_feature (47)..(450): Homolog of NCBI NO: 25315768 NR Description: probable aspartate aminotransferase [imported] -
  misc_feature (52)..(449): Homolog of NCBI NO: 24213476 NR Description: aminotransferase [Leptospira interrogans serovar str. 56601] >gi|24194250|gb|AAN47975.1|AE011264_3
  misc_feature (52)..(451): Homolog of NCBI NO: 23124300 NR Description: hypothetical protein [Nostoc punctiforme]
  misc_feature (52)..(451): Homolog of NCBI NO: 17232595 NR Description: aminotransferase [Nostoc sp. PCC 7120]

SEQ ID NO: 80331 - protein, 426 aa, Arabidopsis thaliana
  peptide (1)..(426): Ceres Seq. ID no. 12655399
  misc_feature (113)..(425): Pfam Name: Aminotransferase class I and II Pfam Description: Aminotransferase class I and II
  misc_feature (1)..(426): Homolog of NCBI NO: 18418270 NR Description: putative protein; protein id: At4g33680.1, by cDNA: gi_15912290, supported by cDNA: gi_17529043 [Arabidopsis >gi|15912291|gb|AAL08279.1| AT4g33680/T16L1_170 [Arabidopsis
  misc_feature (1)..(426): Homolog of NCBI NO: 7447845 NR Description: probable transaminase (EC 2.6.1.-) T16L1.170 - Arabidopsis thaliana >gi|3549670|emb|CAA20581.1| putative [Arabidopsis thaliana] >gi|7270317|emb|CAB80085.1| putative
  misc_feature (1)..(426): Homolog of NCBI NO: 37703720 NR Description: putative aminotransferase AGD2 [Oryza sativa
  misc_feature (21)..(422): Homolog of NCBI NO: 37703722 NR Description: putative aminotransferase ALD1 [Oryza sativa
  misc_feature (21)..(422): Homolog of NCBI NO: 24414269 NR Description: Putative transaminase [Oryza sativa (japonica
  misc_feature (16)..(425): Homolog of NCBI NO: 18397344 NR Description: putative aspartate aminotransferase; protein id: supported by cDNA: gi_15982837 [Arabidopsis thaliana] At2g13810/F13J11.16 [Arabidopsis thaliana]
  misc_feature (22)..(425): Homolog of NCBI NO: 25315768 NR Description: probable aspartate aminotransferase [imported] -
  misc_feature (27)..(424): Homolog of NCBI NO: 24213476 NR Description: aminotransferase [Leptospira interrogans serovar str. 56601] >gi|24194250|gb|AAN47975.1|AE011264_3
  misc_feature (27)..(426): Homolog of NCBI NO: 23124300 NR Description: hypothetical protein [Nostoc punctiforme]
  misc_feature (27)..(426): Homolog of NCBI NO: 17232595 NR Description: aminotransferase [Nostoc sp. PCC 7120]
MAKRVNTCKCVATPQEKIEYKTKVSRNSNMSKLQAGYLFPEIARRRSAHLLKYPDAQVISLGIGDTTEPIPEVITSAMAKKAHELSTIEGYSGYGAEQGAKPLRAAIAKTFYGGLGIGDDDVFVSDGAKCDISRLQVMFGSNVTIAVQDPSYPAYVDSSVIMGQTGQFNTDVQKYGNIEYMRCTPENGFFPDLSTVGRTDIIFFCSPNNPTGAAATREQLTQLVEFAKKNGSIIVYDSAYAMYMSDDNPRSIFEIPGAEEVAMETASFSKYAGFTGVRLGWTVIPKKLLYSDGFPVAKDFNRIICTCFNGASNISQAGALACLTPEGLEAMHKVIGFYKENTNIIIDTFTSLGYDVYGGKNAPYVWVHFPNQSSWDVFAEILEKTHVVTTPGSGFGPGGEGFVRVSAFGHRENILEACRRFKQLYK

SEQ ID NO: 80332 - DNA, 1713 bp, Arabidopsis thaliana
  misc_feature (1)..(1713): Ceres Seq. ID no. 12655400
  misc_feature: MA Experiment ID: 20000173 Result: Down-regulated in Transcription
  misc_feature: MA Experiment 20000173 PARAMETER Experiment Name: At_42deg_Heat_P Parameter: Age (day) Value: 14
  misc_feature: MA Experiment 20000173 PARAMETER Experiment Name: At_42deg_Heat_P Parameter: Organism Value: A. thaliana
  misc_feature: MA Experiment 20000173 PARAMETER Experiment Name: At_42deg_Heat_P Parameter: Plant Line Value: WS
  misc_feature: MA Experiment 20000173 PARAMETER Experiment Name: At_42deg_Heat_P Parameter: Temperature (deg C) Value: 42 vs. 22
  misc_feature: MA Experiment 20000173 PARAMETER Experiment Name: At_42deg_Heat_P Parameter: Timepoint (hr) Value: 6
  misc_feature: MA Experiment 20000173 PARAMETER Experiment Name: At_42deg_Heat_P Parameter: Tissue Value: Aerial
  misc_feature: MA Experiment ID: 20000180 Result: Down-regulated in Transcription
  misc_feature: MA Experiment 20000180 PARAMETER Experiment Name: At_Germinating_Seeds_P Parameter: Age (hr) Value: 24 vs. 0
  misc_feature: MA Experiment 20000180 PARAMETER Experiment Name: At_Germinating_Seeds_P Parameter: Tissue Value: Germinating Seeds
  misc_feature: MA Experiment ID: 20000184 Result: Down-regulated in Transcription
  misc_feature: MA Experiment 20000184 PARAMETER Experiment Name: At_Shoots__P Parameter: Age (day) Value: 7
  misc_feature: MA Experiment 20000184 PARAMETER Experiment Name: At_Shoots__P Parameter: Tissue Value: Shoots vs. Whole Plant
  misc_feature: MA Experiment ID: 20000185 Result: Down-regulated in Transcription
  misc_feature: MA Experiment 20000185 PARAMETER Experiment Name: At_Roots__P Parameter: Age (day) Value: 7 vs. 21
  misc_feature: MA Experiment 20000185 PARAMETER Experiment Name: At_Roots__P Parameter: Organism Value: A. thaliana
  misc_feature: MA Experiment 20000185 PARAMETER Experiment Name: At_Roots__P Parameter: Tissue Value: Roots vs. Whole Plant
  misc_feature: MA Experiment ID: 20000286 Result: Up-regulated in Transcription
  misc_feature: MA Experiment 20000286 PARAMETER Experiment Name: At_Open_Flower_P Parameter: Age (day) Value: 21
  misc_feature: MA Experiment 20000286 PARAMETER Experiment Name: At_Open_Flower_P Parameter: Plant Line Value: WS
  misc_feature: MA Experiment 20000286 PARAMETER Experiment Name: At_Open_Flower_P Parameter: Tissue Value: Half Open vs. Whole Plant
  misc_feature: MA Experiment ID: 20000437 Result: Up-regulated in Transcription
  misc_feature: MA Experiment 20000437 PARAMETER Experiment Name: At_Drought_P Parameter: Age (day) Value: 8
  misc_feature: MA Experiment 20000437 PARAMETER Experiment Name: At_Drought_P Parameter: Organism Value: A. thaliana
  misc_feature: MA Experiment 20000437 PARAMETER Experiment Name: At_Drought_P Parameter: Plant Line Value: WS
  misc_feature: MA Experiment 20000437 PARAMETER Experiment Name: At_Drought_P Parameter: Timepoint (hr) Value: 24
  misc_feature: MA Experiment 20000437 PARAMETER Experiment Name: At_Drought_P Parameter: Tissue Value: Whole Plant
  misc_feature: MA Experiment 20000437 PARAMETER Experiment Name: At_Drought_P Parameter: Treatment Value: Drought vs. No Drought
  misc_feature: MA Experiment ID: 20000438 Result: Down-regulated in Transcription
  misc_feature: MA Experiment 20000438 PARAMETER Experiment Name: At_Shoots__P Parameter: Age (day) Value: 14
  misc_feature: MA Experiment 20000438 PARAMETER Experiment Name: At_Shoots__P Parameter: Tissue Value: Shoots vs. Whole Plant
  misc_feature: MA Experiment ID: 20000495 Result: Up-regulated in Transcription
  misc_feature: MA Experiment 20000495 PARAMETER Experiment Name: At_Guard_Cells_P Parameter: Harvest Date Value: 8/2/2002
  misc_feature: MA Experiment 20000495 PARAMETER Experiment Name: At_Guard_Cells_P Parameter: Organism Value: A. thaliana
  misc_feature: MA Experiment 20000495 PARAMETER Experiment Name: At_Guard_Cells_P Parameter: Tissue Value: Guard Cells vs. Leaves
  misc_feature: MA Experiment ID: 20000794 Result: Up-regulated in Transcription
  misc_feature: MA Experiment 20000794 PARAMETER Experiment Name: At_Petals_P Parameter: Age (day) Value: 23-25 days
  misc_feature: MA Experiment 20000794 PARAMETER Experiment Name: At_Petals_P Parameter: Plant Line Value: WS
  misc_feature: MA Experiment 20000794 PARAMETER Experiment Name: At_Petals_P Parameter: Tissue Value: Petals vs. Whole plant
gttgtttgttttatcatctctccataattgcttcgatttctctgcaaagacacaacacaaaaagtgctttttttaatcagatattttctgggcttcactttaactctcttcgtgcttggttttccgatcttagtcgttactaattgagtcggagactgttcatttcctgattctgaagaaagttttggagaaggagaagatgtcaactctgcgagtgagctagggtttagtgtgttttccgatttttgagctcttggggattgttgttttctcttaaagagtcgattttgaatggcggtggagtatgtatgttgcagcccaaacttctttatacatatagctgtgattgtgtttcttgtcttgttcgctggactcatgtctggcttaacattgggtcttatgtctttgagtctcgttgatcttgaagttctcgctaaatccggtacacctgaacatcgtaaatatgcagcaaagatattgccagtggtaaagaatcagcacttgttgcttgtcactttacttatatgcaatgcagctgctatggagacgcttcctatttttcttgatggccttgtgacggcatggggtgccattttgatttcagttacattgattcttctctttggtgagattatacctcagtcgatttgttcacgttatggtttagcgattggtgcaacagtggctccgtttgtccgtgtcctagtctttatctgcttacctgttgcatggccaataagcaagttgctggactttctattgggtcatcgtcgtgcagcgctttttcgaagagctgagctgaaaacacttgtggattttcatggaaatgaggctggaaagggtggggagttgactcatgacgaaacgacaatcattgcaggagctcttgaactctctgagaaaatggtcaaagatgcaatgacaccaatatcggatatctttgtgattgatatcaatgccaaactagacagagacttgatgaacttgattcttgagaaagggcatagcagagttccagtatactatgagcagccaactaacataatcggccttgttctggtgaagaacttattaactatcaacccagatgaagaaatacctgtcaagaatgtcacgataagaaggattccaagagttccagaaatcttgcctttatatgacatattgaacgaattccagaaaggactcagccacatggctgttgttgtaagacagtgtgacaaaatccacccattaccttctaaaaatgggagtgttaaggaagcccgagtggatgtggatagtgagggaactcctactcctcaggagagaatgttaaggacaaaaagatcgcttcaaaagtggaagagctttccgaatcgagcaagttcgtttaaaggagggtcaaagagcaagaagtggtcaaaagacaatgatgcagacatcctgcaattgaatggcaatccgctgcctaaacttgctgaggaagaagaagcagtcggaatcattacgatggaggatgtcattgaagaacttctgcaggaggagatctttgacgaaactgatcaccattttgaagactcctaacacagagtgcatgaccactgaactggttatgaatgtcgaaaactttagtctttgttttcaactttcaaactgtcacttgtccggcgaatgtgtatcaatgtaggcatgaacaacaactttttctatggtttcaagatgttttctctc

SEQ ID NO: 80333 - protein, 424 aa, Arabidopsis thaliana
  peptide (1)..(424): Ceres Seq. ID no. 12655401
  misc_feature (14)..(191): Pfam Name: Domain of unknown function DUF21 Pfam Description: Domain of unknown function DUF21
  misc_feature (1)..(424): Homolog of NCBI NO: 22329131 NR Description: putative protein; protein id: At4g33700.1, by cDNA: gi_17381275, supported by cDNA: gi_20856057 [Arabidopsis >gi|17381276|gb|AAL36056.1| AT4g33700/T16L1_190 [Arabidopsis
  misc_feature (29)..(424): Homolog of NCBI NO: 7487085 NR Description: hypothetical protein T16L1.190 - Arabidopsis >gi|3549672|emb|CAA20583.1| putative protein [Arabidopsis >gi|7270319|emb|CAB80087.1| putative protein [Arabidopsis
  misc_feature (1)..(423): Homolog of NCBI NO: 30679136 NR Description: CBS domain containing protein [Arabidopsis
  misc_feature (180)..(410): Homolog of NCBI NO: 25411569 NR Description: hypothetical protein At2g14520 [imported] - thaliana >gi|4263821|gb|AAD15464.1| hypothetical protein
  misc_feature (1)..(151): Homolog of NCBI NO: 25411569 NR Description: hypothetical protein At2g14520 [imported] - thaliana >gi|4263821|gb|AAD15464.1| hypothetical protein
  misc_feature (1)..(423): Homolog of NCBI NO: 40538933 NR Description: expressed protein [Oryza sativa (japonica
  misc_feature (1)..(320): Homolog of NCBI NO: 22330087 NR Description: unknown protein; protein id: At1g47330.1, by cDNA: gi_19715639 [Arabidopsis thaliana] At1g47330/T3F24_2 [Arabidopsis thaliana]
  misc_feature (378)..(420): Homolog of NCBI NO: 22330087 NR Description: unknown protein; protein id: At1g47330.1, by cDNA: gi_19715639 [Arabidopsis thaliana] At1g47330/T3F24_2 [Arabidopsis thaliana]
  misc_feature (1)..(327): Homolog of NCBI NO: 15237264 NR Description: putative protein; protein id: At5g52790.1 thaliana] >gi|8953734|dbj|BAA98097.1|
  misc_feature (391)..(422): Homolog of NCBI NO: 15237264 NR Description: putative protein; protein id: At5g52790.1 thaliana] >gi|8953734|dbj|BAA98097.1|
MAVEYVCCSPNFFIHIAVIVFLVLFAGLMSGLTLGLMSLSLVDLEVLAKSGTPEHRKYAAKILPVVKNQHLLLVTLLICNAAAMETLPIFLDGLVTAWGAILISVTLILLFGEIIPQSICSRYGLAIGATVAPFVRVLVFICLPVAWPISKLLDFLLGHRRAALFRRAELKTLVDFHGNEAGKGGELTHDETTIIAGALELSEKMVKDAMTPISDIFVIDINAKLDRDLMNLILEKGHSRVPVYYEQPTNIIGLVLVKNLLTINPDEEIPVKNVTIRRIPRVPEILPLYDILNEFQKGLSHMAVVVRQCDKIHPLPSKNGSVKEARVDVDSEGTPTPQERMLRTKRSLQKWKSFPNRASSFKGGSKSKKWSKDNDADILQLNGNPLPKLAEEEEAVGIITMEDVIEELLQEEIFDETDHHFEDS

SEQ ID NO: 80334 - protein, 396 aa, Arabidopsis thaliana
  peptide (1)..(396): Ceres Seq. ID no. 12655402
  misc_feature (1)..(163): Pfam Name: Domain of unknown function DUF21 Pfam Description: Domain of unknown function DUF21
  misc_feature (1)..(396): Homolog of NCBI NO: 22329131 NR Description: putative protein; protein id: At4g33700.1, by cDNA: gi_17381275, supported by cDNA: gi_20856057 [Arabidopsis >gi|17381276|gb|AAL36056.1| AT4g33700/T16L1_190 [Arabidopsis
  misc_feature (1)..(396): Homolog of NCBI NO: 7487085 NR Description: hypothetical protein T16L1.190 - Arabidopsis >gi|3549672|emb|CAA20583.1| putative protein [Arabidopsis >gi|7270319|emb|CAB80087.1| putative protein [Arabidopsis
  misc_feature (1)..(395): Homolog of NCBI NO: 30679136 NR Description: CBS domain containing protein [Arabidopsis
  misc_feature (152)..(382): Homolog of NCBI NO: 25411569 NR Description: hypothetical protein At2g14520 [imported] - thaliana >gi|4263821|gb|AAD15464.1| hypothetical protein
  misc_feature (1)..(123): Homolog of NCBI NO: 25411569 NR Description: hypothetical protein At2g14520 [imported] - thaliana >gi|4263821|gb|AAD15464.1| hypothetical protein
  misc_feature (1)..(395): Homolog of NCBI NO: 40538933 NR Description: expressed protein [Oryza sativa (japonica
  misc_feature (1)..(292): Homolog of NCBI NO: 22330087 NR Description: unknown protein; protein id: At1g47330.1, by cDNA: gi_19715639 [Arabidopsis thaliana] At1g47330/T3F24_2 [Arabidopsis thaliana]
  misc_feature (350)..(392): Homolog of NCBI NO: 22330087 NR Description: unknown protein; protein id: At1g47330.1, by cDNA: gi_19715639 [Arabidopsis thaliana] At1g47330/T3F24_2 [Arabidopsis thaliana]
  misc_feature (1)..(299): Homolog of NCBI NO: 15237264 NR Description: putative protein; protein id: At5g52790.1 thaliana] >gi|8953734|dbj|BAA98097.1|
  misc_feature (363)..(394): Homolog of NCBI NO: 15237264 NR Description: putative protein; protein id: At5g52790.1 thaliana] >gi|8953734|dbj|BAA98097.1|
MSGLTLGLMSLSLVDLEVLAKSGTPEHRKYAAKILPVVKNQHLLLVTLLICNAAAMETLPIFLDGLVTAWGAILISVTLILLFGEIIPQSICSRYGLAIGATVAPFVRVLVFICLPVAWPISKLLDFLLGHRRAALFRRAELKTLVDFHGNEAGKGGELTHDETTIIAGALELSEKMVKDAMTPISDIFVIDINAKLDRDLMNLILEKGHSRVPVYYEQPTNIIGLVLVKNLLTINPDEEIPVKNVTIRRIPRVPEILPLYDILNEFQKGLSHMAVVVRQCDKIHPLPSKNGSVKEARVDVDSEGTPTPQERMLRTKRSLQKWKSFPNRASSFKGGSKSKKWSKDNDADILQLNGNPLPKLAEEEEAVGIITMEDVIEELLQEEIFDETDHHFEDS

SEQ ID NO: 80335 - protein, 388 aa, Arabidopsis thaliana
  peptide (1)..(388): Ceres Seq. ID no. 12655403
  misc_feature (1)..(155): Pfam Name: Domain of unknown function DUF21 Pfam Description: Domain of unknown function DUF21
  misc_feature (1)..(388): Homolog of NCBI NO: 22329131 NR Description: putative protein; protein id: At4g33700.1, by cDNA: gi_17381275, supported by cDNA: gi_20856057 [Arabidopsis >gi|17381276|gb|AAL36056.1| AT4g33700/T16L1_190 [Arabidopsis
  misc_feature (1)..(388): Homolog of NCBI NO: 7487085 NR Description: hypothetical protein T16L1.190 - Arabidopsis >gi|3549672|emb|CAA20583.1| putative protein [Arabidopsis >gi|7270319|emb|CAB80087.1| putative protein [Arabidopsis
  misc_feature (1)..(387): Homolog of NCBI NO: 30679136 NR Description: CBS domain containing protein [Arabidopsis
  misc_feature (144)..(374): Homolog of NCBI NO: 25411569 NR Description: hypothetical protein At2g14520 [imported] - thaliana >gi|4263821|gb|AAD15464.1| hypothetical protein
  misc_feature (1)..(115): Homolog of NCBI NO: 25411569 NR Description: hypothetical protein At2g14520 [imported] - thaliana >gi|4263821|gb|AAD15464.1| hypothetical protein
  misc_feature (1)..(387): Homolog of NCBI NO: 40538933 NR Description: expressed protein [Oryza sativa (japonica
  misc_feature (1)..(284): Homolog of NCBI NO: 22330087 NR Description: unknown protein; protein id: At1g47330.1, by cDNA: gi_19715639 [Arabidopsis thaliana] At1g47330/T3F24_2 [Arabidopsis thaliana]
  misc_feature (342)..(384): Homolog of NCBI NO: 22330087 NR Description: unknown protein; protein id: At1g47330.1, by cDNA: gi_19715639 [Arabidopsis thaliana] At1g47330/T3F24_2 [Arabidopsis thaliana]
  misc_feature (1)..(291): Homolog of NCBI NO: 15237264 NR Description: putative protein; protein id: At5g52790.1 thaliana] >gi|8953734|dbj|BAA98097.1|
  misc_feature (355)..(386): Homolog of NCBI NO: 15237264 NR Description: putative protein; protein id: At5g52790.1 thaliana] >gi|8953734|dbj|BAA98097.1|
MSLSLVDLEVLAKSGTPEHRKYAAKILPVVKNQHLLLVTLLICNAAAMETLPIFLDGLVTAWGAILISVTLILLFGEIIPQSICSRYGLAIGATVAPFVRVLVFICLPVAWPISKLLDFLLGHRRAALFRRAELKTLVDFHGNEAGKGGELTHDETTIIAGALELSEKMVKDAMTPISDIFVIDINAKLDRDLMNLILEKGHSRVPVYYEQPTNIIGLVLVKNLLTINPDEEIPVKNVTIRRIPRVPEILPLYDILNEFQKGLSHMAVVVRQCDKIHPLPSKNGSVKEARVDVDSEGTPTPQERMLRTKRSLQKWKSFPNRASSFKGGSKSKKWSKDNDADILQLNGNPLPKLAEEEEAVGIITMEDVIEELLQEEIFDETDHHFEDS

SEQ ID NO: 80336 - DNA, 519 bp, Arabidopsis thaliana
  misc_feature (1)..(519): Ceres Seq. ID no. 12655404
  misc_feature: MA Experiment ID: 20000180 Result: Up-regulated in Transcription
  misc_feature: MA Experiment 20000180 PARAMETER Experiment Name: At_Germinating_Seeds_P Parameter: Age (hr) Value: 24 vs. 0
  misc_feature: MA Experiment 20000180 PARAMETER Experiment Name: At_Germinating_Seeds_P Parameter: Tissue Value: Germinating Seeds
  misc_feature: MA Experiment ID: 20000439 Result: Up-regulated in Transcription
  misc_feature: MA Experiment 20000439 PARAMETER Experiment Name: At_Roots__P Parameter: Age (day) Value: 14 vs. 21
  misc_feature: MA Experiment 20000439 PARAMETER Experiment Name: At_Roots__P Parameter: Organism Value: A. thaliana
  misc_feature: MA Experiment 20000439 PARAMETER Experiment Name: At_Roots__P Parameter: Tissue Value: Roots vs. Whole Plant
atgtttcataaggttgctattgaaaccttggttctcctacttctcatcaattacttgacacaaatcgatgtttcctccgcacaatactctcagtatcctcagtcccatgaatatcctgacagctaccttagaccccacaacgcagcccgagccgcggtcaaagtcaagcctctaagatgggatttcggtatagccactgtggctcaggactacgcaaaccatctagcctcaggtccatgcagtcttgaacattcctctggaccatatggagagaatcttgcatttggcagtggagacatgtcggccgctcaggcggttgcgatgtgggtacatgagaagtcgtactatgatttttactcaaactcgtgccatggtccggcttgtggacactacacgcaggtcgtgtggcgtggctcagctcgtctcggttgtggtaaggctaagtgtaataatggtgccagtattgttgtgtgtaactatgaccccgcaggcaattacattggagctagaccatattga

SEQ ID NO: 80337 - protein, 172 aa, Arabidopsis thaliana
  peptide (1)..(172): Ceres Seq. ID no. 12655405
  misc_feature (43)..(159): Pfam Name: SCP-like extracellular protein Pfam Description: SCP-like extracellular protein
  misc_feature (1)..(172): Homolog of NCBI NO: 15235081 NR Description: pathogenesis-related protein - like; protein id:
  misc_feature (34)..(172): Homolog of NCBI NO: 15225974 NR Description: pathogenesis-related PR-1-like protein; protein At2g14610.1, supported by cDNA: gi_166860, supported by cDNA:
  misc_feature (7)..(172): Homolog of NCBI NO: 130827 NR Description: Pathogenesis-related protein 1B precursor (PR-1B)
  misc_feature (7)..(172): Homolog of NCBI NO: 728622 NR Description: PR-1b protein [Nicotiana tabacum]
  misc_feature (39)..(172): Homolog of NCBI NO: 100370 NR Description: pathogenesis-related protein 1 - common tobacco
  misc_feature (9)..(172): Homolog of NCBI NO: 19948 NR Description: PR1b preprotein [Nicotiana tabacum]
  misc_feature (7)..(172): Homolog of NCBI NO: 19944 NR Description: PR-1a protein (AA 1 - 168) [Nicotiana tabacum]
  misc_feature (7)..(172): Homolog of NCBI NO: 130826 NR Description: Pathogenesis-related protein 1A precursor (PR-1A)
  misc_feature (7)..(172): Homolog of NCBI NO: 579402 NR Description: PR1a preprotein [Nicotiana tabacum]
  misc_feature (7)..(172): Homolog of NCBI NO: 218304 NR Description: PR1a protein precursor [Nicotiana tabacum]
MFHKVAIETLVLLLLINYLTQIDVSSAQYSQYPQSHEYPDSYLRPHNAARAAVKVKPLRWDFGIATVAQDYANHLASGPCSLEHSSGPYGENLAFGSGDMSAAQAVAMWVHEKSYYDFYSNSCHGPACGHYTQVVWRGSARLGCGKAKCNNGASIVVCNYDPAGNYIGARPY

SEQ ID NO: 80338 - DNA, 1692 bp, Arabidopsis thaliana
  misc_feature (1)..(1692): Ceres Seq. ID no. 12655415
  misc_feature: MA Experiment ID: 20000234 Result: Up-regulated in Transcription
  misc_feature: MA Experiment 20000234 PARAMETER Experiment Name: At_Siliques_P Parameter: Age (day) Value: 21
  misc_feature: MA Experiment 20000234 PARAMETER Experiment Name: At_Siliques_P Parameter: Organism Value: A. thaliana
  misc_feature: MA Experiment 20000234 PARAMETER Experiment Name: At_Siliques_P Parameter: Plant Line Value: WS
  misc_feature: MA Experiment 20000234 PARAMETER Experiment Name: At_Siliques_P Parameter: Tissue Value: Less Than 5mm Siliques vs. Whole Plant
  misc_feature: MA Experiment ID: 20000235 Result: Up-regulated in Transcription
  misc_feature: MA Experiment 20000235 PARAMETER Experiment Name: At_Siliques_P Parameter: Age (day) Value: 21
  misc_feature: MA Experiment 20000235 PARAMETER Experiment Name: At_Siliques_P Parameter: Organism Value: A. thaliana
  misc_feature: MA Experiment 20000235 PARAMETER Experiment Name: At_Siliques_P Parameter: Plant Line Value: WS
  misc_feature: MA Experiment 20000235 PARAMETER Experiment Name: At_Siliques_P Parameter: Tissue Value: 5-10mm Siliques vs. Whole Plant
  misc_feature: MA Experiment ID: 20001910 Result: Up-regulated in Transcription
  misc_feature: MA Experiment 20001910 PARAMETER Experiment Name: At_Drought_Reproduction_P Parameter: Age (day) Value: 37
  misc_feature: MA Experiment 20001910 PARAMETER Experiment Name: At_Drought_Reproduction_P Parameter: Organism Value: A. thaliana
  misc_feature: MA Experiment 20001910 PARAMETER Experiment Name: At_Drought_Reproduction_P Parameter: Plant Line Value: WS
  misc_feature: MA Experiment 20001910 PARAMETER Experiment Name: At_Drought_Reproduction_P Parameter: Timepoint (day) Value: 7
  misc_feature: MA Experiment 20001910 PARAMETER Experiment Name: At_Drought_Reproduction_P Parameter: Tissue Value: Flowers
  misc_feature: MA Experiment 20001910 PARAMETER Experiment Name: At_Drought_Reproduction_P Parameter: Treatment Value: Drought vs. No Drought
atgttcattaagacatggtcatttgaaattctgattacattttttgtcttggtgcagtgtctagagaacccttataaaccacagtacaatggagggatcatcgtgaatcctgacttgcaaaatggttcacaaggctggtcacagtttggaaacgccaaagtcgatttcagagaatttggaggcaataagtttgttgttgccacacaaaggaatcaatcttctgacagcatctcgcagaaggtgtacttggaaaaaggaattctctacactttctctgcttggttacaagtgagcataggaaaatctcccgtgagcgctgttttcaagaagaatggtgaatataagcatgccggttcggttgttgctgaatccaaatgttggtccatgctgaaaggtggtctcactgttgatgaatctggtcctgctgaactcttcttcgagagcgagaacacaatggttgagatttgggttgatagcgtctctttgcaacctttcacacaagaagagtggaactctcaccacgaacagagcattggcaaagtaagaaaaggtaccgtgagaatcagagtcatgaataacaaaggcgagacgatacctaatgcaaccatatccatagaacagaagaaactcggatacccattcgggtgcgcggtagaaaacaacatacttgggaatcaagcataccaaaactggttcactcaaagatttaccgtgacaactttcgggaacgagatgaaatggtacagcacagaaagaataagagggcaagaggattactcgacagctgacgcgatgttaagtttcttcaagagccacgggattgctgtacgtgggcacaatgttttatgggatgatcctaagtaccaacctggatgggtgaattctctgtctggtaacgacctctacaacgctgtgaaacgaagggtttactcggttgtctcgcgatacaaaggacagcttttgggttgggatgttgtgaatgagaatcttcatttctccttctttgagagcaagttcggtcctaaagcctcttataacacctacacaatggcccatgccgtcgatccaaggacaccaatgttcatgaatgaatataatacgttagagcaacctaaggatttaacttctagtccagcaaggtatttgggaaagcttagggagcttcaatctattcgggttgccggaaagattccgttagcgataggtcttgagtctcatttcagcactcctaacattccgtatatgagatcagctcttgatacttttggtgccactggtttgcctatttggctcactgagattgacgttgatgcgcctcccaatgtccgggccaactatttcgagcaagttctaagggaaggccatgcacatccgaaagtgaatggaatggtgatgtggacaggttattctccatcaggttgctaccgaatgtgcctcaccgatggaaactttaagaacctacccactggagacgtcgtggacaagcttttacgtgaatggggagggcttcgcagccaaaccacaggtgtcactgatgctaatgggttatttgaagctccactctttcatggtgactatgatctccgtatatcccatcctctcaccaattcaaaggcttcttacaactttacgttgacttccgatgacgactcctcacagaaacaaccatctctatatgtctttcgtgtttga

SEQ ID NO: 80339 - protein, 563 aa, Arabidopsis thaliana; identical to SEQ ID NO: 49507
  peptide (1)..(563): Ceres Seq. ID no. 12655416
  misc_feature (202)..(497): Pfam Name: Glycosyl hydrolase family 10 Pfam Description: Glycosyl hydrolase family 10
  misc_feature (19)..(563): Homolog of NCBI NO: 7485619 NR Description: hypothetical protein F17I5.30 - Arabidopsis >gi|3297808|emb|CAA19866.1| putative protein [Arabidopsis >gi|7270333|emb|CAB80101.1| putative protein [Arabidopsis
  misc_feature (18)..(563): Homolog of NCBI NO: 30689830 NR Description: glycosyl hydrolase family 10 [Arabidopsis
  misc_feature (20)..(563): Homolog of NCBI NO: 15235131 NR Description: glycosyl hydrolase family 10; protein id:
  misc_feature (10)..(563): Homolog of NCBI NO: 15235134 NR Description: glycosyl hydrolase family 10; protein id:
  misc_feature (18)..(563): Homolog of NCBI NO: 23429644 NR Description: endoxylanase [Carica papaya]
  misc_feature (18)..(346): Homolog of NCBI NO: 7485620 NR Description: hypothetical protein F17I5.40 - Arabidopsis >gi|3297809|emb|CAA19867.1| putative protein [Arabidopsis >gi|7270334|emb|CAB80102.1| putative protein [Arabidopsis
  misc_feature (129)..(338): Homolog of NCBI NO: 22329142 NR Description: glycosyl hydrolase family 10; protein id:
  misc_feature (366)..(492): Homolog of NCBI NO: 22329142 NR Description: glycosyl hydrolase family 10; protein id:
  misc_feature (26)..(548): Homolog of NCBI NO: 37533262 NR Description: putative 1,4-beta-xylanase [Oryza sativa
  misc_feature (18)..(552): Homolog of NCBI NO: 40363757 NR Description: putative 1,4-beta-xylanase [Triticum aestivum]

SEQ ID NO: 80340 - protein, 435 aa, Arabidopsis thaliana; identical to SEQ ID NO: 49508
  peptide (1)..(435): Ceres Seq. ID no. 12655417
  misc_feature (74)..(369): Pfam Name: Glycosyl hydrolase family 10 Pfam Description: Glycosyl hydrolase family 10
  misc_feature (1)..(435): Homolog of NCBI NO: 7485619 NR Description: hypothetical protein F17I5.30 - Arabidopsis >gi|3297808|emb|CAA19866.1| putative protein [Arabidopsis >gi|7270333|emb|CAB80101.1| putative protein [Arabidopsis
  misc_feature (1)..(435): Homolog of NCBI NO: 30689830 NR Description: glycosyl hydrolase family 10 [Arabidopsis
  misc_feature (1)..(435): Homolog of NCBI NO: 15235131 NR Description: glycosyl hydrolase family 10; protein id:
  misc_feature (1)..(435): Homolog of NCBI NO: 15235134 NR Description: glycosyl hydrolase family 10; protein id:
  misc_feature (1)..(435): Homolog of NCBI NO: 23429644 NR Description: endoxylanase [Carica papaya]
  misc_feature (1)..(218): Homolog of NCBI NO: 7485620 NR Description: hypothetical protein F17I5.40 - Arabidopsis >gi|3297809|emb|CAA19867.1| putative protein [Arabidopsis >gi|7270334|emb|CAB80102.1| putative protein [Arabidopsis
  misc_feature (1)..(210): Homolog of NCBI NO: 22329142 NR Description: glycosyl hydrolase family 10; protein id:
  misc_feature (238)..(364): Homolog of NCBI NO: 22329142 NR Description: glycosyl hydrolase family 10; protein id:
  misc_feature (1)..(420): Homolog of NCBI NO: 37533262 NR Description: putative 1,4-beta-xylanase [Oryza sativa
  misc_feature (1)..(424): Homolog of NCBI NO: 40363757 NR Description: putative 1,4-beta-xylanase [Triticum aestivum]

SEQ ID NO: 80341 - protein, 412 aa, Arabidopsis thaliana; identical to SEQ ID NO: 76895
  peptide (1)..(412): Ceres Seq. ID no. 12655418
  misc_feature (51)..(346): Pfam Name: Glycosyl hydrolase family 10 Pfam Description: Glycosyl hydrolase family 10
  misc_feature (1)..(412): Homolog of NCBI NO: 7485619 NR Description: hypothetical protein F17I5.30 - Arabidopsis >gi|3297808|emb|CAA19866.1| putative protein [Arabidopsis >gi|7270333|emb|CAB80101.1| putative protein [Arabidopsis
  misc_feature (1)..(412): Homolog of NCBI NO: 30689830 NR Description: glycosyl hydrolase family 10 [Arabidopsis
  misc_feature (1)..(412): Homolog of NCBI NO: 15235131 NR Description: glycosyl hydrolase family 10; protein id:
  misc_feature (1)..(412): Homolog of NCBI NO: 15235134 NR Description: glycosyl hydrolase family 10; protein id:
  misc_feature (1)..(412): Homolog of NCBI NO: 23429644 NR Description: endoxylanase [Carica papaya]
  misc_feature (1)..(195): Homolog of NCBI NO: 7485620 NR Description: hypothetical protein F17I5.40 - Arabidopsis >gi|3297809|emb|CAA19867.1| putative protein [Arabidopsis >gi|7270334|emb|CAB80102.1| putative protein [Arabidopsis
  misc_feature (1)..(187): Homolog of NCBI NO: 22329142 NR Description: glycosyl hydrolase family 10; protein id:
  misc_feature (215)..(341): Homolog of NCBI NO: 22329142 NR Description: glycosyl hydrolase family 10; protein id:
  misc_feature (1)..(397): Homolog of NCBI NO: 37533262 NR Description: putative 1,4-beta-xylanase [Oryza sativa
  misc_feature (1)..(401): Homolog of NCBI NO: 40363757 NR Description: putative 1,4-beta-xylanase [Triticum aestivum]

SEQ ID NO: 80342 - DNA, 1725 bp, Arabidopsis thaliana
  misc_feature (1)..(1725): Ceres Seq. ID no. 12655423
  misc_feature: MA Experiment ID: 20000234 Result: Up-regulated in Transcription
  misc_feature: MA Experiment 20000234 PARAMETER Experiment Name: At_Siliques_P Parameter: Age (day) Value: 21
  misc_feature: MA Experiment 20000234 PARAMETER Experiment Name: At_Siliques_P Parameter: Organism Value: A. thaliana
  misc_feature: MA Experiment 20000234 PARAMETER Experiment Name: At_Siliques_P Parameter: Plant Line Value: WS
  misc_feature: MA Experiment 20000234 PARAMETER Experiment Name: At_Siliques_P Parameter: Tissue Value: Less Than 5mm Siliques vs. Whole Plant
  misc_feature: MA Experiment ID: 20000235 Result: Up-regulated in Transcription
  misc_feature: MA Experiment 20000235 PARAMETER Experiment Name: At_Siliques_P Parameter: Age (day) Value: 21
  misc_feature: MA Experiment 20000235 PARAMETER Experiment Name: At_Siliques_P Parameter: Organism Value: A. thaliana
  misc_feature: MA Experiment 20000235 PARAMETER Experiment Name: At_Siliques_P Parameter: Plant Line Value: WS
  misc_feature: MA Experiment 20000235 PARAMETER Experiment Name: At_Siliques_P Parameter: Tissue Value: 5-10mm Siliques vs. Whole Plant
  misc_feature: MA Experiment ID: 20001910 Result: Up-regulated in Transcription
  misc_feature: MA Experiment 20001910 PARAMETER Experiment Name: At_Drought_Reproduction_P Parameter: Age (day) Value: 37
  misc_feature: MA Experiment 20001910 PARAMETER Experiment Name: At_Drought_Reproduction_P Parameter: Organism Value: A. thaliana
  misc_feature: MA Experiment 20001910 PARAMETER Experiment Name: At_Drought_Reproduction_P Parameter: Plant Line Value: WS
  misc_feature: MA Experiment 20001910 PARAMETER Experiment Name: At_Drought_Reproduction_P Parameter: Timepoint (day) Value: 7
  misc_feature: MA Experiment 20001910 PARAMETER Experiment Name: At_Drought_Reproduction_P Parameter: Tissue Value: Flowers
  misc_feature: MA Experiment 20001910 PARAMETER Experiment Name: At_Drought_Reproduction_P Parameter: Treatment Value: Drought vs. No Drought
atgttcgttgtaattcttgttgttataattactctgtttgttttggtgcagtgtctagagatacctttaaaaccacagtacaatggaggaatcatcgtcagccctgacgtacgagatggcaccctaggctggacaccattcggaaacgcgaaagtcgatttcagaaaaattggaaaccataatttttttgttgcacgagacaggaaacaaccttttgatagtgtctcacagaaggtttatttggaaaagggacttctctacactttctctgcttggttacaagtaagtaaaggaaaggctcctgtgaaagcagttttcaagaagaatggtgaatataagcttgctggttcggttgttgctgaatccaaatgctggtccatgcttaagggtggtctcactgttgatgaatctggtcctgccgaactctattttgaggtatatttttctgtgaattgttgccagtttctgcgttccagtgaagacacaactgttgagatttgggttgatagcgtctcgttgcaaccattcacgcaagaagagtggaactctcaccatgaacaaagcattcagaaggagagaaagagaaccgtgagaatcagagccgtgaacagcaaaggcgagccaataccgaaagcaaccatttccattgaacagaggaaactcggattcccattcgggtgcgaggtagaaaagaacattcttgggaacaaagcataccaaaactggttcactcaaagatttacagtgacaactttcgcgaacgagatgaaatggtacagcacagaagttgtaagaggcaaagaggactattcaacggctgacgcgatgttgcgattcttcaagcagcatggggttgctgtacgtggccacaatattttatggaatgatcctaagtaccaacctaaatgggtgaatgctctgtctggtaacgacctctacaacgctgtgaaacgaagggttttctcggtggtctcacgatacaaaggccagcttgcgggttgggacgttgtgaatgagaatctccatttctcctactttgaggacaagatgggtcctaaagcctcatataacatctttaagatggcgcaagcttttgatcctacgacaaccatgtttatgaatgaatacaatacgttagaggaatcaagcgattcagattctagtctagcaaggtatttacagaagcttagggagattagatctatccgagtttgtggtaacatatctctagggatcggtctcgagtctcatttcaagactcctaacattccgtacatgagatcagctcttgacactcttgccgctactggtttgcctatatggcttactgaggttgacgtcgaagctcctccaaatgtccaagccaagtattttgagcaggtcctaagggaaggccacgcacatccgcaagtgaaaggaatagtgacgtggtcaggttattctccatcaggttgctaccgaatgtgcctaaccgatggaaacttcaagaacgtacccactggtgacgttgtggacaaacttctccatgaatggggaggcttccgcagacaaaccacaggtgtcactgatgctgatggatactttgaagcttctctcttccatggtgactacgatctcaagattgctcatcctctcaccaattcaaaagcttctcacagctttaagctgacttctgatgtctcttcctcacagaatcaaccatcttcttttgtctttcgtgtttaa

SEQ ID NO: 80343 - protein, 574 aa, Arabidopsis thaliana
  peptide (1)..(574): Ceres Seq. ID no. 12655424
  misc_feature (213)..(508): Pfam Name: Glycosyl hydrolase family 10 Pfam Description: Glycosyl hydrolase family 10
  misc_feature (1)..(574): Homolog of NCBI NO: 15235134 NR Description: glycosyl hydrolase family 10; protein id:
  misc_feature (16)..(574): Homolog of NCBI NO: 30689830 NR Description: glycosyl hydrolase family 10 [Arabidopsis
  misc_feature (17)..(574): Homolog of NCBI NO: 7485619 NR Description: hypothetical protein F17I5.30 - Arabidopsis >gi|3297808|emb|CAA19866.1| putative protein [Arabidopsis >gi|7270333|emb|CAB80101.1| putative protein [Arabidopsis
  misc_feature (18)..(574): Homolog of NCBI NO: 15235131 NR Description: glycosyl hydrolase family 10; protein id:
  misc_feature (16)..(566): Homolog of NCBI NO: 23429644 NR Description: endoxylanase [Carica papaya]
  misc_feature (127)..(350): Homolog of NCBI NO: 22329142 NR Description: glycosyl hydrolase family 10; protein id:
  misc_feature (377)..(503): Homolog of NCBI NO: 22329142 NR Description: glycosyl hydrolase family 10; protein id:
  misc_feature (16)..(358): Homolog of NCBI NO: 7485620 NR Description: hypothetical protein F17I5.40 - Arabidopsis >gi|3297809|emb|CAA19867.1| putative protein [Arabidopsis >gi|7270334|emb|CAB80102.1| putative protein [Arabidopsis
  misc_feature (23)..(562): Homolog of NCBI NO: 37533262 NR Description: putative 1,4-beta-xylanase [Oryza sativa
  misc_feature (16)..(563): Homolog of NCBI NO: 40363757 NR Description: putative 1,4-beta-xylanase [Triticum aestivum]
MFVVILVVIITLFVLVQCLEIPLKPQYNGGIIVSPDVRDGTLGWTPFGNAKVDFRKIGNHNFFVARDRKQPFDSVSQKVYLEKGLLYTFSAWLQVSKGKAPVKAVFKKNGEYKLAGSVVAESKCWSMLKGGLTVDESGPAELYFEVYFSVNCCQFLRSSEDTTVEIWVDSVSLQPFTQEEWNSHHEQSIQKERKRTVRIRAVNSKGEPIPKATISIEQRKLGFPFGCEVEKNILGNKAYQNWFTQRFTVTTFANEMKWYSTEVVRGKEDYSTADAMLRFFKQHGVAVRGHNILWNDPKYQPKWVNALSGNDLYNAVKRRVFSVVSRYKGQLAGWDVVNENLHFSYFEDKMGPKASYNIFKMAQAFDPTTTMFMNEYNTLEESSDSDSSLARYLQKLREIRSIRVCGNISLGIGLESHFKTPNIPYMRSALDTLAATGLPIWLTEVDVEAPPNVQAKYFEQVLREGHAHPQVKGIVTWSGYSPSGCYRMCLTDGNFKNVPTGDVVDKLLHEWGGFRRQTTGVTDADGYFEASLFHGDYDLKIAHPLTNSKASHSFKLTSDVSSSQNQPSSFVFRV

SEQ ID NO: 80344 - protein, 448 aa, Arabidopsis thaliana
  peptide (1)..(448): Ceres Seq. ID no. 12655425
  misc_feature (87)..(382): Pfam Name: Glycosyl hydrolase family 10 Pfam Description: Glycosyl hydrolase family 10
  misc_feature (1)..(448): Homolog of NCBI NO: 15235134 NR Description: glycosyl hydrolase family 10; protein id:
  misc_feature (1)..(448): Homolog of NCBI NO: 30689830 NR Description: glycosyl hydrolase family 10 [Arabidopsis
  misc_feature (1)..(448): Homolog of NCBI NO: 7485619 NR Description: hypothetical protein F17I5.30 - Arabidopsis >gi|3297808|emb|CAA19866.1| putative protein [Arabidopsis >gi|7270333|emb|CAB80101.1| putative protein [Arabidopsis
  misc_feature (1)..(448): Homolog of NCBI NO: 15235131 NR Description: glycosyl hydrolase family 10; protein id:
  misc_feature (1)..(440): Homolog of NCBI NO: 23429644 NR Description: endoxylanase [Carica papaya]
  misc_feature (1)..(224): Homolog of NCBI NO: 22329142 NR Description: glycosyl hydrolase family 10; protein id:
  misc_feature (251)..(377): Homolog of NCBI NO: 22329142 NR Description: glycosyl hydrolase family 10; protein id:
  misc_feature (1)..(232): Homolog of NCBI NO: 7485620 NR Description: hypothetical protein F17I5.40 - Arabidopsis >gi|3297809|emb|CAA19867.1| putative protein [Arabidopsis >gi|7270334|emb|CAB80102.1| putative protein [Arabidopsis
  misc_feature (1)..(436): Homolog of NCBI NO: 37533262 NR Description: putative 1,4-beta-xylanase [Oryza sativa
  misc_feature (1)..(437): Homolog of NCBI NO: 40363757 NR Description: putative 1,4-beta-xylanase [Triticum aestivum]
MLKGGLTVDESGPAELYFEVYFSVNCCQFLRSSEDTTVEIWVDSVSLQPFTQEEWNSHHEQSIQKERKRTVRIRAVNSKGEPIPKATISIEQRKLGFPFGCEVEKNILGNKAYQNWFTQRFTVTTFANEMKWYSTEVVRGKEDYSTADAMLRFFKQHGVAVRGHNILWNDPKYQPKWVNALSGNDLYNAVKRRVFSVVSRYKGQLAGWDVVNENLHFSYFEDKMGPKASYNIFKMAQAFDPTTTMFMNEYNTLEESSDSDSSLARYLQKLREIRSIRVCGNISLGIGLESHFKTPNIPYMRSALDTLAATGLPIWLTEVDVEAPPNVQAKYFEQVLREGHAHPQVKGIVTWSGYSPSGCYRMCLTDGNFKNVPTGDVVDKLLHEWGGFRRQTTGVTDADGYFEASLFHGDYDLKIAHPLTNSKASHSFKLTSDVSSSQNQPSSFVFRV

SEQ ID NO: 80345 - protein, 319 aa, Arabidopsis thaliana
  peptide (1)..(319): Ceres Seq. ID no. 12655426
  misc_feature (1)..(253): Pfam Name: Glycosyl hydrolase family 10 Pfam Description: Glycosyl hydrolase family 10
  misc_feature (1)..(319): Homolog of NCBI NO: 15235134 NR Description: glycosyl hydrolase family 10; protein id:
  misc_feature (1)..(319): Homolog of NCBI NO: 30689830 NR Description: glycosyl hydrolase family 10 [Arabidopsis
  misc_feature (1)..(319): Homolog of NCBI NO: 7485619 NR Description: hypothetical protein F17I5.30 - Arabidopsis >gi|3297808|emb|CAA19866.1| putative protein [Arabidopsis >gi|7270333|emb|CAB80101.1| putative protein [Arabidopsis
  misc_feature (1)..(319): Homolog of NCBI NO: 15235131 NR Description: glycosyl hydrolase family 10; protein id:
  misc_feature (1)..(311): Homolog of NCBI NO: 23429644 NR Description: endoxylanase [Carica papaya]
  misc_feature (1)..(95): Homolog of NCBI NO: 22329142 NR Description: glycosyl hydrolase family 10; protein id:
  misc_feature (122)..(248): Homolog of NCBI NO: 22329142 NR Description: glycosyl hydrolase family 10; protein id:
  misc_feature (1)..(103): Homolog of NCBI NO: 7485620 NR Description: hypothetical protein F17I5.40 - Arabidopsis >gi|3297809|emb|CAA19867.1| putative protein [Arabidopsis >gi|7270334|emb|CAB80102.1| putative protein [Arabidopsis
  misc_feature (1)..(307): Homolog of NCBI NO: 37533262 NR Description: putative 1,4-beta-xylanase [Oryza sativa
  misc_feature (1)..(308): Homolog of NCBI NO: 40363757 NR Description: putative 1,4-beta-xylanase [Triticum aestivum]
MKWYSTEVVRGKEDYSTADAMLRFFKQHGVAVRGHNILWNDPKYQPKWVNALSGNDLYNAVKRRVFSVVSRYKGQLAGWDVVNENLHFSYFEDKMGPKASYNIFKMAQAFDPTTTMFMNEYNTLEESSDSDSSLARYLQKLREIRSIRVCGNISLGIGLESHFKTPNIPYMRSALDTLAATGLPIWLTEVDVEAPPNVQAKYFEQVLREGHAHPQVKGIVTWSGYSPSGCYRMCLTDGNFKNVPTGDVVDKLLHEWGGFRRQTTGVTDADGYFEASLFHGDYDLKIAHPLTNSKASHSFKLTSDVSSSQNQPSSFVFRV

SEQ ID NO: 80346 - DNA, 1054 bp, Arabidopsis thaliana
  misc_feature (1)..(1054): Ceres Seq. ID no. 12655431
  misc_feature: MA Experiment ID: 20000166 Result: Up-regulated in Transcription
  misc_feature: MA Experiment 20000166 PARAMETER Experiment Name: At_100uM_ABA_P Parameter: Age (day) Value: 14
  misc_feature: MA Experiment 20000166 PARAMETER Experiment Name: At_100uM_ABA_P Parameter: Organism Value: A. thaliana
  misc_feature: MA Experiment 20000166 PARAMETER Experiment Name: At_100uM_ABA_P Parameter: Plant Line Value: WS
  misc_feature: MA Experiment 20000166 PARAMETER Experiment Name: At_100uM_ABA_P Parameter: Timepoint (hr) Value: 1
  misc_feature: MA Experiment 20000166 PARAMETER Experiment Name: At_100uM_ABA_P Parameter: Tissue Value: Aerial
  misc_feature: MA Experiment 20000166 PARAMETER Experiment Name: At_100uM_ABA_P Parameter: Treatment Value: 100uM ABA vs. No Treatment
  misc_feature: MA Experiment ID: 20000169 Result: Up-regulated in Transcription
  misc_feature: MA Experiment 20000169 PARAMETER Experiment Name: At_100uM_ABA_P Parameter: Age (day) Value: 14
  misc_feature: MA Experiment 20000169 PARAMETER Experiment Name: At_100uM_ABA_P Parameter: Organism Value: A. thaliana
  misc_feature: MA Experiment 20000169 PARAMETER Experiment Name: At_100uM_ABA_P Parameter: Plant Line Value: WS
  misc_feature: MA Experiment 20000169 PARAMETER Experiment Name: At_100uM_ABA_P Parameter: Timepoint (hr) Value: 6
  misc_feature: MA Experiment 20000169 PARAMETER Experiment Name: At_100uM_ABA_P Parameter: Tissue Value: Aerial
  misc_feature: MA Experiment 20000169 PARAMETER Experiment Name: At_100uM_ABA_P Parameter: Treatment Value: 100uM ABA vs. No Treatment
  misc_feature: MA Experiment ID: 20000171 Result: Up-regulated in Transcription
  misc_feature: MA Experiment 20000171 PARAMETER Experiment Name: At_42deg_Heat_P Parameter: Age (day) Value: 14
  misc_feature: MA Experiment 20000171 PARAMETER Experiment Name: At_42deg_Heat_P Parameter: Organism Value: A. thaliana
  misc_feature: MA Experiment 20000171 PARAMETER Experiment Name: At_42deg_Heat_P Parameter: Plant Line Value: WS
  misc_feature: MA Experiment 20000171 PARAMETER Experiment Name: At_42deg_Heat_P Parameter: Temperature (deg C) Value: 42 vs. 22
  misc_feature: MA Experiment 20000171 PARAMETER Experiment Name: At_42deg_Heat_P Parameter: Timepoint (hr) Value: 1
  misc_feature: MA Experiment 20000171 PARAMETER Experiment Name: At_42deg_Heat_P Parameter: Tissue Value: Aerial
  misc_feature: MA Experiment ID: 20000182 Result: Up-regulated in Transcription
  misc_feature: MA Experiment 20000182 PARAMETER Experiment Name: At_2mM_SA_P Parameter: Age (day) Value: 14
  misc_feature: MA Experiment 20000182 PARAMETER Experiment Name: At_2mM_SA_P Parameter: Organism Value: A. thaliana
  misc_feature: MA Experiment 20000182 PARAMETER Experiment Name: At_2mM_SA_P Parameter: Plant Line Value: WS
  misc_feature: MA Experiment 20000182 PARAMETER Experiment Name: At_2mM_SA_P Parameter: Timepoint (hr) Value: 6
  misc_feature: MA Experiment 20000182 PARAMETER Experiment Name: At_2mM_SA_P Parameter: Tissue Value: Aerial
  misc_feature: MA Experiment 20000182 PARAMETER Experiment Name: At_2mM_SA_P Parameter: Treatment Value: 2mM SA vs. No Treatment
  misc_feature: MA Experiment ID: 20000267 Result: Up-regulated in Transcription
  misc_feature: MA Experiment 20000267 PARAMETER Experiment Name: At_Drought_P Parameter: Age (day) Value: 7
  misc_feature: MA Experiment 20000267 PARAMETER Experiment Name: At_Drought_P Parameter: Organism Value: A. thaliana
  misc_feature: MA Experiment 20000267 PARAMETER Experiment Name: At_Drought_P Parameter: Plant Line Value: WS
  misc_feature: MA Experiment 20000267 PARAMETER Experiment Name: At_Drought_P Parameter: Timepoint (hr) Value: 6
  misc_feature: MA Experiment 20000267 PARAMETER Experiment Name: At_Drought_P Parameter: Tissue Value: Whole Plant
  misc_feature: MA Experiment 20000267 PARAMETER Experiment Name: At_Drought_P Parameter: Treatment Value: Drought vs. No Drought
  misc_feature: MA Experiment ID: 20000286 Result: Up-regulated in Transcription
  misc_feature: MA Experiment 20000286 PARAMETER Experiment Name: At_Open_Flower_P Parameter: Age (day) Value: 21
  misc_feature: MA Experiment 20000286 PARAMETER Experiment Name: At_Open_Flower_P Parameter: Plant Line Value: WS
  misc_feature: MA Experiment 20000286 PARAMETER Experiment Name: At_Open_Flower_P Parameter: Tissue Value: Half Open vs. Whole Plant
  misc_feature: MA Experiment ID: 20000436 Result: Up-regulated in Transcription
  misc_feature: MA Experiment 20000436 PARAMETER Experiment Name: At_Drought_P Parameter: Age (day) Value: 7
  misc_feature: MA Experiment 20000436 PARAMETER Experiment Name: At_Drought_P Parameter: Organism Value: A. thaliana
  misc_feature: MA Experiment 20000436 PARAMETER Experiment Name: At_Drought_P Parameter: Plant Line Value: WS
  misc_feature: MA Experiment 20000436 PARAMETER Experiment Name: At_Drought_P Parameter: Timepoint (hr) Value: 12
  misc_feature: MA Experiment 20000436 PARAMETER Experiment Name: At_Drought_P Parameter: Tissue Value: Whole Plant
  misc_feature: MA Experiment 20000436 PARAMETER Experiment Name: At_Drought_P Parameter: Treatment Value: Drought vs. No Drought
  misc_feature: MA Experiment ID: 20000437 Result: Up-regulated in Transcription
  misc_feature: MA Experiment 20000437 PARAMETER Experiment Name: At_Drought_P Parameter: Age (day) Value: 8
  misc_feature: MA Experiment 20000437 PARAMETER Experiment Name: At_Drought_P Parameter: Organism Value: A. thaliana
  misc_feature: MA Experiment 20000437 PARAMETER Experiment Name: At_Drought_P Parameter: Plant Line Value: WS
  misc_feature: MA Experiment 20000437 PARAMETER Experiment Name: At_Drought_P Parameter: Timepoint (hr) Value: 24
  misc_feature: MA Experiment 20000437 PARAMETER Experiment Name: At_Drought_P Parameter: Tissue Value: Whole Plant
  misc_feature: MA Experiment 20000437 PARAMETER Experiment Name: At_Drought_P Parameter: Treatment Value: Drought vs. No Drought
  misc_feature: MA Experiment ID: 20000453 Result: Up-regulated in Transcription
  misc_feature: MA Experiment 20000453 PARAMETER Experiment Name: At_100uM_ABA_P Parameter: Age (day) Value: 15
  misc_feature: MA Experiment 20000453 PARAMETER Experiment Name: At_100uM_ABA_P Parameter: Organism Value: A. thaliana
  misc_feature: MA Experiment 20000453 PARAMETER Experiment Name: At_100uM_ABA_P Parameter: Plant Line Value: WS
  misc_feature: MA Experiment 20000453 PARAMETER Experiment Name: At_100uM_ABA_P Parameter: Timepoint (hr) Value: 24
  misc_feature: MA Experiment 20000453 PARAMETER Experiment Name: At_100uM_ABA_P Parameter: Tissue Value: Aerial
  misc_feature: MA Experiment 20000453 PARAMETER Experiment Name: At_100uM_ABA_P Parameter: Treatment Value: 100uM ABA vs. No Treatment
  misc_feature: MA Experiment ID: 20000456 Result: Up-regulated in Transcription
  misc_feature: MA Experiment 20000456 PARAMETER Experiment Name: At_100uM_BA_P Parameter: Age (day) Value: 14
  misc_feature: MA Experiment 20000456 PARAMETER Experiment Name: At_100uM_BA_P Parameter: Organism Value: A. thaliana
  misc_feature: MA Experiment 20000456 PARAMETER Experiment Name: At_100uM_BA_P Parameter: Plant Line Value: WS
  misc_feature: MA Experiment 20000456 PARAMETER Experiment Name: At_100uM_BA_P Parameter: Timepoint (hr) Value: 6
  misc_feature: MA Experiment 20000456 PARAMETER Experiment Name: At_100uM_BA_P Parameter: Tissue Value: Aerial
  misc_feature: MA Experiment 20000456 PARAMETER Experiment Name: At_100uM_BA_P Parameter: Treatment Value: 100uM BA vs. No Treatment
  misc_feature: MA Experiment ID: 20000709 Result: Down-regulated in Transcription
  misc_feature: MA Experiment 20000709 PARAMETER Experiment Name: At_15mM_NH4NO3_L-to-H_P Parameter: Age (hr) Value: 14
  misc_feature: MA Experiment 20000709 PARAMETER Experiment Name: At_15mM_NH4NO3_L-to-H_P Parameter: Organism Value: A. thaliana
  misc_feature: MA Experiment 20000709 PARAMETER Experiment Name: At_15mM_NH4NO3_L-to-H_P Parameter: Plant Line Value: WS
  misc_feature: MA Experiment 20000709 PARAMETER Experiment Name: At_15mM_NH4NO3_L-to-H_P Parameter: Timepoint (hr) Value: 4
  misc_feature: MA Experiment 20000709 PARAMETER Experiment Name: At_15mM_NH4NO3_L-to-H_P Parameter: Tissue Value: Aerial
  misc_feature: MA Experiment 20000709 PARAMETER Experiment Name: At_15mM_NH4NO3_L-to-H_P Parameter: Treatment Value: 15mM NH4NO3 vs. 30mM Mannitol
  misc_feature: MA Experiment ID: 20000794 Result: Up-regulated in Transcription
  misc_feature: MA Experiment 20000794 PARAMETER Experiment Name: At_Petals_P Parameter: Age (day) Value: 23-25 days
  misc_feature: MA Experiment 20000794 PARAMETER Experiment Name: At_Petals_P Parameter: Plant Line Value: WS
  misc_feature: MA Experiment 20000794 PARAMETER Experiment Name: At_Petals_P Parameter: Tissue Value: Petals vs. Whole plant
  misc_feature: MA Experiment ID: 20001554 Result: Up-regulated in Transcription
  misc_feature: MA Experiment 20001554 PARAMETER Experiment Name: At_Drought_Soil_Dry_P Parameter: Age (day) Value: 21
  misc_feature: MA Experiment 20001554 PARAMETER Experiment Name: At_Drought_Soil_Dry_P Parameter: Organism Value: A. thaliana
  misc_feature: MA Experiment 20001554 PARAMETER Experiment Name: At_Drought_Soil_Dry_P Parameter: Plant Line Value: WS
  misc_feature: MA Experiment 20001554 PARAMETER Experiment Name: At_Drought_Soil_Dry_P Parameter: Post Timepoint (hr) Value: None
  misc_feature: MA Experiment 20001554 PARAMETER Experiment Name: At_Drought_Soil_Dry_P Parameter: Post-Treatment Value: None
  misc_feature: MA Experiment 20001554 PARAMETER Experiment Name: At_Drought_Soil_Dry_P Parameter: Timepoint (day) Value: 7
  misc_feature: MA Experiment 20001554 PARAMETER Experiment Name: At_Drought_Soil_Dry_P Parameter: Treatment Value: Drought vs. No Drought
  misc_feature: MA Experiment ID: 20001555 Result: Up-regulated in Transcription
  misc_feature: MA Experiment 20001555 PARAMETER Experiment Name: At_Drought_Soil_Dry_P Parameter: Age (day) Value: 24
  misc_feature: MA Experiment 20001555 PARAMETER Experiment Name: At_Drought_Soil_Dry_P Parameter: Organism Value: A. thaliana
  misc_feature: MA Experiment 20001555 PARAMETER Experiment Name: At_Drought_Soil_Dry_P Parameter: Plant Line Value: WS
  misc_feature: MA Experiment 20001555 PARAMETER Experiment Name: At_Drought_Soil_Dry_P Parameter: Post Timepoint (hr) Value: None
  misc_feature: MA Experiment 20001555 PARAMETER Experiment Name: At_Drought_Soil_Dry_P Parameter: Post-Treatment Value: None
  misc_feature: MA Experiment 20001555 PARAMETER Experiment Name: At_Drought_Soil_Dry_P Parameter: Timepoint (day) Value: 10
  misc_feature: MA Experiment 20001555 PARAMETER Experiment Name: At_Drought_Soil_Dry_P Parameter: Treatment Value: Drought vs. No Drought
  misc_feature: MA Experiment ID: 20001557 Result: Up-regulated in Transcription
  misc_feature: MA Experiment 20001557 PARAMETER Experiment Name: At_Drought_Soil_Dry_P Parameter: Age (day) Value: 27
  misc_feature: MA Experiment 20001557 PARAMETER Experiment Name: At_Drought_Soil_Dry_P Parameter: Organism Value: A. thaliana
  misc_feature: MA Experiment 20001557 PARAMETER Experiment Name: At_Drought_Soil_Dry_P Parameter: Plant Line Value: WS
  misc_feature: MA Experiment 20001557 PARAMETER Experiment Name: At_Drought_Soil_Dry_P Parameter: Post Timepoint (hr) Value: 3
  misc_feature: MA Experiment 20001557 PARAMETER Experiment Name: At_Drought_Soil_Dry_P Parameter: Post-Treatment Value: Re-Water vs. No Drought
  misc_feature: MA Experiment 20001557 PARAMETER Experiment Name: At_Drought_Soil_Dry_P Parameter: Timepoint (day) Value: 13
  misc_feature: MA Experiment 20001557 PARAMETER Experiment Name: At_Drought_Soil_Dry_P Parameter: Treatment Value: Drought vs. No Drought
  misc_feature: MA Experiment ID: 20001757 Result: Down-regulated in Transcription
  misc_feature: MA Experiment 20001757 PARAMETER Experiment Name: At_50mM_NH4NO3_L-to-H_P Parameter: Timepoint (hr) Value: 6
  misc_feature: MA Experiment 20001757 PARAMETER Experiment Name: At_50mM_NH4NO3_L-to-H_P Parameter: Tissue Value: Leaf
  misc_feature: MA Experiment 20001757 PARAMETER Experiment Name: At_50mM_NH4NO3_L-to-H_P Parameter: Treatment Value: 50mM NH4NO3 vs 100mM Mannitol
  misc_feature: MA Experiment ID: 20001904 Result: Up-regulated in Transcription
  misc_feature: MA Experiment 20001904 PARAMETER Experiment Name: At_Drought_Reproduction_P Parameter: Age (day) Value: 37
  misc_feature: MA Experiment 20001904 PARAMETER Experiment Name: At_Drought_Reproduction_P Parameter: Organism Value: A. thaliana
  misc_feature: MA Experiment 20001904 PARAMETER Experiment Name: At_Drought_Reproduction_P Parameter: Plant Line Value: WS
  misc_feature: MA Experiment 20001904 PARAMETER Experiment Name: At_Drought_Reproduction_P Parameter: Timepoint (day) Value: 7
  misc_feature: MA Experiment 20001904 PARAMETER Experiment Name: At_Drought_Reproduction_P Parameter: Tissue Value: Rosettes
  misc_feature: MA Experiment 20001904 PARAMETER Experiment Name: At_Drought_Reproduction_P Parameter: Treatment Value: Drought vs. No Drought
  misc_feature: MA Experiment ID: 20001910 Result: Up-regulated in Transcription
  misc_feature: MA Experiment 20001910 PARAMETER Experiment Name: At_Drought_Reproduction_P Parameter: Age (day) Value: 37
  misc_feature: MA Experiment 20001910 PARAMETER Experiment Name: At_Drought_Reproduction_P Parameter: Organism Value: A. thaliana
  misc_feature: MA Experiment 20001910 PARAMETER Experiment Name: At_Drought_Reproduction_P Parameter: Plant Line Value: WS
  misc_feature: MA Experiment 20001910 PARAMETER Experiment Name: At_Drought_Reproduction_P Parameter: Timepoint (day) Value: 7
  misc_feature: MA Experiment 20001910 PARAMETER Experiment Name: At_Drought_Reproduction_P Parameter: Tissue Value: Flowers
  misc_feature: MA Experiment 20001910 PARAMETER Experiment Name: At_Drought_Reproduction_P Parameter: Treatment Value: Drought vs. No Drought
ctcggagccatcacacgacaatgaccggcgcattgtttagaaacgctgcttccgacgccgctcggatctttcgattacagcgagcaacgatgacgaatccttttggaaagctcgaccctttaccgataggaggaaacatccagcgattgcagtcgaggcctttttatcgtacgcctcagtttctcgggaaagcaaaggaaacaggtgtctctggtttctgttcgtcttcgtcttcgtcttcttcgacggtctctacagcaggattcatcggatggtatttgggaatggtgaaatctcggccggttcttaccaaatccgtcacgtcctcgcttatttacatagcagccgatttgtcttcgcagacaattccacaagcttcagtggattcttatgacttggtaagaacagcaaggatgggaggatatgggttattaatcttgggtcctacacttcactattggttcaatctcatgtcaagtctcttcccaaaacgagatttgatcacaacgtttaagaaaatggccatgggacagacagtctatgggcctgccatgaatgttgttttcttctcactgaatgcagccctacagggtgaaaatggttcagagatagttgctagattgaaaagggacctacttcccacaatgcttaatggtgtcatgtattggcctttgtgtgattttattactttcaagttctgccctgtttatttacagccacttgtgagcaactcgttttcgtatctatggacaatctacataacttatatggcaagccgtgcgacgccaaccgccattgaaatttgaaaaagctctctgggaaactctctcagtttagaaatgaagaaatgaagccaaaaaacacttttactaaaagaaacagggcattcttcaacattctttgtttcctctctccagattttaggaggatataatgtaaggagttttggggaaaactgtgcatttggacatgtcttacactcttagatttaattcaattctatgtttagtattccatgtaatatttgagtaaaatggtggttctttagcttcga

SEQ ID NO: 80347 - protein, 267 aa, Arabidopsis thaliana
  peptide (1)..(267): Ceres Seq. ID no. 12655432
  misc_feature (195)..(262): Pfam Name: Mpv17 / PMP22 family Pfam Description: Mpv17 / PMP22 family
  misc_feature (7)..(267): Homolog of NCBI NO: 18418319 NR Description: Expressed protein; protein id: At4g33905.1, by cDNA: gi_13358221 [Arabidopsis thaliana]
  misc_feature (7)..(240): Homolog of NCBI NO: 7485624 NR Description: hypothetical protein F17I5.90 - Arabidopsis >gi|3297814|emb|CAA19872.1| putative protein [Arabidopsis >gi|7270339|emb|CAB80107.1| putative protein [Arabidopsis
  misc_feature (7)..(265): Homolog of NCBI NO: 15226016 NR Description: 22 kDa peroxisomal membrane protein; protein id: [Arabidopsis thaliana] >gi|25411581|pir||C84522 22 kDa
  misc_feature (69)..(259): Homolog of NCBI NO: 21553640 NR Description: contains similarity to 22 kDa peroxisomal
  misc_feature (69)..(259): Homolog of NCBI NO: 18422298 NR Description: putative protein; protein id: At5g43140.1,
  misc_feature (69)..(238): Homolog of NCBI NO: 9757841 NR Description: contains similarity to 22 kDa peroxisomal
  misc_feature (89)..(259): Homolog of NCBI NO: 15241166 NR Description: putative protein; protein id: At5g19750.1, by cDNA: 6789., supported by cDNA: gi_16648745 [Arabidopsis
  misc_feature (89)..(259): Homolog of NCBI NO: 16648746 NR Description: AT5g19750/T29J13_170 [Arabidopsis thaliana]
  misc_feature (89)..(259): Homolog of NCBI NO: 21594286 NR Description: unknown [Arabidopsis thaliana]
  misc_feature (91)..(256): Homolog of NCBI NO: 7511922 NR Description: hypothetical protein 80H7.10 - fruit fly melanogaster) >gi|4691237|emb|CAB41536.1| version:''1.0'',
RSHHTTMTGALFRNAASDAARIFRLQRATMTNPFGKLDPLPIGGNIQRLQSRPFYRTPQFLGKAKETGVSGFCSSSSSSSSTVSTAGFIGWYLGMVKSRPVLTKSVTSSLIYIAADLSSQTIPQASVDSYDLVRTARMGGYGLLILGPTLHYWFNLMSSLFPKRDLITTFKKMAMGQTVYGPAMNVVFFSLNAALQGENGSEIVARLKRDLLPTMLNGVMYWPLCDFITFKFCPVYLQPLVSNSFSYLWTIYITYMASRATPTAIEI

SEQ ID NO: 80348 - protein, 261 aa, Arabidopsis thaliana
  peptide (1)..(261): Ceres Seq. ID no. 12655433
  misc_feature (189)..(256): Pfam Name: Mpv17 / PMP22 family Pfam Description: Mpv17 / PMP22 family
  misc_feature (1)..(261): Homolog of NCBI NO: 18418319 NR Description: Expressed protein; protein id: At4g33905.1, by cDNA: gi_13358221 [Arabidopsis thaliana]
  misc_feature (1)..(234): Homolog of NCBI NO: 7485624 NR Description: hypothetical protein F17I5.90 - Arabidopsis >gi|3297814|emb|CAA19872.1| putative protein [Arabidopsis >gi|7270339|emb|CAB80107.1| putative protein [Arabidopsis
  misc_feature (1)..(259): Homolog of NCBI NO: 15226016 NR Description: 22 kDa peroxisomal membrane protein; protein id: [Arabidopsis thaliana] >gi|25411581|pir||C84522 22 kDa
  misc_feature (63)..(253): Homolog of NCBI NO: 21553640 NR Description: contains similarity to 22 kDa peroxisomal
  misc_feature (63)..(253): Homolog of NCBI NO: 18422298 NR Description: putative protein; protein id: At5g43140.1,
  misc_feature (63)..(232): Homolog of NCBI NO: 9757841 NR Description: contains similarity to 22 kDa peroxisomal
  misc_feature (83)..(253): Homolog of NCBI NO: 15241166 NR Description: putative protein; protein id: At5g19750.1, by cDNA: 6789., supported by cDNA: gi_16648745 [Arabidopsis
  misc_feature (83)..(253): Homolog of NCBI NO: 21594286 NR Description: unknown [Arabidopsis thaliana]
  misc_feature (83)..(253): Homolog of NCBI NO: 16648746 NR Description: AT5g19750/T29J13_170 [Arabidopsis thaliana]
  misc_feature (85)..(250): Homolog of NCBI NO: 7511922 NR Description: hypothetical protein 80H7.10 - fruit fly melanogaster) >gi|4691237|emb|CAB41536.1| version:''1.0'',
MTGALFRNAASDAARIFRLQRATMTNPFGKLDPLPIGGNIQRLQSRPFYRTPQFLGKAKETGVSGFCSSSSSSSSTVSTAGFIGWYLGMVKSRPVLTKSVTSSLIYIAADLSSQTIPQASVDSYDLVRTARMGGYGLLILGPTLHYWFNLMSSLFPKRDLITTFKKMAMGQTVYGPAMNVVFFSLNAALQGENGSEIVARLKRDLLPTMLNGVMYWPLCDFITFKFCPVYLQPLVSNSFSYLWTIYITYMASRATPTAIEI

SEQ ID NO: 80349 - protein, 238 aa, Arabidopsis thaliana
  peptide (1)..(238): Ceres Seq. ID no. 12655434
  misc_feature (166)..(233): Pfam Name: Mpv17 / PMP22 family Pfam Description: Mpv17 / PMP22 family
  misc_feature (1)..(238): Homolog of NCBI NO: 18418319 NR Description: Expressed protein; protein id: At4g33905.1, by cDNA: gi_13358221 [Arabidopsis thaliana]
  misc_feature (1)..(211): Homolog of NCBI NO: 7485624 NR Description: hypothetical protein F17I5.90 - Arabidopsis >gi|3297814|emb|CAA19872.1| putative protein [Arabidopsis >gi|7270339|emb|CAB80107.1| putative protein [Arabidopsis
  misc_feature (1)..(236): Homolog of NCBI NO: 15226016 NR Description: 22 kDa peroxisomal membrane protein; protein id: [Arabidopsis thaliana] >gi|25411581|pir||C84522 22 kDa
  misc_feature (40)..(230): Homolog of NCBI NO: 21553640 NR Description: contains similarity to 22 kDa peroxisomal
  misc_feature (40)..(230): Homolog of NCBI NO: 18422298 NR Description: putative protein; protein id: At5g43140.1,
  misc_feature (40)..(209): Homolog of NCBI NO: 9757841 NR Description: contains similarity to 22 kDa peroxisomal
  misc_feature (60)..(230): Homolog of NCBI NO: 15241166 NR Description: putative protein; protein id: At5g19750.1, by cDNA: 6789., supported by cDNA: gi_16648745 [Arabidopsis
  misc_feature (60)..(230): Homolog of NCBI NO: 21594286 NR Description: unknown [Arabidopsis thaliana]
  misc_feature (60)..(230): Homolog of NCBI NO: 16648746 NR Description: AT5g19750/T29J13_170 [Arabidopsis thaliana]
  misc_feature (62)..(227): Homolog of NCBI NO: 7511922 NR Description: hypothetical protein 80H7.10 - fruit fly melanogaster) >gi|4691237|emb|CAB41536.1| version:''1.0'',
MTNPFGKLDPLPIGGNIQRLQSRPFYRTPQFLGKAKETGVSGFCSSSSSSSSTVSTAGFIGWYLGMVKSRPVLTKSVTSSLIYIAADLSSQTIPQASVDSYDLVRTARMGGYGLLILGPTLHYWFNLMSSLFPKRDLITTFKKMAMGQTVYGPAMNVVFFSLNAALQGENGSEIVARLKRDLLPTMLNGVMYWPLCDFITFKFCPVYLQPLVSNSFSYLWTIYITYMASRATPTAIEI

SEQ ID NO: 80350 - DNA, 1666 bp, Arabidopsis thaliana
  misc_feature (1)..(1666): Ceres Seq. ID no. 12655435
  misc_feature: MA Experiment ID: 20000184 Result: Down-regulated in Transcription
  misc_feature: MA Experiment 20000184 PARAMETER Experiment Name: At_Shoots__P Parameter: Age (day) Value: 7
  misc_feature: MA Experiment 20000184 PARAMETER Experiment Name: At_Shoots__P Parameter: Tissue Value: Shoots vs. Whole Plant
atcgattgagctttctacttgaaaaccatcttttccgatctatcgaatcggagcggcgaaggaaggagaatgggtgtccgtacaatatctcaggaggcattcgacgatctggttagggaaaatgttgaagatcttggtatggatccctccgaagctctcgaagacgctctctacactctcaagctccaaggcgtcgatctctttgggatcattacatgtgttcctggagaaagtagcgttaaggacaatccggtgattgcttgtttagatagactaaaagaattcgacagtgtttcaatagacggacctcttcgagatgaggttttcgatgagatatcgagtttgttcaagaatctcaatgagctttgtagcagccaagaatcagggaacgctgcaattgcgacaaaacatggtgctgtggatttaacttgctcgatttgttccaaaatcaagatatctactagaagtaatcgtgttcttgttccttgctttaaggctttggctgtgttgatccgtgacattcagagcacagagagattcaggaattgtactggaccaaatatcgttgttgatctcttaaatgattccagctccgattctgatttgttagatgctggttttgcggttgttgctgctgcagcaactggtaatgaagttgtgaaacagttattcatggaactgaaaatcgatgaacttattctgcaagtgttgaatagagagagtaaaactaccattagagctctgtacgatgctatttgtgctcttttgactccagatgacttccgtgttgttgcttcccaagtttatggttatgcacgaacttttgccaaattagggattgcgacagccctcactgaagcattacaggcagggattggctctgatagtttggtgtcagcaagtactgcgttaaaagcaattgctgtcaatgatgaaatatgtaaatctattgctgaatccggtggaatagatacacttcttcggtgtattgatgatagcggtgagcaaggcaacaaaactgctgctaagacatgttgttccctgttgtctaagttggcaggaagtgactctaacaagagtaccatagttgagaagcaaggtctggacaagctaatcacactcgcactacgattctctgatgatcctctagtcatacaagaggtgatgttgataatctctataatctgtctgagatcaccagaccacgcagccaaggctatagaagctggagctggtgatctagcggtccaagcaatgaagaggttcccagtagctgctcaaatgcagagaaacgcttgcaacatgatacggaacattgctgtcagaagtgcagagaacagaactattctgcttgctaatggaatcgagaagctgataagaactgctaaagccaacaatgagacatgcagagccgctgcaactgatgcactgagagaccttggccttgataactacaataactaaggtcaatctttctccattggttggtactcgcaacaaccggaatgaatccagttttttttttcaaaaatttcataaacagtttgcattgagttctctcttttgggtagaaggcattccgatctagtcttttttgcaacgattgcttttgttcgaatgcttgaacatgtagtaaaattgaaaggaattgattgaaaatttcggt

SEQ ID NO: 80351 - protein, 464 aa, Arabidopsis thaliana
  peptide (1)..(464): Ceres Seq. ID no. 12655436
  misc_feature (1)..(464): Homolog of NCBI NO: 18418335 NR Description: putative protein; protein id: At4g33945.1, by cDNA: gi_20466737 [Arabidopsis thaliana]
  misc_feature (41)..(464): Homolog of NCBI NO: 7485612 NR Description: hypothetical protein F17I5.130 - Arabidopsis >gi|3297818|emb|CAA19876.1| putative protein [Arabidopsis >gi|7270343|emb|CAB80111.1| putative protein [Arabidopsis
  misc_feature (1)..(458): Homolog of NCBI NO: 26340074 NR Description: unnamed protein product [Mus musculus]
  misc_feature (1)..(458): Homolog of NCBI NO: 29789345 NR Description: arginine/serine-rich 14 splicing factor [Mus >gi|26349233|dbj|BAC38256.1| unnamed protein product [Mus
  misc_feature (1)..(458): Homolog of NCBI NO: 26348633 NR Description: unnamed protein product [Mus musculus] Unknown (protein for MGC:57975) [Mus musculus]
  misc_feature (4)..(458): Homolog of NCBI NO: 15529984 NR Description: hypothetical gene MGC19595 [Homo sapiens]
  misc_feature (1)..(458): Homolog of NCBI NO: 4106984 NR Description: R30923_1 [Homo sapiens]
  misc_feature (1)..(458): Homolog of NCBI NO: 34877647 NR Description: similar to hypothetical gene MGC19595 [Rattus
  misc_feature (4)..(458): Homolog of NCBI NO: 19922518 NR Description: CG5721-PA [Drosophila melanogaster]
  misc_feature (170)..(458): Homolog of NCBI NO: 13543170 NR Description: Unknown (protein for IMAGE:3601378) [Mus musculus]
MGVRTISQEAFDDLVRENVEDLGMDPSEALEDALYTLKLQGVDLFGIITCVPGESSVKDNPVIACLDRLKEFDSVSIDGPLRDEVFDEISSLFKNLNELCSSQESGNAAIATKHGAVDLTCSICSKIKISTRSNRVLVPCFKALAVLIRDIQSTERFRNCTGPNIVVDLLNDSSSDSDLLDAGFAVVAAAATGNEVVKQLFMELKIDELILQVLNRESKTTIRALYDAICALLTPDDFRVVASQVYGYARTFAKLGIATALTEALQAGIGSDSLVSASTALKAIAVNDEICKSIAESGGIDTLLRCIDDSGEQGNKTAAKTCCSLLSKLAGSDSNKSTIVEKQGLDKLITLALRFSDDPLVIQEVMLIISIICLRSPDHAAKAIEAGAGDLAVQAMKRFPVAAQMQRNACNMIRNIAVRSAENRTILLANGIEKLIRTAKANNETCRAAATDALRDLGLDNYNN

SEQ ID NO: 80352 - protein, 441 aa, Arabidopsis thaliana
  peptide (1)..(441): Ceres Seq. ID no. 12655437
  misc_feature (1)..(441): Homolog of NCBI NO: 18418335 NR Description: putative protein; protein id: At4g33945.1, by cDNA: gi_20466737 [Arabidopsis thaliana]
  misc_feature (18)..(441): Homolog of NCBI NO: 7485612 NR Description: hypothetical protein F17I5.130 - Arabidopsis >gi|3297818|emb|CAA19876.1| putative protein [Arabidopsis >gi|7270343|emb|CAB80111.1| putative protein [Arabidopsis
  misc_feature (1)..(435): Homolog of NCBI NO: 26340074 NR Description: unnamed protein product [Mus musculus]
  misc_feature (1)..(435): Homolog of NCBI NO: 29789345 NR Description: arginine/serine-rich 14 splicing factor [Mus >gi|26349233|dbj|BAC38256.1| unnamed protein product [Mus
  misc_feature (1)..(435): Homolog of NCBI NO: 26348633 NR Description: unnamed protein product [Mus musculus] Unknown (protein for MGC:57975) [Mus musculus]
  misc_feature (1)..(435): Homolog of NCBI NO: 15529984 NR Description: hypothetical gene MGC19595 [Homo sapiens]
  misc_feature (1)..(435): Homolog of NCBI NO: 4106984 NR Description: R30923_1 [Homo sapiens]
  misc_feature (1)..(435): Homolog of NCBI NO: 34877647 NR Description: similar to hypothetical gene MGC19595 [Rattus
  misc_feature (1)..(435): Homolog of NCBI NO: 19922518 NR Description: CG5721-PA [Drosophila melanogaster]
  misc_feature (147)..(435): Homolog of NCBI NO: 13543170 NR Description: Unknown (protein for IMAGE:3601378) [Mus musculus]
MDPSEALEDALYTLKLQGVDLFGIITCVPGESSVKDNPVIACLDRLKEFDSVSIDGPLRDEVFDEISSLFKNLNELCSSQESGNAAIATKHGAVDLTCSICSKIKISTRSNRVLVPCFKALAVLIRDIQSTERFRNCTGPNIVVDLLNDSSSDSDLLDAGFAVVAAAATGNEVVKQLFMELKIDELILQVLNRESKTTIRALYDAICALLTPDDFRVVASQVYGYARTFAKLGIATALTEALQAGIGSDSLVSASTALKAIAVNDEICKSIAESGGIDTLLRCIDDSGEQGNKTAAKTCCSLLSKLAGSDSNKSTIVEKQGLDKLITLALRFSDDPLVIQEVMLIISIICLRSPDHAAKAIEAGAGDLAVQAMKRFPVAAQMQRNACNMIRNIAVRSAENRTILLANGIEKLIRTAKANNETCRAAATDALRDLGLDNYNN

SEQ ID NO: 80353 - protein, 263 aa, Arabidopsis thaliana
  peptide (1)..(263): Ceres Seq. ID no. 12655438
  misc_feature (1)..(263): Homolog of NCBI NO: 18418335 NR Description: putative protein; protein id: At4g33945.1, by cDNA: gi_20466737 [Arabidopsis thaliana]
  misc_feature (1)..(263): Homolog of NCBI NO: 7485612 NR Description: hypothetical protein F17I5.130 - Arabidopsis >gi|3297818|emb|CAA19876.1| putative protein [Arabidopsis >gi|7270343|emb|CAB80111.1| putative protein [Arabidopsis
  misc_feature (1)..(257): Homolog of NCBI NO: 26340074 NR Description: unnamed protein product [Mus musculus]
  misc_feature (1)..(257): Homolog of NCBI NO: 29789345 NR Description: arginine/serine-rich 14 splicing factor [Mus >gi|26349233|dbj|BAC38256.1| unnamed protein product [Mus
  misc_feature (1)..(257): Homolog of NCBI NO: 26348633 NR Description: unnamed protein product [Mus musculus] Unknown (protein for MGC:57975) [Mus musculus]
  misc_feature (1)..(257): Homolog of NCBI NO: 15529984 NR Description: hypothetical gene MGC19595 [Homo sapiens]
  misc_feature (1)..(257): Homolog of NCBI NO: 4106984 NR Description: R30923_1 [Homo sapiens]
  misc_feature (1)..(257): Homolog of NCBI NO: 34877647 NR Description: similar to hypothetical gene MGC19595 [Rattus
  misc_feature (1)..(257): Homolog of NCBI NO: 19922518 NR Description: CG5721-PA [Drosophila melanogaster]
  misc_feature (1)..(257): Homolog of NCBI NO: 13543170 NR Description: Unknown (protein for IMAGE:3601378) [Mus musculus]
MELKIDELILQVLNRESKTTIRALYDAICALLTPDDFRVVASQVYGYARTFAKLGIATALTEALQAGIGSDSLVSASTALKAIAVNDEICKSIAESGGIDTLLRCIDDSGEQGNKTAAKTCCSLLSKLAGSDSNKSTIVEKQGLDKLITLALRFSDDPLVIQEVMLIISIICLRSPDHAAKAIEAGAGDLAVQAMKRFPVAAQMQRNACNMIRNIAVRSAENRTILLANGIEKLIRTAKANNETCRAAATDALRDLGLDNYNN

SEQ ID NO: 80354 - DNA, 1287 bp, Arabidopsis thaliana
  misc_feature (1)..(1287): Ceres Seq. ID no. 12655439
  misc_feature: MA Experiment ID: 20000437 Result: Up-regulated in Transcription
  misc_feature: MA Experiment 20000437 PARAMETER Experiment Name: At_Drought_P Parameter: Age (day) Value: 8
  misc_feature: MA Experiment 20000437 PARAMETER Experiment Name: At_Drought_P Parameter: Organism Value: A. thaliana
  misc_feature: MA Experiment 20000437 PARAMETER Experiment Name: At_Drought_P Parameter: Plant Line Value: WS
  misc_feature: MA Experiment 20000437 PARAMETER Experiment Name: At_Drought_P Parameter: Timepoint (hr) Value: 24
  misc_feature: MA Experiment 20000437 PARAMETER Experiment Name: At_Drought_P Parameter: Tissue Value: Whole Plant
  misc_feature: MA Experiment 20000437 PARAMETER Experiment Name: At_Drought_P Parameter: Treatment Value: Drought vs. No Drought
  misc_feature: MA Experiment ID: 20000453 Result: Up-regulated in Transcription
  misc_feature: MA Experiment 20000453 PARAMETER Experiment Name: At_100uM_ABA_P Parameter: Age (day) Value: 15
  misc_feature: MA Experiment 20000453 PARAMETER Experiment Name: At_100uM_ABA_P Parameter: Organism Value: A. thaliana
  misc_feature: MA Experiment 20000453 PARAMETER Experiment Name: At_100uM_ABA_P Parameter: Plant Line Value: WS
  misc_feature: MA Experiment 20000453 PARAMETER Experiment Name: At_100uM_ABA_P Parameter: Timepoint (hr) Value: 24
  misc_feature: MA Experiment 20000453 PARAMETER Experiment Name: At_100uM_ABA_P Parameter: Tissue Value: Aerial
  misc_feature: MA Experiment 20000453 PARAMETER Experiment Name: At_100uM_ABA_P Parameter: Treatment Value: 100uM ABA vs. No Treatment
  misc_feature: MA Experiment ID: 20001247 Result: Up-regulated in Transcription
  misc_feature: MA Experiment 20001247 PARAMETER Experiment Name: At_Far-red-induction_P Parameter: Age (day) Value: 7
  misc_feature: MA Experiment 20001247 PARAMETER Experiment Name: At_Far-red-induction_P Parameter: Light Value: Far-red vs. White
  misc_feature: MA Experiment 20001247 PARAMETER Experiment Name: At_Far-red-induction_P Parameter: Organism Value: A. thaliana
  misc_feature: MA Experiment 20001247 PARAMETER Experiment Name: At_Far-red-induction_P Parameter: Plant Line Value: Columbia
  misc_feature: MA Experiment 20001247 PARAMETER Experiment Name: At_Far-red-induction_P Parameter: Timepoint (hr) Value: 1
  misc_feature: MA Experiment 20001247 PARAMETER Experiment Name: At_Far-red-induction_P Parameter: Tissue Value: Whole Plant
  misc_feature: MA Experiment ID: 20001555 Result: Up-regulated in Transcription
  misc_feature: MA Experiment 20001555 PARAMETER Experiment Name: At_Drought_Soil_Dry_P Parameter: Age (day) Value: 24
  misc_feature: MA Experiment 20001555 PARAMETER Experiment Name: At_Drought_Soil_Dry_P Parameter: Organism Value: A. thaliana
  misc_feature: MA Experiment 20001555 PARAMETER Experiment Name: At_Drought_Soil_Dry_P Parameter: Plant Line Value: WS
  misc_feature: MA Experiment 20001555 PARAMETER Experiment Name: At_Drought_Soil_Dry_P Parameter: Post Timepoint (hr) Value: None
  misc_feature: MA Experiment 20001555 PARAMETER Experiment Name: At_Drought_Soil_Dry_P Parameter: Post-Treatment Value: None
  misc_feature: MA Experiment 20001555 PARAMETER Experiment Name: At_Drought_Soil_Dry_P Parameter: Timepoint (day) Value: 10
  misc_feature: MA Experiment 20001555 PARAMETER Experiment Name: At_Drought_Soil_Dry_P Parameter: Treatment Value: Drought vs. No Drought
  misc_feature: MA Experiment ID: 20001757 Result: Down-regulated in Transcription
  misc_feature: MA Experiment 20001757 PARAMETER Experiment Name: At_50mM_NH4NO3_L-to-H_P Parameter: Timepoint (hr) Value: 6
  misc_feature: MA Experiment 20001757 PARAMETER Experiment Name: At_50mM_NH4NO3_L-to-H_P Parameter: Tissue Value: Leaf
  misc_feature: MA Experiment 20001757 PARAMETER Experiment Name: At_50mM_NH4NO3_L-to-H_P Parameter: Treatment Value: 50mM NH4NO3 vs 100mM Mannitol
  misc_feature: MA Experiment ID: 20001905 Result: Up-regulated in Transcription
  misc_feature: MA Experiment 20001905 PARAMETER Experiment Name: At_Drought_Reproduction_P Parameter: Age (day) Value: 40
  misc_feature: MA Experiment 20001905 PARAMETER Experiment Name: At_Drought_Reproduction_P Parameter: Organism Value: A. thaliana
  misc_feature: MA Experiment 20001905 PARAMETER Experiment Name: At_Drought_Reproduction_P Parameter: Plant Line Value: WS
  misc_feature: MA Experiment 20001905 PARAMETER Experiment Name: At_Drought_Reproduction_P Parameter: Timepoint (day) Value: 10
  misc_feature: MA Experiment 20001905 PARAMETER Experiment Name: At_Drought_Reproduction_P Parameter: Tissue Value: Rosettes
  misc_feature: MA Experiment 20001905 PARAMETER Experiment Name: At_Drought_Reproduction_P Parameter: Treatment Value: Drought vs. No Drought
acagagattgaagtcgcaaagagacagaggaaagagggggagaaaatggatcgaccagcagtgagtggtccaatggatttgccgattatgcacgatagtgataggtatgaactcgtcaaggatattggctccggtaattttggagttgcgagattgatgagagacaagcaaagtaatgagcttgttgctgttaaatatatcgagagaggtgagaagatagatgaaaatgtaaaaagggagataatcaaccacaggtccttaagacatcccaatatcgttagattcaaagaggttatattaacaccaacccatttagccattgttatggaatatgcatctggaggagaacttttcgagcgaatctgcaatgcaggccgcttcagcgaagacgaggcgaggtttttcttccagcaactcatttcaggagttagttactgtcatgctatgcaagtatgtcaccgagacttaaagctcgagaatacgttattagatggtagcccggcccctcgtctaaagatatgtgatttcggatattctaagtcatcagtgttacattcgcaaccaaaatcaactgttggaactcctgcttacatcgctcctgaggttttactaaagaaagaatatgatggaaaggttgcagatgtttggtcttgtggggttactctgtatgtcatgctggttggagcatatcctttcgaagatcccgaggaaccaaagaatttcaggaaaactatacatagaatcctgaatgttcagtatgctattccggattatgttcacatatctcctgaatgtcgccatttgatctccagaatatttgttgctgaccctgcaaagaggatatcaattcctgaaataaggaaccatgaatggtttctaaagaatctaccggcagatctaatgaacgataacacgatgaccactcagtttgatgaatcggatcaaccgggccaaagcatagaagaaattatgcagatcattgcagaagcaactgttcctcctgcaggcactcagaatctgaaccattacctcacaggaagcttggacatagatgacgatatggaggaagacttagagagcgaccttgatgatcttgacatcgacagtagcggagagattgtgtacgcaatgtgatactatatatctatttgcatggtttctgctacaaaaatgtcaaacaaaaaatgttgaagaataagattaagatgttttgcttgctattgagttggcccaactttgtctcaatgagtacactttgaatctttgatatgcaaaagactaaatttc

SEQ ID NO: 80355 - protein, 377 aa, Arabidopsis thaliana
  peptide (1)..(377): Ceres Seq. ID no. 12655440
  misc_feature (36)..(292): Pfam Name: Protein kinase domain Pfam Description: Protein kinase domain
  misc_feature (16)..(377): Homolog of NCBI NO: 18418337 NR Description: protein kinase - like protein; protein id: supported by cDNA: gi_15451087, supported by cDNA: gi_20148418
  misc_feature (16)..(377): Homolog of NCBI NO: 7446439 NR Description: probable serine/threonine-specific protein kinase
  misc_feature (16)..(377): Homolog of NCBI NO: 15240124 NR Description: protein kinase, 41K (EC 2.7.1.-) (pir||S71172); id: At5g66880.1, supported by cDNA: gi_166818 [Arabidopsis
  misc_feature (27)..(377): Homolog of NCBI NO: 20260398 NR Description: putative protein [Arabidopsis thaliana]
  misc_feature (16)..(377): Homolog of NCBI NO: 15229772 NR Description: protein kinase SPK-2; protein id: At3g50500.1, by cDNA: 3988., supported by cDNA: gi_16209651, supported by
  misc_feature (16)..(377): Homolog of NCBI NO: 21593534 NR Description: protein kinase SPK-2 [Arabidopsis thaliana]
  misc_feature (25)..(377): Homolog of NCBI NO: 6739629 NR Description: abscisic acid-activated protein kinase [Vicia
  misc_feature (34)..(377): Homolog of NCBI NO: 29164823 NR Description: abcisic acid-inducible protein kinanase [Oryza
  misc_feature (34)..(374): Homolog of NCBI NO: 14588571 NR Description: protein kinase HvPKABA1 [Hordeum vulgare subsp. >gi|14588573|dbj|BAB61736.1| protein kinase HvPKABA1 [Hordeum
  misc_feature (36)..(325): Homolog of NCBI NO: 18395701 NR Description: Snf1-related protein kinase KIN10 (AKIN10);
TEIEVAKRQRKEGEKMDRPAVSGPMDLPIMHDSDRYELVKDIGSGNFGVARLMRDKQSNELVAVKYIERGEKIDENVKREIINHRSLRHPNIVRFKEVILTPTHLAIVMEYASGGELFERICNAGRFSEDEARFFFQQLISGVSYCHAMQVCHRDLKLENTLLDGSPAPRLKICDFGYSKSSVLHSQPKSTVGTPAYIAPEVLLKKEYDGKVADVWSCGVTLYVMLVGAYPFEDPEEPKNFRKTIHRILNVQYAIPDYVHISPECRHLISRIFVADPAKRISIPEIRNHEWFLKNLPADLMNDNTMTTQFDESDQPGQSIEEIMQIIAEATVPPAGTQNLNHYLTGSLDIDDDMEEDLESDLDDLDIDSSGEIVYAM

SEQ ID NO: 80356 - protein, 362 aa, Arabidopsis thaliana
  peptide (1)..(362): Ceres Seq. ID no. 12655441
  misc_feature (21)..(277): Pfam Name: Protein kinase domain Pfam Description: Protein kinase domain
  misc_feature (1)..(362): Homolog of NCBI NO: 18418337 NR Description: protein kinase - like protein; protein id: supported by cDNA: gi_15451087, supported by cDNA: gi_20148418
  misc_feature (1)..(362): Homolog of NCBI NO: 7446439 NR Description: probable serine/threonine-specific protein kinase
  misc_feature (1)..(362): Homolog of NCBI NO: 15240124 NR Description: protein kinase, 41K (EC 2.7.1.-) (pir||S71172); id: At5g66880.1, supported by cDNA: gi_166818 [Arabidopsis
  misc_feature (12)..(362): Homolog of NCBI NO: 20260398 NR Description: putative protein [Arabidopsis thaliana]
  misc_feature (1)..(362): Homolog of NCBI NO: 15229772 NR Description: protein kinase SPK-2; protein id: At3g50500.1, by cDNA: 3988., supported by cDNA: gi_16209651, supported by
  misc_feature (1)..(362): Homolog of NCBI NO: 21593534 NR Description: protein kinase SPK-2 [Arabidopsis thaliana]
  misc_feature (10)..(362): Homolog of NCBI NO: 6739629 NR Description: abscisic acid-activated protein kinase [Vicia
  misc_feature (19)..(362): Homolog of NCBI NO: 29164823 NR Description: abcisic acid-inducible protein kinanase [Oryza
  misc_feature (19)..(359): Homolog of NCBI NO: 14588571 NR Description: protein kinase HvPKABA1 [Hordeum vulgare subsp. >gi|14588573|dbj|BAB61736.1| protein kinase HvPKABA1 [Hordeum
  misc_feature (21)..(310): Homolog of NCBI NO: 18395701 NR Description: Snf1-related protein kinase KIN10 (AKIN10);
MDRPAVSGPMDLPIMHDSDRYELVKDIGSGNFGVARLMRDKQSNELVAVKYIERGEKIDENVKREIINHRSLRHPNIVRFKEVILTPTHLAIVMEYASGGELFERICNAGRFSEDEARFFFQQLISGVSYCHAMQVCHRDLKLENTLLDGSPAPRLKICDFGYSKSSVLHSQPKSTVGTPAYIAPEVLLKKEYDGKVADVWSCGVTLYVMLVGAYPFEDPEEPKNFRKTIHRILNVQYAIPDYVHISPECRHLISRIFVADPAKRISIPEIRNHEWFLKNLPADLMNDNTMTTQFDESDQPGQSIEEIMQIIAEATVPPAGTQNLNHYLTGSLDIDDDMEEDLESDLDDLDIDSSGEIVYAM

SEQ ID NO: 80357 - protein, 353 aa, Arabidopsis thaliana
  peptide (1)..(353): Ceres Seq. ID no. 12655442
  misc_feature (12)..(268): Pfam Name: Protein kinase domain Pfam Description: Protein kinase domain
  misc_feature (1)..(353): Homolog of NCBI NO: 18418337 NR Description: protein kinase - like protein; protein id: supported by cDNA: gi_15451087, supported by cDNA: gi_20148418
  misc_feature (1)..(353): Homolog of NCBI NO: 7446439 NR Description: probable serine/threonine-specific protein kinase
  misc_feature (1)..(353): Homolog of NCBI NO: 15240124 NR Description: protein kinase, 41K (EC 2.7.1.-) (pir||S71172); id: At5g66880.1, supported by cDNA: gi_166818 [Arabidopsis
  misc_feature (3)..(353): Homolog of NCBI NO: 20260398 NR Description: putative protein [Arabidopsis thaliana]
  misc_feature (1)..(353): Homolog of NCBI NO: 15229772 NR Description: protein kinase SPK-2; protein id: At3g50500.1, by cDNA: 3988., supported by cDNA: gi_16209651, supported by
  misc_feature (1)..(353): Homolog of NCBI NO: 21593534 NR Description: protein kinase SPK-2 [Arabidopsis thaliana]
  misc_feature (1)..(353): Homolog of NCBI NO: 6739629 NR Description: abscisic acid-activated protein kinase [Vicia
  misc_feature (10)..(353): Homolog of NCBI NO: 29164823 NR Description: abcisic acid-inducible protein kinanase [Oryza
  misc_feature (10)..(350): Homolog of NCBI NO: 14588571 NR Description: protein kinase HvPKABA1 [Hordeum vulgare subsp. >gi|14588573|dbj|BAB61736.1| protein kinase HvPKABA1 [Hordeum
  misc_feature (12)..(301): Homolog of NCBI NO: 18395701 NR Description: Snf1-related protein kinase KIN10 (AKIN10);
MDLPIMHDSDRYELVKDIGSGNFGVARLMRDKQSNELVAVKYIERGEKIDENVKREIINHRSLRHPNIVRFKEVILTPTHLAIVMEYASGGELFERICNAGRFSEDEARFFFQQLISGVSYCHAMQVCHRDLKLENTLLDGSPAPRLKICDFGYSKSSVLHSQPKSTVGTPAYIAPEVLLKKEYDGKVADVWSCGVTLYVMLVGAYPFEDPEEPKNFRKTIHRILNVQYAIPDYVHISPECRHLISRIFVADPAKRISIPEIRNHEWFLKNLPADLMNDNTMTTQFDESDQPGQSIEEIMQIIAEATVPPAGTQNLNHYLTGSLDIDDDMEEDLESDLDDLDIDSSGEIVYAM

SEQ ID NO: 80358 - DNA, 1761 bp, Arabidopsis thaliana
  misc_feature (1)..(1761): Ceres Seq. ID no. 12655459
  misc_feature: MA Experiment ID: 20000306 Result: Down-regulated in Transcription
  misc_feature: MA Experiment 20000306 PARAMETER Experiment Name: At_Germinating_Seeds_Sub_P Parameter: Age (hr) Value: 6 vs. 0
  misc_feature: MA Experiment 20000306 PARAMETER Experiment Name: At_Germinating_Seeds_Sub_P Parameter: Organism Value: A. thaliana
  misc_feature: MA Experiment 20000306 PARAMETER Experiment Name: At_Germinating_Seeds_Sub_P Parameter: Plant Line Value: WS
  misc_feature: MA Experiment 20000306 PARAMETER Experiment Name: At_Germinating_Seeds_Sub_P Parameter: Tissue Value: Germinating Seeds
  misc_feature: MA Experiment ID: 20000307 Result: Down-regulated in Transcription
  misc_feature: MA Experiment 20000307 PARAMETER Experiment Name: At_Germinating_Seeds_Sub_P Parameter: Age (hr) Value: 24 vs. 0
  misc_feature: MA Experiment 20000307 PARAMETER Experiment Name: At_Germinating_Seeds_Sub_P Parameter: Organism Value: A. thaliana
  misc_feature: MA Experiment 20000307 PARAMETER Experiment Name: At_Germinating_Seeds_Sub_P Parameter: Plant Line Value: WS
  misc_feature: MA Experiment 20000307 PARAMETER Experiment Name: At_Germinating_Seeds_Sub_P Parameter: Tissue Value: Germinating Seeds
  misc_feature: MA Experiment ID: 20000328 Result: Down-regulated in Transcription
  misc_feature: MA Experiment 20000328 PARAMETER Experiment Name: At_42deg_Heat_Sub_P Parameter: Age (day) Value: 14
  misc_feature: MA Experiment 20000328 PARAMETER Experiment Name: At_42deg_Heat_Sub_P Parameter: Organism Value: A. thaliana
  misc_feature: MA Experiment 20000328 PARAMETER Experiment Name: At_42deg_Heat_Sub_P Parameter: Plant Line Value: WS
  misc_feature: MA Experiment 20000328 PARAMETER Experiment Name: At_42deg_Heat_Sub_P Parameter: Temperature (deg C) Value: 42 vs. 22
  misc_feature: MA Experiment 20000328 PARAMETER Experiment Name: At_42deg_Heat_Sub_P Parameter: Timepoint (hr) Value: 6
  misc_feature: MA Experiment 20000328 PARAMETER Experiment Name: At_42deg_Heat_Sub_P Parameter: Tissue Value: Aerial
  misc_feature: MA Experiment ID: 20000346 Result: Up-regulated in Transcription
  misc_feature: MA Experiment 20000346 PARAMETER Experiment Name: At_2mM_SA_Sub_P Parameter: Age (day) Value: 14
  misc_feature: MA Experiment 20000346 PARAMETER Experiment Name: At_2mM_SA_Sub_P Parameter: Organism Value: A. thaliana
  misc_feature: MA Experiment 20000346 PARAMETER Experiment Name: At_2mM_SA_Sub_P Parameter: Plant Line Value: WS
  misc_feature: MA Experiment 20000346 PARAMETER Experiment Name: At_2mM_SA_Sub_P Parameter: Timepoint (hr) Value: 1
  misc_feature: MA Experiment 20000346 PARAMETER Experiment Name: At_2mM_SA_Sub_P Parameter: Tissue Value: Aerial
  misc_feature: MA Experiment 20000346 PARAMETER Experiment Name: At_2mM_SA_Sub_P Parameter: Treatment Value: 2mM SA vs. No Treatment
  misc_feature: MA Experiment ID: 20000347 Result: Up-regulated in Transcription
  misc_feature: MA Experiment 20000347 PARAMETER Experiment Name: At_2mM_SA_Sub_P Parameter: Age (day) Value: 14
  misc_feature: MA Experiment 20000347 PARAMETER Experiment Name: At_2mM_SA_Sub_P Parameter: Organism Value: A. thaliana
  misc_feature: MA Experiment 20000347 PARAMETER Experiment Name: At_2mM_SA_Sub_P Parameter: Plant Line Value: WS
  misc_feature: MA Experiment 20000347 PARAMETER Experiment Name: At_2mM_SA_Sub_P Parameter: Timepoint (hr) Value: 6
  misc_feature: MA Experiment 20000347 PARAMETER Experiment Name: At_2mM_SA_Sub_P Parameter: Tissue Value: Aerial
  misc_feature: MA Experiment 20000347 PARAMETER Experiment Name: At_2mM_SA_Sub_P Parameter: Treatment Value: 2mM SA vs. No Treatment
  misc_feature: MA Experiment ID: 20000355 Result: Down-regulated in Transcription
  misc_feature: MA Experiment 20000355 PARAMETER Experiment Name: At_Siliques_Sub_P Parameter: Age (day) Value: 21
  misc_feature: MA Experiment 20000355 PARAMETER Experiment Name: At_Siliques_Sub_P Parameter: Organism Value: A. thaliana
  misc_feature: MA Experiment 20000355 PARAMETER Experiment Name: At_Siliques_Sub_P Parameter: Plant Line Value: WS
  misc_feature: MA Experiment 20000355 PARAMETER Experiment Name: At_Siliques_Sub_P Parameter: Tissue Value: Less Than 5mm Siliques vs. Whole Plant
  misc_feature: MA Experiment ID: 20000440 Result: Down-regulated in Transcription
  misc_feature: MA Experiment 20000440 PARAMETER Experiment Name: At_Closed-Flower__Sub_P Parameter: Tissue Value: Closed Flower vs. Whole Plant
accacatcattcaacacgacaagaaaacatcacttttctaggagcttcaaaatctctgatttctttttattattttttaaattttcttttcgatcaaagtcaaacatgagtagtgatcctcatcgtaagctccatgttgtgttcttccctttcatggcttatggtcacatgataccaactctagacatggctaagcttttctctagcagaggagccaaatctacaatcctcaccacacctctcaactccaagatcttccaaaaacccatcgaaagattcaagaacctgaatccgagtttcgaaatcgacatccagatcttcgatttcccttgcgtggatctcgggttaccagaaggatgcgaaaacgtcgatttcttcacctcaaacaacaatgatgatagacagtatctgaccttgaagttctttaagtcgacaaggtttttcaaagatcagcttgagaagctcctcgagacaacgagaccagactgtcttatcgccgacatgttcttcccctgggctacggaagctgctgagaagttcaatgtgccaagacttgtgttccacggtactggctacttttctttatgctctgaatattgcatcagagtgcataacccacaaaacatagtagcttcaaggtacgagccatttgtgattcctgatctcccggggaacatagtgataactcaagaacagatagcagaccgtgacgaagaaagcgagatggggaagtttatgattgaggtcaaagaatctgatgtgaagagctcaggtgttattgtaaacagcttctacgagcttgaacctgattacgccgacttttacaagagtgttgtactgaagagagcgtggcatatcggtccgctttcggtttacaacagaggatttgaggagaaggctgagagaggaaagaaagcaagcattaatgaggttgaatgcctcaaatggcttgactccaagaaaccagattcagtcatttacatttcttttgggagcgtggcttgcttcaagaacgagcagctattcgagatcgctgcaggattagaaacttctggagcaaatttcatctgggttgttaggaaaaacataggtattgaaaaagaagaatggttaccagaagggttcgaagagagggtgaaaggaaaagggatgattataagaggatgggcaccacaggtgctcatacttgatcatcaagcaacttgtgggtttgtgacccattgcggctggaactcgcttctggaaggagtggctgcagggctaccaatggtgacatggcctgtagcagcggagcaattctacaatgagaaattggttacgcaagtgctcagaacaggagtgagcgtgggagcgaaaaagaatgtaagaactacgggagatttcattagcagagagaaagtggttaaagcggtgagggaggtgttggttggggaagaggcggatgagaggcgggagagggcaaagaagttggcagagatggctaaagctgccgtggaaggagggtcttctttcaacgatctaaacagcttcatagaagagtttacctcgtaataagcagagaatatggcagagaagaggctgtgatggccaaagccggcggtggagaaaaaagggtcttcgtttctcgatttgaatagcttcattgaaaagacctcagtaagaaattgaaaattagttcgattctgcttagtctttgtcttggtgataagagtagacctgtgctacaataaacatatatgtatcaaatataccatttgtctt

SEQ ID NO: 80359 - protein, 516 aa, Arabidopsis thaliana
  peptide (1)..(516): Ceres Seq. ID no. 12655460
  misc_feature (36)..(516): Homolog of NCBI NO: 18418378 NR Description: similar to glucosyltransferase -like protein; id: At4g34131.1, supported by cDNA: gi_17065353 [Arabidopsis >gi|17065354|gb|AAL32831.1| putative protein [Arabidopsis
  misc_feature (43)..(516): Homolog of NCBI NO: 7433898 NR Description: probable glucosyltransferase F28A23.110 (EC
  misc_feature (36)..(516): Homolog of NCBI NO: 18418380 NR Description: glucosyltransferase -like protein; protein id: supported by cDNA: gi_14334981 [Arabidopsis thaliana] putative glucosyltransferase [Arabidopsis thaliana]
  misc_feature (43)..(515): Homolog of NCBI NO: 18418382 NR Description: similar to glucosyltransferase -like protein; id: At4g34138.1, supported by cDNA: gi_18086384, supported by gi_19699135 [Arabidopsis thaliana] >gi|18086385|gb|AAL57652.1|
  misc_feature (63)..(513): Homolog of NCBI NO: 15226537 NR Description: putative glucosyltransferase; protein id: [Arabidopsis thaliana] >gi|25286797|pir||F84529 probable
  misc_feature (36)..(366): Homolog of NCBI NO: 21594027 NR Description: glucosyltransferase-like protein [Arabidopsis
  misc_feature (43)..(516): Homolog of NCBI NO: 7433906 NR Description: glucosyltransferase IS5a (EC 2.4.1.-),
  misc_feature (43)..(516): Homolog of NCBI NO: 13492674 NR Description: phenylpropanoid:glucosyltransferase 1 [Nicotiana
  misc_feature (34)..(513): Homolog of NCBI NO: 15228033 NR Description: putative glucosyl transferase; protein id: supported by cDNA: gi_20856889 [Arabidopsis thaliana]
  misc_feature (44)..(513): Homolog of NCBI NO: 34911582 NR Description: putative salicylate-induced glucosyltransferase
TTSFNTTRKHHFSRSFKISDFFLLFFKFSFRSKSNMSSDPHRKLHVVFFPFMAYGHMIPTLDMAKLFSSRGAKSTILTTPLNSKIFQKPIERFKNLNPSFEIDIQIFDFPCVDLGLPEGCENVDFFTSNNNDDRQYLTLKFFKSTRFFKDQLEKLLETTRPDCLIADMFFPWATEAAEKFNVPRLVFHGTGYFSLCSEYCIRVHNPQNIVASRYEPFVIPDLPGNIVITQEQIADRDEESEMGKFMIEVKESDVKSSGVIVNSFYELEPDYADFYKSVVLKRAWHIGPLSVYNRGFEEKAERGKKASINEVECLKWLDSKKPDSVIYISFGSVACFKNEQLFEIAAGLETSGANFIWVVRKNIGIEKEEWLPEGFEERVKGKGMIIRGWAPQVLILDHQATCGFVTHCGWNSLLEGVAAGLPMVTWPVAAEQFYNEKLVTQVLRTGVSVGAKKNVRTTGDFISREKVVKAVREVLVGEEADERRERAKKLAEMAKAAVEGGSSFNDLNSFIEEFTS

SEQ ID NO: 80360 - protein, 481 aa, Arabidopsis thaliana
  peptide (1)..(481): Ceres Seq. ID no. 12655461
  misc_feature (1)..(481): Homolog of NCBI NO: 18418378 NR Description: similar to glucosyltransferase -like protein; id: At4g34131.1, supported by cDNA: gi_17065353 [Arabidopsis >gi|17065354|gb|AAL32831.1| putative protein [Arabidopsis
  misc_feature (8)..(481): Homolog of NCBI NO: 7433898 NR Description: probable glucosyltransferase F28A23.110 (EC
  misc_feature (1)..(481): Homolog of NCBI NO: 18418380 NR Description: glucosyltransferase -like protein; protein id: supported by cDNA: gi_14334981 [Arabidopsis thaliana] putative glucosyltransferase [Arabidopsis thaliana]
  misc_feature (8)..(480): Homolog of NCBI NO: 18418382 NR Description: similar to glucosyltransferase -like protein; id: At4g34138.1, supported by cDNA: gi_18086384, supported by gi_19699135 [Arabidopsis thaliana] >gi|18086385|gb|AAL57652.1|
  misc_feature (28)..(478): Homolog of NCBI NO: 15226537 NR Description: putative glucosyltransferase; protein id: [Arabidopsis thaliana] >gi|25286797|pir||F84529 probable
  misc_feature (1)..(331): Homolog of NCBI NO: 21594027 NR Description: glucosyltransferase-like protein [Arabidopsis
  misc_feature (8)..(481): Homolog of NCBI NO: 7433906 NR Description: glucosyltransferase IS5a (EC 2.4.1.-),
  misc_feature (8)..(481): Homolog of NCBI NO: 13492674 NR Description: phenylpropanoid:glucosyltransferase 1 [Nicotiana
  misc_feature (1)..(478): Homolog of NCBI NO: 15228033 NR Description: putative glucosyl transferase; protein id: supported by cDNA: gi_20856889 [Arabidopsis thaliana]
  misc_feature (9)..(478): Homolog of NCBI NO: 34911582 NR Description: putative salicylate-induced glucosyltransferase
MSSDPHRKLHVVFFPFMAYGHMIPTLDMAKLFSSRGAKSTILTTPLNSKIFQKPIERFKNLNPSFEIDIQIFDFPCVDLGLPEGCENVDFFTSNNNDDRQYLTLKFFKSTRFFKDQLEKLLETTRPDCLIADMFFPWATEAAEKFNVPRLVFHGTGYFSLCSEYCIRVHNPQNIVASRYEPFVIPDLPGNIVITQEQIADRDEESEMGKFMIEVKESDVKSSGVIVNSFYELEPDYADFYKSVVLKRAWHIGPLSVYNRGFEEKAERGKKASINEVECLKWLDSKKPDSVIYISFGSVACFKNEQLFEIAAGLETSGANFIWVVRKNIGIEKEEWLPEGFEERVKGKGMIIRGWAPQVLILDHQATCGFVTHCGWNSLLEGVAAGLPMVTWPVAAEQFYNEKLVTQVLRTGVSVGAKKNVRTTGDFISREKVVKAVREVLVGEEADERRERAKKLAEMAKAAVEGGSSFNDLNSFIEEFTS

SEQ ID NO: 80361 - protein, 465 aa, Arabidopsis thaliana
  peptide (1)..(465): Ceres Seq. ID no. 12655462
  misc_feature (1)..(465): Homolog of NCBI NO: 18418378 NR Description: similar to glucosyltransferase -like protein; id: At4g34131.1, supported by cDNA: gi_17065353 [Arabidopsis >gi|17065354|gb|AAL32831.1| putative protein [Arabidopsis
  misc_feature (1)..(465): Homolog of NCBI NO: 7433898 NR Description: probable glucosyltransferase F28A23.110 (EC
  misc_feature (1)..(465): Homolog of NCBI NO: 18418380 NR Description: glucosyltransferase -like protein; protein id: supported by cDNA: gi_14334981 [Arabidopsis thaliana] putative glucosyltransferase [Arabidopsis thaliana]
  misc_feature (1)..(464): Homolog of NCBI NO: 18418382 NR Description: similar to glucosyltransferase -like protein; id: At4g34138.1, supported by cDNA: gi_18086384, supported by gi_19699135 [Arabidopsis thaliana] >gi|18086385|gb|AAL57652.1|
  misc_feature (12)..(462): Homolog of NCBI NO: 15226537 NR Description: putative glucosyltransferase; protein id: [Arabidopsis thaliana] >gi|25286797|pir||F84529 probable
  misc_feature (1)..(315): Homolog of NCBI NO: 21594027 NR Description: glucosyltransferase-like protein [Arabidopsis
  misc_feature (1)..(465): Homolog of NCBI NO: 7433906 NR Description: glucosyltransferase IS5a (EC 2.4.1.-),
  misc_feature (1)..(465): Homolog of NCBI NO: 13492674 NR Description: phenylpropanoid:glucosyltransferase 1 [Nicotiana
  misc_feature (1)..(462): Homolog of NCBI NO: 15228033 NR Description: putative glucosyl transferase; protein id: supported by cDNA: gi_20856889 [Arabidopsis thaliana]
  misc_feature (1)..(462): Homolog of NCBI NO: 34911582 NR Description: putative salicylate-induced glucosyltransferase
MAYGHMIPTLDMAKLFSSRGAKSTILTTPLNSKIFQKPIERFKNLNPSFEIDIQIFDFPCVDLGLPEGCENVDFFTSNNNDDRQYLTLKFFKSTRFFKDQLEKLLETTRPDCLIADMFFPWATEAAEKFNVPRLVFHGTGYFSLCSEYCIRVHNPQNIVASRYEPFVIPDLPGNIVITQEQIADRDEESEMGKFMIEVKESDVKSSGVIVNSFYELEPDYADFYKSVVLKRAWHIGPLSVYNRGFEEKAERGKKASINEVECLKWLDSKKPDSVIYISFGSVACFKNEQLFEIAAGLETSGANFIWVVRKNIGIEKEEWLPEGFEERVKGKGMIIRGWAPQVLILDHQATCGFVTHCGWNSLLEGVAAGLPMVTWPVAAEQFYNEKLVTQVLRTGVSVGAKKNVRTTGDFISREKVVKAVREVLVGEEADERRERAKKLAEMAKAAVEGGSSFNDLNSFIEEFTS

SEQ ID NO: 80362 - DNA, 1762 bp, Arabidopsis thaliana
  misc_feature (1)..(1762): Ceres Seq. ID no. 12655463
  misc_feature: MA Experiment ID: 20000307 Result: Down-regulated in Transcription
  misc_feature: MA Experiment 20000307 PARAMETER Experiment Name: At_Germinating_Seeds_Sub_P Parameter: Age (hr) Value: 24 vs. 0
  misc_feature: MA Experiment 20000307 PARAMETER Experiment Name: At_Germinating_Seeds_Sub_P Parameter: Organism Value: A. thaliana
  misc_feature: MA Experiment 20000307 PARAMETER Experiment Name: At_Germinating_Seeds_Sub_P Parameter: Plant Line Value: WS
  misc_feature: MA Experiment 20000307 PARAMETER Experiment Name: At_Germinating_Seeds_Sub_P Parameter: Tissue Value: Germinating Seeds
  misc_feature: MA Experiment ID: 20000315 Result: Down-regulated in Transcription
  misc_feature: MA Experiment 20000315 PARAMETER Experiment Name: At_14day_Shoots-Roots_Sub_P Parameter: Age (day) Value: 14
  misc_feature: MA Experiment 20000315 PARAMETER Experiment Name: At_14day_Shoots-Roots_Sub_P Parameter: Organism Value: A. thaliana
  misc_feature: MA Experiment 20000315 PARAMETER Experiment Name: At_14day_Shoots-Roots_Sub_P Parameter: Plant Line Value: WS
  misc_feature: MA Experiment 20000315 PARAMETER Experiment Name: At_14day_Shoots-Roots_Sub_P Parameter: Tissue Value: Shoots vs. Whole Plant
  misc_feature: MA Experiment ID: 20000328 Result: Down-regulated in Transcription
  misc_feature: MA Experiment 20000328 PARAMETER Experiment Name: At_42deg_Heat_Sub_P Parameter: Age (day) Value: 14
  misc_feature: MA Experiment 20000328 PARAMETER Experiment Name: At_42deg_Heat_Sub_P Parameter: Organism Value: A. thaliana
  misc_feature: MA Experiment 20000328 PARAMETER Experiment Name: At_42deg_Heat_Sub_P Parameter: Plant Line Value: WS
  misc_feature: MA Experiment 20000328 PARAMETER Experiment Name: At_42deg_Heat_Sub_P Parameter: Temperature (deg C) Value: 42 vs. 22
  misc_feature: MA Experiment 20000328 PARAMETER Experiment Name: At_42deg_Heat_Sub_P Parameter: Timepoint (hr) Value: 6
  misc_feature: MA Experiment 20000328 PARAMETER Experiment Name: At_42deg_Heat_Sub_P Parameter: Tissue Value: Aerial
  misc_feature: MA Experiment ID: 20000346 Result: Up-regulated in Transcription
  misc_feature: MA Experiment 20000346 PARAMETER Experiment Name: At_2mM_SA_Sub_P Parameter: Age (day) Value: 14
  misc_feature: MA Experiment 20000346 PARAMETER Experiment Name: At_2mM_SA_Sub_P Parameter: Organism Value: A. thaliana
  misc_feature: MA Experiment 20000346 PARAMETER Experiment Name: At_2mM_SA_Sub_P Parameter: Plant Line Value: WS
  misc_feature: MA Experiment 20000346 PARAMETER Experiment Name: At_2mM_SA_Sub_P Parameter: Timepoint (hr) Value: 1
  misc_feature: MA Experiment 20000346 PARAMETER Experiment Name: At_2mM_SA_Sub_P Parameter: Tissue Value: Aerial
  misc_feature: MA Experiment 20000346 PARAMETER Experiment Name: At_2mM_SA_Sub_P Parameter: Treatment Value: 2mM SA vs. No Treatment
  misc_feature: MA Experiment ID: 20000347 Result: Up-regulated in Transcription
  misc_feature: MA Experiment 20000347 PARAMETER Experiment Name: At_2mM_SA_Sub_P Parameter: Age (day) Value: 14
  misc_feature: MA Experiment 20000347 PARAMETER Experiment Name: At_2mM_SA_Sub_P Parameter: Organism Value: A. thaliana
  misc_feature: MA Experiment 20000347 PARAMETER Experiment Name: At_2mM_SA_Sub_P Parameter: Plant Line Value: WS
  misc_feature: MA Experiment 20000347 PARAMETER Experiment Name: At_2mM_SA_Sub_P Parameter: Timepoint (hr) Value: 6
  misc_feature: MA Experiment 20000347 PARAMETER Experiment Name: At_2mM_SA_Sub_P Parameter: Tissue Value: Aerial
  misc_feature: MA Experiment 20000347 PARAMETER Experiment Name: At_2mM_SA_Sub_P Parameter: Treatment Value: 2mM SA vs. No Treatment
  misc_feature: MA Experiment ID: 20000355 Result: Down-regulated in Transcription
  misc_feature: MA Experiment 20000355 PARAMETER Experiment Name: At_Siliques_Sub_P Parameter: Age (day) Value: 21
  misc_feature: MA Experiment 20000355 PARAMETER Experiment Name: At_Siliques_Sub_P Parameter: Organism Value: A. thaliana
  misc_feature: MA Experiment 20000355 PARAMETER Experiment Name: At_Siliques_Sub_P Parameter: Plant Line Value: WS
  misc_feature: MA Experiment 20000355 PARAMETER Experiment Name: At_Siliques_Sub_P Parameter: Tissue Value: Less Than 5mm Siliques vs. Whole Plant
atatatacaacgaggaaaaatagtactattttctacgaacttcagaatctttcgtctctcttaattatttttctcaaatttctcgaaacatctagttttcttttcaaccagccaatcatgggtagtgatcatcatcatcgaaagctccacgttatgttcttccctttcatggcttatggtcacatgataccaactctagacatggctaagcttttctctagcagaggagccaaatccacaatcctcaccacatctctcaactccaagatcctccaaaaacccatcgacacattcaagaatctgaatccgggtctcgaaatcgacatccagatcttcaatttcccttgcgtggagctggggttaccagaaggatgtgaaaacgttgatttcttcacttcaaacaacaatgatgataaaaacgagatgatcgtgaaattctttttctcgacaaggtttttcaaagaccagcttgagaaactcctcgggacaacgagaccagactgtcttatcgccgacatgttcttcccctgggctactgaagctgctgggaagttcaatgtgccaagacttgtgttccacggcactggctacttctctttatgcgctggttattgcatcggagtgcataaaccacagaagagagtggcttcaagctctgagccatttgtgattcccgagctccctgggaacattgtgataactgaagaacagatcatagatggcgatggagaatccgacatgggaaagtttatgactgaagttagggaatcggaagtgaagagctcaggagttgttttgaatagtttctacgagctagaacatgattacgccgatttttacaaaagttgtgtacaaaagagagcgtggcatatcggtccgctatcggtttacaacaggggatttgaggagaaggctgagagaggaaagaaagcgaacattgatgaggctgaatgcctcaaatggcttgactccaagaaaccaaattcagtcatttatgtttcctttgggagcgtggctttcttcaagaatgaacagttattcgagatcgctgcagggttagaagcttccggtacaagtttcatttgggttgttaggaaaaccaaagatgatagagaagaatggttaccagaagggttcgaagagagggtgaaagggaaaggtatgataataagaggatgggcaccacaggtgctgatacttgaccaccaagcaaccggtgggtttgtgacccattgcggctggaactcgcttcttgaaggagtggctgcagggctaccaatggtgacatggcctgtaggagcggagcaattctacaatgagaaattggttacgcaagtgctcagaacaggagtgagcgtgggagcgagcaagcatatgaaagttatgatgggagatttcattagcagagagaaagtggataaagcggtgagggaggttttggctggggaagcagcagaggagaggcggagacgggcaaagaagctagcggcgatggctaaagctgccgtggaagaaggagggtcttccttcaacgatctaaacagcttcatggaagagtttagttcataatcttcatatatatagattctatttagaaattccatagcagaagtaagatgaaagctaatgtaaaatataagagatatgagttaaattcaaatggcagcaacctctaccatagacatcactctaagtctctattatcttcagcataatcctctgttttgttaggagaaaatcaatggttcaagattcactattt

SEQ ID NO: 80363 - protein, 522 aa, Arabidopsis thaliana
  peptide (1)..(522): Ceres Seq. ID no. 12655464
  misc_feature (40)..(522): Homolog of NCBI NO: 18418380 NR Description: glucosyltransferase -like protein; protein id: supported by cDNA: gi_14334981 [Arabidopsis thaliana] putative glucosyltransferase [Arabidopsis thaliana]
  misc_feature (40)..(522): Homolog of NCBI NO: 7433898 NR Description: probable glucosyltransferase F28A23.110 (EC
  misc_feature (40)..(522): Homolog of NCBI NO: 18418378 NR Description: similar to glucosyltransferase -like protein; id: At4g34131.1, supported by cDNA: gi_17065353 [Arabidopsis >gi|17065354|gb|AAL32831.1| putative protein [Arabidopsis
  misc_feature (40)..(368): Homolog of NCBI NO: 21594027 NR Description: glucosyltransferase-like protein [Arabidopsis
  misc_feature (40)..(521): Homolog of NCBI NO: 18418382 NR Description: similar to glucosyltransferase -like protein; id: At4g34138.1, supported by cDNA: gi_18086384, supported by gi_19699135 [Arabidopsis thaliana] >gi|18086385|gb|AAL57652.1|
  misc_feature (68)..(521): Homolog of NCBI NO: 15226537 NR Description: putative glucosyltransferase; protein id: [Arabidopsis thaliana] >gi|25286797|pir||F84529 probable
  misc_feature (48)..(522): Homolog of NCBI NO: 7433906 NR Description: glucosyltransferase IS5a (EC 2.4.1.-),
  misc_feature (48)..(522): Homolog of NCBI NO: 13492674 NR Description: phenylpropanoid:glucosyltransferase 1 [Nicotiana
  misc_feature (49)..(519): Homolog of NCBI NO: 34911582 NR Description: putative salicylate-induced glucosyltransferase
  misc_feature (249)..(522): Homolog of NCBI NO: 19911199 NR Description: glucosyltransferase-8 [Vigna angularis]
IYTTRKNSTIFYELQNLSSLLIIFLKFLETSSFLFNQPIMGSDHHHRKLHVMFFPFMAYGHMIPTLDMAKLFSSRGAKSTILTTSLNSKILQKPIDTFKNLNPGLEIDIQIFNFPCVELGLPEGCENVDFFTSNNNDDKNEMIVKFFFSTRFFKDQLEKLLGTTRPDCLIADMFFPWATEAAGKFNVPRLVFHGTGYFSLCAGYCIGVHKPQKRVASSSEPFVIPELPGNIVITEEQIIDGDGESDMGKFMTEVRESEVKSSGVVLNSFYELEHDYADFYKSCVQKRAWHIGPLSVYNRGFEEKAERGKKANIDEAECLKWLDSKKPNSVIYVSFGSVAFFKNEQLFEIAAGLEASGTSFIWVVRKTKDDREEWLPEGFEERVKGKGMIIRGWAPQVLILDHQATGGFVTHCGWNSLLEGVAAGLPMVTWPVGAEQFYNEKLVTQVLRTGVSVGASKHMKVMMGDFISREKVDKAVREVLAGEAAEERRRRAKKLAAMAKAAVEEGGSSFNDLNSFMEEFSS

SEQ ID NO: 80364 - protein, 483 aa, Arabidopsis thaliana
  peptide (1)..(483): Ceres Seq. ID no. 12655465
  misc_feature (1)..(483): Homolog of NCBI NO: 18418380 NR Description: glucosyltransferase -like protein; protein id: supported by cDNA: gi_14334981 [Arabidopsis thaliana] putative glucosyltransferase [Arabidopsis thaliana]
  misc_feature (1)..(483): Homolog of NCBI NO: 7433898 NR Description: probable glucosyltransferase F28A23.110 (EC
  misc_feature (1)..(483): Homolog of NCBI NO: 18418378 NR Description: similar to glucosyltransferase -like protein; id: At4g34131.1, supported by cDNA: gi_17065353 [Arabidopsis >gi|17065354|gb|AAL32831.1| putative protein [Arabidopsis
  misc_feature (1)..(329): Homolog of NCBI NO: 21594027 NR Description: glucosyltransferase-like protein [Arabidopsis
  misc_feature (1)..(482): Homolog of NCBI NO: 18418382 NR Description: similar to glucosyltransferase -like protein; id: At4g34138.1, supported by cDNA: gi_18086384, supported by gi_19699135 [Arabidopsis thaliana] >gi|18086385|gb|AAL57652.1|
  misc_feature (29)..(482): Homolog of NCBI NO: 15226537 NR Description: putative glucosyltransferase; protein id: [Arabidopsis thaliana] >gi|25286797|pir||F84529 probable
  misc_feature (9)..(483): Homolog of NCBI NO: 7433906 NR Description: glucosyltransferase IS5a (EC 2.4.1.-),
  misc_feature (9)..(483): Homolog of NCBI NO: 13492674 NR Description: phenylpropanoid:glucosyltransferase 1 [Nicotiana
  misc_feature (10)..(480): Homolog of NCBI NO: 34911582 NR Description: putative salicylate-induced glucosyltransferase
  misc_feature (210)..(483): Homolog of NCBI NO: 19911199 NR Description: glucosyltransferase-8 [Vigna angularis]
MGSDHHHRKLHVMFFPFMAYGHMIPTLDMAKLFSSRGAKSTILTTSLNSKILQKPIDTFKNLNPGLEIDIQIFNFPCVELGLPEGCENVDFFTSNNNDDKNEMIVKFFFSTRFFKDQLEKLLGTTRPDCLIADMFFPWATEAAGKFNVPRLVFHGTGYFSLCAGYCIGVHKPQKRVASSSEPFVIPELPGNIVITEEQIIDGDGESDMGKFMTEVRESEVKSSGVVLNSFYELEHDYADFYKSCVQKRAWHIGPLSVYNRGFEEKAERGKKANIDEAECLKWLDSKKPNSVIYVSFGSVAFFKNEQLFEIAAGLEASGTSFIWVVRKTKDDREEWLPEGFEERVKGKGMIIRGWAPQVLILDHQATGGFVTHCGWNSLLEGVAAGLPMVTWPVGAEQFYNEKLVTQVLRTGVSVGASKHMKVMMGDFISREKVDKAVREVLAGEAAEERRRRAKKLAAMAKAAVEEGGSSFNDLNSFMEEFSS

SEQ ID NO: 80365 - protein, 471 aa, Arabidopsis thaliana
  peptide (1)..(471): Ceres Seq. ID no. 12655466
  misc_feature (1)..(471): Homolog of NCBI NO: 18418380 NR Description: glucosyltransferase -like protein; protein id: supported by cDNA: gi_14334981 [Arabidopsis thaliana] putative glucosyltransferase [Arabidopsis thaliana]
  misc_feature (1)..(471): Homolog of NCBI NO: 7433898 NR Description: probable glucosyltransferase F28A23.110 (EC
  misc_feature (1)..(471): Homolog of NCBI NO: 18418378 NR Description: similar to glucosyltransferase -like protein; id: At4g34131.1, supported by cDNA: gi_17065353 [Arabidopsis >gi|17065354|gb|AAL32831.1| putative protein [Arabidopsis
  misc_feature (1)..(317): Homolog of NCBI NO: 21594027 NR Description: glucosyltransferase-like protein [Arabidopsis
  misc_feature (1)..(470): Homolog of NCBI NO: 18418382 NR Description: similar to glucosyltransferase -like protein; id: At4g34138.1, supported by cDNA: gi_18086384, supported by gi_19699135 [Arabidopsis thaliana] >gi|18086385|gb|AAL57652.1|
  misc_feature (17)..(470): Homolog of NCBI NO: 15226537 NR Description: putative glucosyltransferase; protein id: [Arabidopsis thaliana] >gi|25286797|pir||F84529 probable
  misc_feature (1)..(471): Homolog of NCBI NO: 7433906 NR Description: glucosyltransferase IS5a (EC 2.4.1.-),
  misc_feature (1)..(471): Homolog of NCBI NO: 13492674 NR Description: phenylpropanoid:glucosyltransferase 1 [Nicotiana
  misc_feature (1)..(468): Homolog of NCBI NO: 34911582 NR Description: putative salicylate-induced glucosyltransferase
  misc_feature (198)..(471): Homolog of NCBI NO: 19911199 NR Description: glucosyltransferase-8 [Vigna angularis]
MFFPFMAYGHMIPTLDMAKLFSSRGAKSTILTTSLNSKILQKPIDTFKNLNPGLEIDIQIFNFPCVELGLPEGCENVDFFTSNNNDDKNEMIVKFFFSTRFFKDQLEKLLGTTRPDCLIADMFFPWATEAAGKFNVPRLVFHGTGYFSLCAGYCIGVHKPQKRVASSSEPFVIPELPGNIVITEEQIIDGDGESDMGKFMTEVRESEVKSSGVVLNSFYELEHDYADFYKSCVQKRAWHIGPLSVYNRGFEEKAERGKKANIDEAECLKWLDSKKPNSVIYVSFGSVAFFKNEQLFEIAAGLEASGTSFIWVVRKTKDDREEWLPEGFEERVKGKGMIIRGWAPQVLILDHQATGGFVTHCGWNSLLEGVAAGLPMVTWPVGAEQFYNEKLVTQVLRTGVSVGASKHMKVMMGDFISREKVDKAVREVLAGEAAEERRRRAKKLAAMAKAAVEEGGSSFNDLNSFMEEFSS

SEQ ID NO: 80366 - DNA, 2495 bp, Arabidopsis thaliana
  misc_feature (1)..(2495): Ceres Seq. ID no. 12655495
  misc_feature: MA Experiment ID: 108569 Result: Up-regulated in Transcription
  misc_feature: MA Experiment 108569 PARAMETER Experiment Name: At_0.001%_MeJA__cDNA_P Parameter: Timepoint (hr) Value: 6
  misc_feature: MA Experiment 108569 PARAMETER Experiment Name: At_0.001%_MeJA__cDNA_P Parameter: Tissue Value: Aerial
  misc_feature: MA Experiment 108569 PARAMETER Experiment Name: At_0.001%_MeJA__cDNA_P Parameter: Treatment Value: 0.001% MeJA vs. No Treatment
  misc_feature: MA Experiment ID: 108573 Result: Up-regulated in Transcription
  misc_feature: MA Experiment 108573 PARAMETER Experiment Name: At_Drought_cDNA_P Parameter: Timepoint (hr) Value: 6
  misc_feature: MA Experiment 108573 PARAMETER Experiment Name: At_Drought_cDNA_P Parameter: Tissue Value: Aerial
  misc_feature: MA Experiment 108573 PARAMETER Experiment Name: At_Drought_cDNA_P Parameter: Treatment Value: Drought vs. No Drought
  misc_feature: MA Experiment ID: 108576 Result: Down-regulated in Transcription
  misc_feature: MA Experiment 108576 PARAMETER Experiment Name: At_42deg_Heat_cDNA_P Parameter: Temperature (deg C) Value: 42 vs. 22
  misc_feature: MA Experiment 108576 PARAMETER Experiment Name: At_42deg_Heat_cDNA_P Parameter: Timepoint (hr) Value: 1
  misc_feature: MA Experiment 108576 PARAMETER Experiment Name: At_42deg_Heat_cDNA_P Parameter: Tissue Value: Aerial
  misc_feature: MA Experiment ID: 108577 Result: Down-regulated in Transcription
  misc_feature: MA Experiment 108577 PARAMETER Experiment Name: At_42deg_Heat_cDNA_P Parameter: Temperature (deg C) Value: 42 vs. 22
  misc_feature: MA Experiment 108577 PARAMETER Experiment Name: At_42deg_Heat_cDNA_P Parameter: Timepoint (hr) Value: 6
  misc_feature: MA Experiment 108577 PARAMETER Experiment Name: At_42deg_Heat_cDNA_P Parameter: Tissue Value: Aerial
  misc_feature: MA Experiment ID: 108585 Result: Up-regulated in Transcription
  misc_feature: MA Experiment 108585 PARAMETER Experiment Name: At_5mM_NaNP_cDNA_P Parameter: Timepoint (hr) Value: 6
  misc_feature: MA Experiment 108585 PARAMETER Experiment Name: At_5mM_NaNP_cDNA_P Parameter: Tissue Value: Aerial
  misc_feature: MA Experiment 108585 PARAMETER Experiment Name: At_5mM_NaNP_cDNA_P Parameter: Treatment Value: null
  misc_feature: MA Experiment ID: 20000113 Result: Down-regulated in Transcription
  misc_feature: MA Experiment 20000113 PARAMETER Experiment Name: At_42deg_Heat_cDNA_P Parameter: Temperature (deg C) Value: 42 vs. 22
  misc_feature: MA Experiment 20000113 PARAMETER Experiment Name: At_42deg_Heat_cDNA_P Parameter: Timepoint (hr) Value: 8
  misc_feature: MA Experiment 20000113 PARAMETER Experiment Name: At_42deg_Heat_cDNA_P Parameter: Tissue Value: Aerial
  misc_feature: MA Experiment ID: 20000171 Result: Down-regulated in Transcription
  misc_feature: MA Experiment 20000171 PARAMETER Experiment Name: At_42deg_Heat_P Parameter: Age (day) Value: 14
  misc_feature: MA Experiment 20000171 PARAMETER Experiment Name: At_42deg_Heat_P Parameter: Organism Value: A. thaliana
  misc_feature: MA Experiment 20000171 PARAMETER Experiment Name: At_42deg_Heat_P Parameter: Plant Line Value: WS
  misc_feature: MA Experiment 20000171 PARAMETER Experiment Name: At_42deg_Heat_P Parameter: Temperature (deg C) Value: 42 vs. 22
  misc_feature: MA Experiment 20000171 PARAMETER Experiment Name: At_42deg_Heat_P Parameter: Timepoint (hr) Value: 1
  misc_feature: MA Experiment 20000171 PARAMETER Experiment Name: At_42deg_Heat_P Parameter: Tissue Value: Aerial
  misc_feature: MA Experiment ID: 20000173 Result: Down-regulated in Transcription
  misc_feature: MA Experiment 20000173 PARAMETER Experiment Name: At_42deg_Heat_P Parameter: Age (day) Value: 14
  misc_feature: MA Experiment 20000173 PARAMETER Experiment Name: At_42deg_Heat_P Parameter: Organism Value: A. thaliana
  misc_feature: MA Experiment 20000173 PARAMETER Experiment Name: At_42deg_Heat_P Parameter: Plant Line Value: WS
  misc_feature: MA Experiment 20000173 PARAMETER Experiment Name: At_42deg_Heat_P Parameter: Temperature (deg C) Value: 42 vs. 22
  misc_feature: MA Experiment 20000173 PARAMETER Experiment Name: At_42deg_Heat_P Parameter: Timepoint (hr) Value: 6
  misc_feature: MA Experiment 20000173 PARAMETER Experiment Name: At_42deg_Heat_P Parameter: Tissue Value: Aerial
  misc_feature: MA Experiment ID: 20000185 Result: Up-regulated in Transcription
  misc_feature: MA Experiment 20000185 PARAMETER Experiment Name: At_Roots__P Parameter: Age (day) Value: 7 vs. 21
  misc_feature: MA Experiment 20000185 PARAMETER Experiment Name: At_Roots__P Parameter: Organism Value: A. thaliana
  misc_feature: MA Experiment 20000185 PARAMETER Experiment Name: At_Roots__P Parameter: Tissue Value: Roots vs. Whole Plant
  misc_feature: MA Experiment ID: 20001451 Result: Up-regulated in Transcription
  misc_feature: MA Experiment 20001451 PARAMETER Experiment Name: At_Far-red-induction_P Parameter: Age (day) Value: 7
  misc_feature: MA Experiment 20001451 PARAMETER Experiment Name: At_Far-red-induction_P Parameter: Light Value: Far-red vs. White
  misc_feature: MA Experiment 20001451 PARAMETER Experiment Name: At_Far-red-induction_P Parameter: Organism Value: A. thaliana
  misc_feature: MA Experiment 20001451 PARAMETER Experiment Name: At_Far-red-induction_P Parameter: Plant Line Value: Columbia
  misc_feature: MA Experiment 20001451 PARAMETER Experiment Name: At_Far-red-induction_P Parameter: Timepoint (hr) Value: 24
  misc_feature: MA Experiment 20001451 PARAMETER Experiment Name: At_Far-red-induction_P Parameter: Tissue Value: Whole Plant
accaaaacttctttctttctctctttttctatatctctagagcgcgttactgcgcgtcgtgagtatgtttttattgacgccattgaaattgggttaaatcggtttgaatcggattgaacaaaaactgtattaataataattcttcctctacttttctctctgattgattccaatcttctttcattttcttcttcttcttcttctggggaaggggcaggttaaaattatgccatctattcaaatcgtgcctatcctcagatcttaactcttttctctacgagattcggcatctgggttttattcttcttgagcaaaatgcaatcggataatggaaagcttttcatcggtgggatatcttgggacaccaatgaggaacgtctcaaggagtatttcagcagttttggagaagtgatcgaagctgtcatcttgaaagatcgtaccactggtcgtgctcgtggtttcggttttgttgtttttgctgatcctgctgttgctgagattgttatcaccgaaaaacataatattgatggcagattggttgaagccaagaaagctgttcccagagatgaccaaaacatggtaaatagaagcaacagcagtagcatccaaggttctcccggtggtccaggtcgcacaaggaagatatttgttggaggattaccttcttcggttacagagagtgatttcaagacgtattttgagcagtttggtacaactacggatgtggttgtcatgtatgatcacaacacacaaaggcctagaggtttcgggtttataacctacgattccgaggaggcggttgaaaaggtattgctcaagacattccatgaactaaatggtaaaatggttgaggttaagcgagctgttccaaaggagttatctccaggtccaagtcgcagtcctcttggtgcaggttacagctatggagttaatagggtcaataacctccttaatgggtatgctcaagggtttaatcccgctgcagttggaggctacggacttaggatggatggtcggttcagtccggttggtgctggaagaagcgggtttgcaaattacagttctggatacgggatgaatgtgaactttgatcagggattgcccacagggttcacgggaggtacaaattacaatggaaatgttgactatggccgaggaatgagcccgtactacattggtaacacaaacaggtttggtcctgcggttggctatgaagggggcaacggaggaggaaactcatccttcttcagttcggttacacggaacttatggggaaacaatggtggtcttaactataacaacaataatacaaactcaaactccaatacatatatgggaggatcatcaagtgggaacaacacacttagtggtccatttggaaattcaggagtcaattggggtgctcctggaggaggaaacaatgctgtgagtaacgagaatgtgaagtttggttatggaggaaacggtgaatctggttttgggttgggaacaggtggttatgcagcaagaaacccaggggctaacaaggcagcaccatcctcttcattctcttctgcctcagcaaccaacaacacgggttatgatacagcaggacttgcagagttttacgggaatggtgcagtttatagtgaccctacatggagatcaccaactcctgagacagaagggcctgctccttttagctatgggattggaggaggggttccttcttcagatgtttcagctagaagttcatctccaggttatgttggcagttacagtgtgaacaagagacaaccaaacagaggaattgctacttagtacaatcgtttttgttttaccacgatattgtaggcgagccatcacggtgaacgatctgtgtcttttggcgaatcttttagattatcttcttttcccttcatacaaagccagtgaggacgaaacttgatcatatcatcacctagagctaaccagagaatcccgcagacttttctgtcatggtttggttttctaaattcattgttcctcctaggcttttttctgctttctttttttttctatttttgttttcttttcttctttcaatgagggacagaagaaactgtatcagtctccggcgaggcggtaatacataaggagagttcaaaacaaaaacccaaaaaaaaaaaaaaaaagatgatccttcttcctcagttttcttcttcattgtcatgtaatggttcttcttcttttcttcttcttgggggttatggttaaggtttgtgttttgaggcagattgtactagagttttttttcatgtttcttttgttttgtcgtttttaagtccttttgttttgtttttgatagtgtgagatatggaaagagtatttagccatgtagggctttcgagaataagtctttttatcactatgagattattttgttctcaagctgtttgtatgtcttatgcgaacgcaagcaaactcgtttctgttgatgtacttttattttatagaaaaaactatttttatctttt

SEQ ID NO: 80367 - protein, 494 aa, Arabidopsis thaliana
  peptide (1)..(494): Ceres Seq. ID no. 12655496
  misc_feature (110)..(180): Pfam Name: RNA recognition motif. (a.k.a. RRM, RBD, or RNP domain) Pfam Description: RNA recognition motif. (a.k.a. RRM, RBD, or RNP
  misc_feature (1)..(494): Homolog of NCBI NO: 18398061 NR Description: heterogeneous nuclear ribonucleoprotein (hnRNP), protein id: At3g07810.1, supported by cDNA: gi_15292696, by cDNA: gi_16930692 [Arabidopsis thaliana]
  misc_feature (1)..(494): Homolog of NCBI NO: 15292697 NR Description: putative RNA-binding protein [Arabidopsis
  misc_feature (1)..(491): Homolog of NCBI NO: 6648193 NR Description: putative RNA-binding protein [Arabidopsis
  misc_feature (1)..(491): Homolog of NCBI NO: 30680456 NR Description: heterogeneous nuclear ribonucleoprotein (hnRNP),
  misc_feature (1)..(452): Homolog of NCBI NO: 38175737 NR Description: putative heterogeneous nuclear ribonucleoprotein
  misc_feature (1)..(400): Homolog of NCBI NO: 9758790 NR Description: RNA-binding protein-like [Arabidopsis thaliana]
  misc_feature (1)..(391): Homolog of NCBI NO: 21553963 NR Description: RNA-binding protein-like [Arabidopsis thaliana]
  misc_feature (1)..(391): Homolog of NCBI NO: 18422817 NR Description: heterogeneous nuclear ribonucleoprotein (hnRNP), protein id: At5g47620.1, supported by cDNA: 1876. [Arabidopsis
  misc_feature (1)..(443): Homolog of NCBI NO: 18416794 NR Description: heterogeneous nuclear ribonucleoprotein (hnRNP), protein id: At4g26650.1, supported by cDNA: gi_16930502, by cDNA: gi_20453244 [Arabidopsis thaliana]
  misc_feature (3)..(443): Homolog of NCBI NO: 7487039 NR Description: hypothetical protein T15N24.100 - Arabidopsis
MQSDNGKLFIGGISWDTNEERLKEYFSSFGEVIEAVILKDRTTGRARGFGFVVFADPAVAEIVITEKHNIDGRLVEAKKAVPRDDQNMVNRSNSSSIQGSPGGPGRTRKIFVGGLPSSVTESDFKTYFEQFGTTTDVVVMYDHNTQRPRGFGFITYDSEEAVEKVLLKTFHELNGKMVEVKRAVPKELSPGPSRSPLGAGYSYGVNRVNNLLNGYAQGFNPAAVGGYGLRMDGRFSPVGAGRSGFANYSSGYGMNVNFDQGLPTGFTGGTNYNGNVDYGRGMSPYYIGNTNRFGPAVGYEGGNGGGNSSFFSSVTRNLWGNNGGLNYNNNNTNSNSNTYMGGSSSGNNTLSGPFGNSGVNWGAPGGGNNAVSNENVKFGYGGNGESGFGLGTGGYAARNPGANKAAPSSSFSSASATNNTGYDTAGLAEFYGNGAVYSDPTWRSPTPETEGPAPFSYGIGGGVPSSDVSARSSSPGYVGSYSVNKRQPNRGIAT

SEQ ID NO: 80368 - protein, 407 aa, Arabidopsis thaliana
  peptide (1)..(407): Ceres Seq. ID no. 12655497
  misc_feature (23)..(93): Pfam Name: RNA recognition motif. (a.k.a. RRM, RBD, or RNP domain) Pfam Description: RNA recognition motif. (a.k.a. RRM, RBD, or RNP
  misc_feature (1)..(407): Homolog of NCBI NO: 18398061 NR Description: heterogeneous nuclear ribonucleoprotein (hnRNP), protein id: At3g07810.1, supported by cDNA: gi_15292696, by cDNA: gi_16930692 [Arabidopsis thaliana]
  misc_feature (1)..(407): Homolog of NCBI NO: 15292697 NR Description: putative RNA-binding protein [Arabidopsis
  misc_feature (1)..(404): Homolog of NCBI NO: 6648193 NR Description: putative RNA-binding protein [Arabidopsis
  misc_feature (1)..(404): Homolog of NCBI NO: 30680456 NR Description: heterogeneous nuclear ribonucleoprotein (hnRNP),
  misc_feature (1)..(365): Homolog of NCBI NO: 38175737 NR Description: putative heterogeneous nuclear ribonucleoprotein
  misc_feature (1)..(313): Homolog of NCBI NO: 9758790 NR Description: RNA-binding protein-like [Arabidopsis thaliana]
  misc_feature (1)..(304): Homolog of NCBI NO: 21553963 NR Description: RNA-binding protein-like [Arabidopsis thaliana]
  misc_feature (1)..(304): Homolog of NCBI NO: 18422817 NR Description: heterogeneous nuclear ribonucleoprotein (hnRNP), protein id: At5g47620.1, supported by cDNA: 1876. [Arabidopsis
  misc_feature (1)..(356): Homolog of NCBI NO: 18416794 NR Description: heterogeneous nuclear ribonucleoprotein (hnRNP), protein id: At4g26650.1, supported by cDNA: gi_16930502, by cDNA: gi_20453244 [Arabidopsis thaliana]
  misc_feature (1)..(356): Homolog of NCBI NO: 7487039 NR Description: hypothetical protein T15N24.100 - Arabidopsis
MVNRSNSSSIQGSPGGPGRTRKIFVGGLPSSVTESDFKTYFEQFGTTTDVVVMYDHNTQRPRGFGFITYDSEEAVEKVLLKTFHELNGKMVEVKRAVPKELSPGPSRSPLGAGYSYGVNRVNNLLNGYAQGFNPAAVGGYGLRMDGRFSPVGAGRSGFANYSSGYGMNVNFDQGLPTGFTGGTNYNGNVDYGRGMSPYYIGNTNRFGPAVGYEGGNGGGNSSFFSSVTRNLWGNNGGLNYNNNNTNSNSNTYMGGSSSGNNTLSGPFGNSGVNWGAPGGGNNAVSNENVKFGYGGNGESGFGLGTGGYAARNPGANKAAPSSSFSSASATNNTGYDTAGLAEFYGNGAVYSDPTWRSPTPETEGPAPFSYGIGGGVPSSDVSARSSSPGYVGSYSVNKRQPNRGIAT

SEQ ID NO: 80369 - protein, 355 aa, Arabidopsis thaliana
  peptide (1)..(355): Ceres Seq. ID no. 12655498
  misc_feature (1)..(355): Homolog of NCBI NO: 18398061 NR Description: heterogeneous nuclear ribonucleoprotein (hnRNP), protein id: At3g07810.1, supported by cDNA: gi_15292696, by cDNA: gi_16930692 [Arabidopsis thaliana]
  misc_feature (1)..(355): Homolog of NCBI NO: 15292697 NR Description: putative RNA-binding protein [Arabidopsis
  misc_feature (1)..(352): Homolog of NCBI NO: 6648193 NR Description: putative RNA-binding protein [Arabidopsis
  misc_feature (1)..(352): Homolog of NCBI NO: 30680456 NR Description: heterogeneous nuclear ribonucleoprotein (hnRNP),
  misc_feature (1)..(313): Homolog of NCBI NO: 38175737 NR Description: putative heterogeneous nuclear ribonucleoprotein
  misc_feature (1)..(261): Homolog of NCBI NO: 9758790 NR Description: RNA-binding protein-like [Arabidopsis thaliana]
  misc_feature (1)..(252): Homolog of NCBI NO: 21553963 NR Description: RNA-binding protein-like [Arabidopsis thaliana]
  misc_feature (1)..(252): Homolog of NCBI NO: 18422817 NR Description: heterogeneous nuclear ribonucleoprotein (hnRNP), protein id: At5g47620.1, supported by cDNA: 1876. [Arabidopsis
  misc_feature (1)..(304): Homolog of NCBI NO: 18416794 NR Description: heterogeneous nuclear ribonucleoprotein (hnRNP), protein id: At4g26650.1, supported by cDNA: gi_16930502, by cDNA: gi_20453244 [Arabidopsis thaliana]
  misc_feature (1)..(304): Homolog of NCBI NO: 7487039 NR Description: hypothetical protein T15N24.100 - Arabidopsis
MYDHNTQRPRGFGFITYDSEEAVEKVLLKTFHELNGKMVEVKRAVPKELSPGPSRSPLGAGYSYGVNRVNNLLNGYAQGFNPAAVGGYGLRMDGRFSPVGAGRSGFANYSSGYGMNVNFDQGLPTGFTGGTNYNGNVDYGRGMSPYYIGNTNRFGPAVGYEGGNGGGNSSFFSSVTRNLWGNNGGLNYNNNNTNSNSNTYMGGSSSGNNTLSGPFGNSGVNWGAPGGGNNAVSNENVKFGYGGNGESGFGLGTGGYAARNPGANKAAPSSSFSSASATNNTGYDTAGLAEFYGNGAVYSDPTWRSPTPETEGPAPFSYGIGGGVPSSDVSARSSSPGYVGSYSVNKRQPNRGIAT

SEQ ID NO: 80370 - DNA, 1122 bp, Arabidopsis thaliana
  misc_feature (1)..(1122): Ceres Seq. ID no. 12655519
  misc_feature: MA Experiment ID: 20000171 Result: Down-regulated in Transcription
  misc_feature: MA Experiment 20000171 PARAMETER Experiment Name: At_42deg_Heat_P Parameter: Age (day) Value: 14
  misc_feature: MA Experiment 20000171 PARAMETER Experiment Name: At_42deg_Heat_P Parameter: Organism Value: A. thaliana
  misc_feature: MA Experiment 20000171 PARAMETER Experiment Name: At_42deg_Heat_P Parameter: Plant Line Value: WS
  misc_feature: MA Experiment 20000171 PARAMETER Experiment Name: At_42deg_Heat_P Parameter: Temperature (deg C) Value: 42 vs. 22
  misc_feature: MA Experiment 20000171 PARAMETER Experiment Name: At_42deg_Heat_P Parameter: Timepoint (hr) Value: 1
  misc_feature: MA Experiment 20000171 PARAMETER Experiment Name: At_42deg_Heat_P Parameter: Tissue Value: Aerial
  misc_feature: MA Experiment ID: 20000173 Result: Down-regulated in Transcription
  misc_feature: MA Experiment 20000173 PARAMETER Experiment Name: At_42deg_Heat_P Parameter: Age (day) Value: 14
  misc_feature: MA Experiment 20000173 PARAMETER Experiment Name: At_42deg_Heat_P Parameter: Organism Value: A. thaliana
  misc_feature: MA Experiment 20000173 PARAMETER Experiment Name: At_42deg_Heat_P Parameter: Plant Line Value: WS
  misc_feature: MA Experiment 20000173 PARAMETER Experiment Name: At_42deg_Heat_P Parameter: Temperature (deg C) Value: 42 vs. 22
  misc_feature: MA Experiment 20000173 PARAMETER Experiment Name: At_42deg_Heat_P Parameter: Timepoint (hr) Value: 6
  misc_feature: MA Experiment 20000173 PARAMETER Experiment Name: At_42deg_Heat_P Parameter: Tissue Value: Aerial
  misc_feature: MA Experiment ID: 20000184 Result: Down-regulated in Transcription
  misc_feature: MA Experiment 20000184 PARAMETER Experiment Name: At_Shoots__P Parameter: Age (day) Value: 7
  misc_feature: MA Experiment 20000184 PARAMETER Experiment Name: At_Shoots__P Parameter: Tissue Value: Shoots vs. Whole Plant
  misc_feature: MA Experiment ID: 20000794 Result: Up-regulated in Transcription
  misc_feature: MA Experiment 20000794 PARAMETER Experiment Name: At_Petals_P Parameter: Age (day) Value: 23-25 days
  misc_feature: MA Experiment 20000794 PARAMETER Experiment Name: At_Petals_P Parameter: Plant Line Value: WS
  misc_feature: MA Experiment 20000794 PARAMETER Experiment Name: At_Petals_P Parameter: Tissue Value: Petals vs. Whole plant
atggctcggtcgcatgcttgcttatatgaacttttatgttctgagacacccaaatggactcctcttagggttgaagatttgcaaacatcttcttctgatcccagagatcggttggagaagttgctgaagcaacctgggaataaatattgtgctgactgtggctctcctgaaccaaaatgggtatcgttgagtcttggtgtatttatctgcattaagtgttctggtgtacacagaagtcttggagttcatatatcaaaggttctatcagtaaagctagacgagtggacagatgatcaggttgacatgcttgtaggttacggtggaaacacggcagtgaacgaaagattcgaagcttgcaacatcgaccagtcaaagaaaccaaaaccagattctactaatgaggaacgaaatgatttcattagaaaaaaatatgagcagcaccagtttatggatccaaaggatggtgctttgtgcacttatcagcagcctagcagaacaaacacttcaccaccgtctttatgttctgcaagccaccgttctacaaaaaaccgtattggtcatgcatttaggaatagctggggaagaagagaatctgatcacaaaggaccaaagaagagcaattccatggcaggtatggttgagtttgtggggttgattaaggttaacgtggtaaaaggaaccaaccttgcggttcgagacgtgatgaccagcgatccttatgttatccttgctcttggccaacaatcggtaaaaacacgggtgataaagaacaacttgaatcctgtgtggaatgagacgctaatgctttcgatacccgagcccatgcctcctctcaaagtgctagtgtacgacaaggatacattctcgacagatgatttcatgggagaggcagagatagacatacaaccattggtgagtgcagcaaaagcatacgagacatcgagcataaaggaaccgatgcagctgggaagttgggtggcgagcaaagagaacacattggtgagtgatggcataatcttacttgaagacgggaaagtgaaacaagacatttcacttaggctacaaaatgttgaaagaggtgttcttgagatccagcttgaatgtcttcctctcactcaatga

SEQ ID NO: 80371 - protein, 373 aa, Arabidopsis thaliana
  peptide (1)..(373): Ceres Seq. ID no. 12655520
  misc_feature (35)..(157): Pfam Name: Putative GTPase activating protein for Arf Pfam Description: Putative GTPase activating protein for Arf
  misc_feature (1)..(373): Homolog of NCBI NO: 6648206 NR Description: putative GTPase activating protein [Arabidopsis
  misc_feature (4)..(373): Homolog of NCBI NO: 30680493 NR Description: zinc finger and C2 domain protein, putative
  misc_feature (36)..(373): Homolog of NCBI NO: 19386828 NR Description: putative zinc finger and C2 domain protein [Oryza
  misc_feature (171)..(373): Homolog of NCBI NO: 25407332 NR Description: hypothetical protein AT4g05330 [imported] - thaliana >gi|7267293|emb|CAB81075.1| putative protein
  misc_feature (37)..(152): Homolog of NCBI NO: 25407332 NR Description: hypothetical protein AT4g05330 [imported] - thaliana >gi|7267293|emb|CAB81075.1| putative protein
  misc_feature (171)..(373): Homolog of NCBI NO: 18412932 NR Description: putative protein; protein id: At4g05330.1, by cDNA: 116234. [Arabidopsis thaliana]
  misc_feature (37)..(152): Homolog of NCBI NO: 18412932 NR Description: putative protein; protein id: At4g05330.1, by cDNA: 116234. [Arabidopsis thaliana]
  misc_feature (37)..(373): Homolog of NCBI NO: 18415638 NR Description: putative protein; protein id: At4g21160.1, by cDNA: 6665., supported by cDNA: gi_17064945, supported by gi_9957237 [Arabidopsis thaliana]
  misc_feature (37)..(373): Homolog of NCBI NO: 21594052 NR Description: putative GTPase activating protein [Arabidopsis
  misc_feature (37)..(373): Homolog of NCBI NO: 7486586 NR Description: hypothetical protein F7J7.100 - Arabidopsis >gi|2911073|emb|CAA17535.1| putative protein [Arabidopsis >gi|7268913|emb|CAB79116.1| putative protein [Arabidopsis
MARSHACLYELLCSETPKWTPLRVEDLQTSSSDPRDRLEKLLKQPGNKYCADCGSPEPKWVSLSLGVFICIKCSGVHRSLGVHISKVLSVKLDEWTDDQVDMLVGYGGNTAVNERFEACNIDQSKKPKPDSTNEERNDFIRKKYEQHQFMDPKDGALCTYQQPSRTNTSPPSLCSASHRSTKNRIGHAFRNSWGRRESDHKGPKKSNSMAGMVEFVGLIKVNVVKGTNLAVRDVMTSDPYVILALGQQSVKTRVIKNNLNPVWNETLMLSIPEPMPPLKVLVYDKDTFSTDDFMGEAEIDIQPLVSAAKAYETSSIKEPMQLGSWVASKENTLVSDGIILLEDGKVKQDISLRLQNVERGVLEIQLECLPLTQ

SEQ ID NO: 80372 - protein, 272 aa, Arabidopsis thaliana; identical to SEQ ID NO: 43618
  peptide (1)..(272): Ceres Seq. ID no. 12655521
  misc_feature (1)..(56): Pfam Name: Putative GTPase activating protein for Arf Pfam Description: Putative GTPase activating protein for Arf
  misc_feature (1)..(272): Homolog of NCBI NO: 6648206 NR Description: putative GTPase activating protein [Arabidopsis
  misc_feature (1)..(272): Homolog of NCBI NO: 30680493 NR Description: zinc finger and C2 domain protein, putative
  misc_feature (1)..(272): Homolog of NCBI NO: 19386828 NR Description: putative zinc finger and C2 domain protein [Oryza
  misc_feature (70)..(272): Homolog of NCBI NO: 25407332 NR Description: hypothetical protein AT4g05330 [imported] - thaliana >gi|7267293|emb|CAB81075.1| putative protein
  misc_feature (1)..(51): Homolog of NCBI NO: 25407332 NR Description: hypothetical protein AT4g05330 [imported] - thaliana >gi|7267293|emb|CAB81075.1| putative protein
  misc_feature (70)..(272): Homolog of NCBI NO: 18412932 NR Description: putative protein; protein id: At4g05330.1, by cDNA: 116234. [Arabidopsis thaliana]
  misc_feature (1)..(51): Homolog of NCBI NO: 18412932 NR Description: putative protein; protein id: At4g05330.1, by cDNA: 116234. [Arabidopsis thaliana]
  misc_feature (1)..(272): Homolog of NCBI NO: 18415638 NR Description: putative protein; protein id: At4g21160.1, by cDNA: 6665., supported by cDNA: gi_17064945, supported by gi_9957237 [Arabidopsis thaliana]
  misc_feature (1)..(272): Homolog of NCBI NO: 21594052 NR Description: putative GTPase activating protein [Arabidopsis
  misc_feature (1)..(272): Homolog of NCBI NO: 7486586 NR Description: hypothetical protein F7J7.100 - Arabidopsis >gi|2911073|emb|CAA17535.1| putative protein [Arabidopsis >gi|7268913|emb|CAB79116.1| putative protein [Arabidopsis

SEQ ID NO: 80373 - protein, 224 aa, Arabidopsis thaliana; identical to SEQ ID NO: 43619
  peptide (1)..(224): Ceres Seq. ID no. 12655522
  misc_feature (70)..(149): Pfam Name: C2 domain Pfam Description: C2 domain
  misc_feature (1)..(224): Homolog of NCBI NO: 6648206 NR Description: putative GTPase activating protein [Arabidopsis
  misc_feature (1)..(224): Homolog of NCBI NO: 30680493 NR Description: zinc finger and C2 domain protein, putative
  misc_feature (1)..(224): Homolog of NCBI NO: 19386828 NR Description: putative zinc finger and C2 domain protein [Oryza
  misc_feature (22)..(224): Homolog of NCBI NO: 25407332 NR Description: hypothetical protein AT4g05330 [imported] - thaliana >gi|7267293|emb|CAB81075.1| putative protein
  misc_feature (22)..(224): Homolog of NCBI NO: 18412932 NR Description: putative protein; protein id: At4g05330.1, by cDNA: 116234. [Arabidopsis thaliana]
  misc_feature (1)..(224): Homolog of NCBI NO: 18415638 NR Description: putative protein; protein id: At4g21160.1, by cDNA: 6665., supported by cDNA: gi_17064945, supported by gi_9957237 [Arabidopsis thaliana]
  misc_feature (1)..(224): Homolog of NCBI NO: 21594052 NR Description: putative GTPase activating protein [Arabidopsis
  misc_feature (1)..(224): Homolog of NCBI NO: 7486586 NR Description: hypothetical protein F7J7.100 - Arabidopsis >gi|2911073|emb|CAA17535.1| putative protein [Arabidopsis >gi|7268913|emb|CAB79116.1| putative protein [Arabidopsis
  misc_feature (55)..(220): Homolog of NCBI NO: 15223248 NR Description: unknown protein; protein id: At1g70800.1
  misc_feature (63)..(223): Homolog of NCBI NO: 18408493 NR Description: expressed protein; protein id: At1g66360.1, by cDNA: 19307. [Arabidopsis thaliana] >gi|25404615|pir||H96688

SEQ ID NO: 80374 - DNA, 4104 bp, Arabidopsis thaliana
  misc_feature (1)..(4104): Ceres Seq. ID no. 12655527
  misc_feature: MA Experiment ID: 20000173 Result: Down-regulated in Transcription
  misc_feature: MA Experiment 20000173 PARAMETER Experiment Name: At_42deg_Heat_P Parameter: Age (day) Value: 14
  misc_feature: MA Experiment 20000173 PARAMETER Experiment Name: At_42deg_Heat_P Parameter: Organism Value: A. thaliana
  misc_feature: MA Experiment 20000173 PARAMETER Experiment Name: At_42deg_Heat_P Parameter: Plant Line Value: WS
  misc_feature: MA Experiment 20000173 PARAMETER Experiment Name: At_42deg_Heat_P Parameter: Temperature (deg C) Value: 42 vs. 22
  misc_feature: MA Experiment 20000173 PARAMETER Experiment Name: At_42deg_Heat_P Parameter: Timepoint (hr) Value: 6
  misc_feature: MA Experiment 20000173 PARAMETER Experiment Name: At_42deg_Heat_P Parameter: Tissue Value: Aerial
  misc_feature: MA Experiment ID: 20000184 Result: Down-regulated in Transcription
  misc_feature: MA Experiment 20000184 PARAMETER Experiment Name: At_Shoots__P Parameter: Age (day) Value: 7
  misc_feature: MA Experiment 20000184 PARAMETER Experiment Name: At_Shoots__P Parameter: Tissue Value: Shoots vs. Whole Plant
  misc_feature: MA Experiment ID: 20001451 Result: Down-regulated in Transcription
  misc_feature: MA Experiment 20001451 PARAMETER Experiment Name: At_Far-red-induction_P Parameter: Age (day) Value: 7
  misc_feature: MA Experiment 20001451 PARAMETER Experiment Name: At_Far-red-induction_P Parameter: Light Value: Far-red vs. White
  misc_feature: MA Experiment 20001451 PARAMETER Experiment Name: At_Far-red-induction_P Parameter: Organism Value: A. thaliana
  misc_feature: MA Experiment 20001451 PARAMETER Experiment Name: At_Far-red-induction_P Parameter: Plant Line Value: Columbia
  misc_feature: MA Experiment 20001451 PARAMETER Experiment Name: At_Far-red-induction_P Parameter: Timepoint (hr) Value: 24
  misc_feature: MA Experiment 20001451 PARAMETER Experiment Name: At_Far-red-induction_P Parameter: Tissue Value: Whole Plant
atggcgcgacagatgacgtcatcccagttccacaaatcaaagactctcgacaacaaatacatgctaggagatgaaattggtaaaggagcttatggtcgagtttatataggattagacttggagaatggagactttgttgccattaaacaagtctctttggaaaacattggtcaagaggatcttaacaccataatgcaagaaatcgatctcctaaagaacttgaaccataaaaacattgtcaagtatctcggatcgttgaagacaaagactcaccttcacattattctggagtacgttgagaatggctctcttgcaaacattattaaacctaataaatttggacctttcccagagtcgttggtgactgtttacattgcacaggtcttggaaggtttagtatatcttcatgagcagggtgtcatacatcgtgatatcaagggtgcaaatattttgacaaccaaggagggccttgttaagcttgctgattttggagttgccacaaaactcaacgaggctgattttaacactcactcagtggtcggaactccttactggatggctcctgaggttattgaattgtcaggagtttgtgctgcttctgacatttggagtgttggatgcactattattgaacttttgacttgtgtacctccttactatgatctgcaacccatgccagccctctatcgcattgttcaggatgatacccctcctattcctgatagtctttctcctgatattacagacttcctaagactgtgcttcaagaaggattccaggcagaggcctgatgcgaagacacttctctctcacccttggatacgtaactcgagacgagcattgcggtcatcgcttcggcatagtggaaccatcagatatatgaaggaaaccgattcaagttcagagaaggatgctgaaggtagtcaagaagtagttgaaagcgtttcagcagaaaaagtagaggtgacaaaaactaactcgaaaagcaaattacctgttataggtggggcgagttttaggtctgagaaagatcaatcttcacccagtgatcttggtgaagaaggaacggattcagaagatgatatcaattcagatcaaggtcctacattgtctatgcacgataagtcttctcgtcaatccggtacttgcagtatttcttcggatgcaaaggggacatctcaagatgtattagagaaccatgagaaatatgatcgtgatgaaatacctggaaatcttgaaacggaagcttctgaaggtagaaggaatactttagcaacaaagctggttggaaaagaatattctatccagtcatcacatagttttagccaaaaaggtgaagatgggcttagaaaggctgtgaagactccatctagttttggtgggaatgaactgaccagattcagtgatcctcctggggatgcttctttgcatgatttatttcatccactggataaagttcctgagggaaaaacaaatgaagcctcaacatcgacgcctactgcaaatgtaaatcagggtgattctcctgttgcagatggtggaaagaatgatctggcaacgaaattgagggctagaattgctcagaagcaaatggagggtgaaacggggcactcacaagatggtggtgatcttttccgcttaatgatgggtgttttgaaagatgatgtccttaacatcgatgacttggtatttgatgaaaaagttcccccggagaatctttttcctctgcaggcagtcgagttcagcagattggtgagctccttaaggccagatgaatcagaagatgcaatagtaacttcctctttgaaacttgttgccatgtttcgtcagagacctgggcagaaagcagtatttgtgacacagaatggtttcctccctctaatggatctactcgatattcctaaatctcgagtaatatgtgccgtgctgcagctgataaatgaaattgtaaaagataataccgacttcctggaaaatgcttgtcttgttggtcttattcctttggtaatgagttttgctggttttgagagggatcgatcacgagaaattcgtaaggaagcagcctacttcttgcagcagctttgtcagtcaagccccttgacgttgcaaatgttcatatcttgccgtggaatacccgttttggtgggatttcttgaagcagactatgccaaacacagggagatggttcacttggctattgatgggatgtggcaggtatttaaactcaaaaaatccacctcgagaaatgatttttgccgtattgctgcaaagaatggaattcttcttaggctagtcaacactctttatagcttgagtgaggcaactcgactggcttctatatcgggggatgcattgattttggatggtcaaactccacgagcacgctctggtcaacttgaccctaacaatcctatctttagtcagcgtgagacttcacctagtgtgattgatcatcctgatgggttgaaaactaggaatgggggtggtgaagagccttctcatgctttaacttcaaattctcaaagttcagatgtccatcaacccgatgccttgcacccagatggtgataggcctagattaagcagtgttgtagcagatgccacagaggatgttatacaacaacataggatatctctttctgccaatagaacatcaacagataagcttcagaaactggcggagggtgcgtctaatggttttcctgttactcagccagatcaagttcgacctttgcttagcttattggagaaagaacctccttcaagaaaaatttctggtcaactggattacgtaaagcatatcgctggcatagagaggcatgaaagtagacttcctcttttgtatgcatcagacgaaaagaaaaccaatggagacctagaatttataatggctgaatttgcagaagtctctggacgtggaaaggaaaacggaaatcttgatactgcgccaagatattccagcaagacgatgactaagaaggttatggctattgagagagtcgcatctacgtgtgggattgcatctcagacagcatctggtgttctgtcaggttcgggtgttttaaatgctagacctggaagtaccacatcatctggtttacttgcccatgcgctgagtgcagatgtctcaatggattacttggagaaagtggctgatctgcttcttgaatttgcccgagctgaaacgacagtaaaatcatacatgtgcagccaaagtttactcagtcgtcttttccagatgttcaaccgtgtggaacctcctattctgttaaagatactggaatgcaccaatcatttatccacggatccaaattgcttggaaaatcttcagcgtgcagatgcaatcaagcaattgatccccaaccttgagcttaaggaagggcctcttgtttatcagatccatcatgaggtacttagtgcactattcaacctctgcaagataaacaagaggaggcaggaacaagctgctgaaaatggaatcattccgcacctgatgcttttcgtcatgtcggattctcctctgaaacaatatgcattgccactactttgtgatatggctcatgcatctcggaattcaagagagcagttaagggcccacggcggtctggatgtttacctgagtttactcgatgatgaatattggtccgtgatagccttggattcaattgctgtttgcttggcgcaagacgttgaccaaaaggtggagcaggcgtttctcaagaaagatgcaattcagaaattagttaactttttccagaactgtccagagagacattttgtgcacattttggagccattcttgaagatcatcacgaaatcatcttcaatcaataagacattagcgttaaatggactgactccgttactcattgcaagactagaccaccaagatgctattgctcgacttaacctcctgaaactcatcaaggccgtttacgagaagcatccgaagccaaaacagctgatcgtagagaacgatcttccacaaaaactgcagaatctgatagaagaacgacgtgatggacaacgttcaggaggccaagttctggtgaagcaaatggcaacatctctcctcaaagcacttcacatcaacaccatcttgtga

SEQ ID NO: 80375 - protein, 1367 aa, Arabidopsis thaliana
  peptide (1)..(1367): Ceres Seq. ID no. 12655528
  misc_feature (20)..(274): Pfam Name: Protein kinase domain Pfam Description: Protein kinase domain
  misc_feature (343)..(1347): Homolog of NCBI NO: 19387284 NR Description: putative MAP3K epsilon protein kinase [Oryza
  misc_feature (995)..(1367): Homolog of NCBI NO: 19570058 NR Description: similar to Emericella nidulans (Aspergillus
  misc_feature (9)..(377): Homolog of NCBI NO: 19570058 NR Description: similar to Emericella nidulans (Aspergillus
  misc_feature (501)..(764): Homolog of NCBI NO: 19570058 NR Description: similar to Emericella nidulans (Aspergillus
  misc_feature (98)..(801): Homolog of NCBI NO: 19387284 NR Description: putative MAP3K epsilon protein kinase [Oryza
  misc_feature (20)..(470): Homolog of NCBI NO: 6531993 NR Description: septation [Aspergillus nidulans]
  misc_feature (1014)..(1364): Homolog of NCBI NO: 6531993 NR Description: septation [Aspergillus nidulans]
  misc_feature (507)..(780): Homolog of NCBI NO: 6531993 NR Description: septation [Aspergillus nidulans]
  misc_feature (44)..(470): Homolog of NCBI NO: 40741112 NR Description: hypothetical protein AN4385.2 [Aspergillus
  misc_feature (1014)..(1364): Homolog of NCBI NO: 40741112 NR Description: hypothetical protein AN4385.2 [Aspergillus
MARQMTSSQFHKSKTLDNKYMLGDEIGKGAYGRVYIGLDLENGDFVAIKQVSLENIGQEDLNTIMQEIDLLKNLNHKNIVKYLGSLKTKTHLHIILEYVENGSLANIIKPNKFGPFPESLVTVYIAQVLEGLVYLHEQGVIHRDIKGANILTTKEGLVKLADFGVATKLNEADFNTHSVVGTPYWMAPEVIELSGVCAASDIWSVGCTIIELLTCVPPYYDLQPMPALYRIVQDDTPPIPDSLSPDITDFLRLCFKKDSRQRPDAKTLLSHPWIRNSRRALRSSLRHSGTIRYMKETDSSSEKDAEGSQEVVESVSAEKVEVTKTNSKSKLPVIGGASFRSEKDQSSPSDLGEEGTDSEDDINSDQGPTLSMHDKSSRQSGTCSISSDAKGTSQDVLENHEKYDRDEIPGNLETEASEGRRNTLATKLVGKEYSIQSSHSFSQKGEDGLRKAVKTPSSFGGNELTRFSDPPGDASLHDLFHPLDKVPEGKTNEASTSTPTANVNQGDSPVADGGKNDLATKLRARIAQKQMEGETGHSQDGGDLFRLMMGVLKDDVLNIDDLVFDEKVPPENLFPLQAVEFSRLVSSLRPDESEDAIVTSSLKLVAMFRQRPGQKAVFVTQNGFLPLMDLLDIPKSRVICAVLQLINEIVKDNTDFLENACLVGLIPLVMSFAGFERDRSREIRKEAAYFLQQLCQSSPLTLQMFISCRGIPVLVGFLEADYAKHREMVHLAIDGMWQVFKLKKSTSRNDFCRIAAKNGILLRLVNTLYSLSEATRLASISGDALILDGQTPRARSGQLDPNNPIFSQRETSPSVIDHPDGLKTRNGGGEEPSHALTSNSQSSDVHQPDALHPDGDRPRLSSVVADATEDVIQQHRISLSANRTSTDKLQKLAEGASNGFPVTQPDQVRPLLSLLEKEPPSRKISGQLDYVKHIAGIERHESRLPLLYASDEKKTNGDLEFIMAEFAEVSGRGKENGNLDTAPRYSSKTMTKKVMAIERVASTCGIASQTASGVLSGSGVLNARPGSTTSSGLLAHALSADVSMDYLEKVADLLLEFARAETTVKSYMCSQSLLSRLFQMFNRVEPPILLKILECTNHLSTDPNCLENLQRADAIKQLIPNLELKEGPLVYQIHHEVLSALFNLCKINKRRQEQAAENGIIPHLMLFVMSDSPLKQYALPLLCDMAHASRNSREQLRAHGGLDVYLSLLDDEYWSVIALDSIAVCLAQDVDQKVEQAFLKKDAIQKLVNFFQNCPERHFVHILEPFLKIITKSSSINKTLALNGLTPLLIARLDHQDAIARLNLLKLIKAVYEKHPKPKQLIVENDLPQKLQNLIEERRDGQRSGGQVLVKQMATSLLKALHINTIL

SEQ ID NO: 80376 - protein, 1363 aa, Arabidopsis thaliana
  peptide (1)..(1363): Ceres Seq. ID no. 12655529
  misc_feature (16)..(270): Pfam Name: Protein kinase domain Pfam Description: Protein kinase domain
  misc_feature (339)..(1343): Homolog of NCBI NO: 19387284 NR Description: putative MAP3K epsilon protein kinase [Oryza
  misc_feature (991)..(1363): Homolog of NCBI NO: 19570058 NR Description: similar to Emericella nidulans (Aspergillus
  misc_feature (5)..(373): Homolog of NCBI NO: 19570058 NR Description: similar to Emericella nidulans (Aspergillus
  misc_feature (497)..(760): Homolog of NCBI NO: 19570058 NR Description: similar to Emericella nidulans (Aspergillus
  misc_feature (94)..(797): Homolog of NCBI NO: 19387284 NR Description: putative MAP3K epsilon protein kinase [Oryza
  misc_feature (16)..(466): Homolog of NCBI NO: 6531993 NR Description: septation [Aspergillus nidulans]
  misc_feature (1010)..(1360): Homolog of NCBI NO: 6531993 NR Description: septation [Aspergillus nidulans]
  misc_feature (503)..(776): Homolog of NCBI NO: 6531993 NR Description: septation [Aspergillus nidulans]
  misc_feature (40)..(466): Homolog of NCBI NO: 40741112 NR Description: hypothetical protein AN4385.2 [Aspergillus
  misc_feature (1010)..(1360): Homolog of NCBI NO: 40741112 NR Description: hypothetical protein AN4385.2 [Aspergillus
MTSSQFHKSKTLDNKYMLGDEIGKGAYGRVYIGLDLENGDFVAIKQVSLENIGQEDLNTIMQEIDLLKNLNHKNIVKYLGSLKTKTHLHIILEYVENGSLANIIKPNKFGPFPESLVTVYIAQVLEGLVYLHEQGVIHRDIKGANILTTKEGLVKLADFGVATKLNEADFNTHSVVGTPYWMAPEVIELSGVCAASDIWSVGCTIIELLTCVPPYYDLQPMPALYRIVQDDTPPIPDSLSPDITDFLRLCFKKDSRQRPDAKTLLSHPWIRNSRRALRSSLRHSGTIRYMKETDSSSEKDAEGSQEVVESVSAEKVEVTKTNSKSKLPVIGGASFRSEKDQSSPSDLGEEGTDSEDDINSDQGPTLSMHDKSSRQSGTCSISSDAKGTSQDVLENHEKYDRDEIPGNLETEASEGRRNTLATKLVGKEYSIQSSHSFSQKGEDGLRKAVKTPSSFGGNELTRFSDPPGDASLHDLFHPLDKVPEGKTNEASTSTPTANVNQGDSPVADGGKNDLATKLRARIAQKQMEGETGHSQDGGDLFRLMMGVLKDDVLNIDDLVFDEKVPPENLFPLQAVEFSRLVSSLRPDESEDAIVTSSLKLVAMFRQRPGQKAVFVTQNGFLPLMDLLDIPKSRVICAVLQLINEIVKDNTDFLENACLVGLIPLVMSFAGFERDRSREIRKEAAYFLQQLCQSSPLTLQMFISCRGIPVLVGFLEADYAKHREMVHLAIDGMWQVFKLKKSTSRNDFCRIAAKNGILLRLVNTLYSLSEATRLASISGDALILDGQTPRARSGQLDPNNPIFSQRETSPSVIDHPDGLKTRNGGGEEPSHALTSNSQSSDVHQPDALHPDGDRPRLSSVVADATEDVIQQHRISLSANRTSTDKLQKLAEGASNGFPVTQPDQVRPLLSLLEKEPPSRKISGQLDYVKHIAGIERHESRLPLLYASDEKKTNGDLEFIMAEFAEVSGRGKENGNLDTAPRYSSKTMTKKVMAIERVASTCGIASQTASGVLSGSGVLNARPGSTTSSGLLAHALSADVSMDYLEKVADLLLEFARAETTVKSYMCSQSLLSRLFQMFNRVEPPILLKILECTNHLSTDPNCLENLQRADAIKQLIPNLELKEGPLVYQIHHEVLSALFNLCKINKRRQEQAAENGIIPHLMLFVMSDSPLKQYALPLLCDMAHASRNSREQLRAHGGLDVYLSLLDDEYWSVIALDSIAVCLAQDVDQKVEQAFLKKDAIQKLVNFFQNCPERHFVHILEPFLKIITKSSSINKTLALNGLTPLLIARLDHQDAIARLNLLKLIKAVYEKHPKPKQLIVENDLPQKLQNLIEERRDGQRSGGQVLVKQMATSLLKALHINTIL

SEQ ID NO: 80377 - protein, 1347 aa, Arabidopsis thaliana
  peptide (1)..(1347): Ceres Seq. ID no. 12655530
  misc_feature (1)..(254): Pfam Name: Protein kinase domain Pfam Description: Protein kinase domain
  misc_feature (323)..(1327): Homolog of NCBI NO: 19387284 NR Description: putative MAP3K epsilon protein kinase [Oryza
  misc_feature (975)..(1347): Homolog of NCBI NO: 19570058 NR Description: similar to Emericella nidulans (Aspergillus
  misc_feature (1)..(357): Homolog of NCBI NO: 19570058 NR Description: similar to Emericella nidulans (Aspergillus
  misc_feature (481)..(744): Homolog of NCBI NO: 19570058 NR Description: similar to Emericella nidulans (Aspergillus
  misc_feature (78)..(781): Homolog of NCBI NO: 19387284 NR Description: putative MAP3K epsilon protein kinase [Oryza
  misc_feature (1)..(450): Homolog of NCBI NO: 6531993 NR Description: septation [Aspergillus nidulans]
  misc_feature (994)..(1344): Homolog of NCBI NO: 6531993 NR Description: septation [Aspergillus nidulans]
  misc_feature (487)..(760): Homolog of NCBI NO: 6531993 NR Description: septation [Aspergillus nidulans]
  misc_feature (24)..(450): Homolog of NCBI NO: 40741112 NR Description: hypothetical protein AN4385.2 [Aspergillus
  misc_feature (994)..(1344): Homolog of NCBI NO: 40741112 NR Description: hypothetical protein AN4385.2 [Aspergillus
MLGDEIGKGAYGRVYIGLDLENGDFVAIKQVSLENIGQEDLNTIMQEIDLLKNLNHKNIVKYLGSLKTKTHLHIILEYVENGSLANIIKPNKFGPFPESLVTVYIAQVLEGLVYLHEQGVIHRDIKGANILTTKEGLVKLADFGVATKLNEADFNTHSVVGTPYWMAPEVIELSGVCAASDIWSVGCTIIELLTCVPPYYDLQPMPALYRIVQDDTPPIPDSLSPDITDFLRLCFKKDSRQRPDAKTLLSHPWIRNSRRALRSSLRHSGTIRYMKETDSSSEKDAEGSQEVVESVSAEKVEVTKTNSKSKLPVIGGASFRSEKDQSSPSDLGEEGTDSEDDINSDQGPTLSMHDKSSRQSGTCSISSDAKGTSQDVLENHEKYDRDEIPGNLETEASEGRRNTLATKLVGKEYSIQSSHSFSQKGEDGLRKAVKTPSSFGGNELTRFSDPPGDASLHDLFHPLDKVPEGKTNEASTSTPTANVNQGDSPVADGGKNDLATKLRARIAQKQMEGETGHSQDGGDLFRLMMGVLKDDVLNIDDLVFDEKVPPENLFPLQAVEFSRLVSSLRPDESEDAIVTSSLKLVAMFRQRPGQKAVFVTQNGFLPLMDLLDIPKSRVICAVLQLINEIVKDNTDFLENACLVGLIPLVMSFAGFERDRSREIRKEAAYFLQQLCQSSPLTLQMFISCRGIPVLVGFLEADYAKHREMVHLAIDGMWQVFKLKKSTSRNDFCRIAAKNGILLRLVNTLYSLSEATRLASISGDALILDGQTPRARSGQLDPNNPIFSQRETSPSVIDHPDGLKTRNGGGEEPSHALTSNSQSSDVHQPDALHPDGDRPRLSSVVADATEDVIQQHRISLSANRTSTDKLQKLAEGASNGFPVTQPDQVRPLLSLLEKEPPSRKISGQLDYVKHIAGIERHESRLPLLYASDEKKTNGDLEFIMAEFAEVSGRGKENGNLDTAPRYSSKTMTKKVMAIERVASTCGIASQTASGVLSGSGVLNARPGSTTSSGLLAHALSADVSMDYLEKVADLLLEFARAETTVKSYMCSQSLLSRLFQMFNRVEPPILLKILECTNHLSTDPNCLENLQRADAIKQLIPNLELKEGPLVYQIHHEVLSALFNLCKINKRRQEQAAENGIIPHLMLFVMSDSPLKQYALPLLCDMAHASRNSREQLRAHGGLDVYLSLLDDEYWSVIALDSIAVCLAQDVDQKVEQAFLKKDAIQKLVNFFQNCPERHFVHILEPFLKIITKSSSINKTLALNGLTPLLIARLDHQDAIARLNLLKLIKAVYEKHPKPKQLIVENDLPQKLQNLIEERRDGQRSGGQVLVKQMATSLLKALHINTIL

SEQ ID NO: 80378 - DNA, 708 bp, Arabidopsis thaliana
  misc_feature (1)..(708): Ceres Seq. ID no. 12655544
  misc_feature: MA Experiment ID: 20000265 Result: Up-regulated in Transcription
  misc_feature: MA Experiment 20000265 PARAMETER Experiment Name: At_Open_Flower_P Parameter: Age (day) Value: 21
  misc_feature: MA Experiment 20000265 PARAMETER Experiment Name: At_Open_Flower_P Parameter: Plant Line Value: WS
  misc_feature: MA Experiment 20000265 PARAMETER Experiment Name: At_Open_Flower_P Parameter: Tissue Value: Closed Flower vs. Whole Plant
  misc_feature: MA Experiment ID: 20000286 Result: Up-regulated in Transcription
  misc_feature: MA Experiment 20000286 PARAMETER Experiment Name: At_Open_Flower_P Parameter: Age (day) Value: 21
  misc_feature: MA Experiment 20000286 PARAMETER Experiment Name: At_Open_Flower_P Parameter: Plant Line Value: WS
  misc_feature: MA Experiment 20000286 PARAMETER Experiment Name: At_Open_Flower_P Parameter: Tissue Value: Half Open vs. Whole Plant
atgaacgatgcggatgtgtcaaagcagatacagcagatggtccggttcatccggcaagaagcagaagagaaagcaaacgagatctccatctccgccgaggaggaattcaacatagaaagacttcagcttctcgagtctgccaagcgtaagctccgtcaagactatgaccgcaagctcaagcaggttgatatccgcaagcgaatcgactactccacacaactgaatgcaagtaggattaagtaccttcaagctcaagatgacgttgtcactgccatgaaagactccgcagctaaggatcttctccgtgtctccaacgacaagaacaattacaagaagcttcttaagagtctcatcattgagagtttgctgcgcctgaaagagccatcagtgctgctgagatgcagagaaatggacaagaaggttgttgaatcggtcattgaagatgctaaaagacagtacgcggaaaaagccaaagtcgggtctcctaagatcaccatcgacgaaaaggtcttcctccctccacctcctaatccgaagctccctgattcccacgaccctcactgctcgggtggggtggtgctggcctctcaagacggcaagattgtctgcgagaacactttagacgcacgccttgacgtcgccttcagacagaagcttccccagatccggacgcgcctcgttggagctcctgaaacctccagagcatga

SEQ ID NO: 80379 - protein, 235 aa, Arabidopsis thaliana
  peptide (1)..(235): Ceres Seq. ID no. 12655545
  misc_feature (16)..(227): Pfam Name: ATP synthase (E/31 kDa) subunit Pfam Description: ATP synthase (E/31 kDa) subunit
  misc_feature (1)..(235): Homolog of NCBI NO: 15231933 NR Description: putative vacuolar ATP synthase subunit E; protein At3g08560.1 [Arabidopsis thaliana]
  misc_feature (1)..(228): Homolog of NCBI NO: 20340245 NR Description: vacuolar ATPase subunit E-like protein
  misc_feature (1)..(228): Homolog of NCBI NO: 15237054 NR Description: H+-transporting ATPase chain E, vacuolar; protein At4g11150.1, supported by cDNA: gi_17473676, supported by cDNA: [Arabidopsis thaliana] >gi|12643432|sp|Q39258|VATE_ARATH Vacuolar
  misc_feature (1)..(228): Homolog of NCBI NO: 1143394 NR Description: V-type proton-ATPase [Arabidopsis thaliana]
  misc_feature (1)..(227): Homolog of NCBI NO: 12585474 NR Description: Vacuolar ATP synthase subunit E (V-ATPase E
  misc_feature (1)..(227): Homolog of NCBI NO: 12585492 NR Description: Vacuolar ATP synthase subunit E (V-ATPase E
  misc_feature (1)..(228): Homolog of NCBI NO: 34912000 NR Description: putative YLP [Oryza sativa (japonica
  misc_feature (1)..(228): Homolog of NCBI NO: 15222641 NR Description: H+-transporting ATPase protein, putative; protein
  misc_feature (1)..(228): Homolog of NCBI NO: 3334405 NR Description: Vacuolar ATP synthase subunit E (V-ATPase E
  misc_feature (1)..(226): Homolog of NCBI NO: 3334410 NR Description: Vacuolar ATP synthase subunit E (V-ATPase E
MNDADVSKQIQQMVRFIRQEAEEKANEISISAEEEFNIERLQLLESAKRKLRQDYDRKLKQVDIRKRIDYSTQLNASRIKYLQAQDDVVTAMKDSAAKDLLRVSNDKNNYKKLLKSLIIESLLRLKEPSVLLRCREMDKKVVESVIEDAKRQYAEKAKVGSPKITIDEKVFLPPPPNPKLPDSHDPHCSGGVVLASQDGKIVCENTLDARLDVAFRQKLPQIRTRLVGAPETSRA

SEQ ID NO: 80380 - protein, 223 aa, Arabidopsis thaliana
  peptide (1)..(223): Ceres Seq. ID no. 12655546
  misc_feature (4)..(215): Pfam Name: ATP synthase (E/31 kDa) subunit Pfam Description: ATP synthase (E/31 kDa) subunit
  misc_feature (1)..(223): Homolog of NCBI NO: 15231933 NR Description: putative vacuolar ATP synthase subunit E; protein At3g08560.1 [Arabidopsis thaliana]
  misc_feature (1)..(216): Homolog of NCBI NO: 20340245 NR Description: vacuolar ATPase subunit E-like protein
  misc_feature (1)..(216): Homolog of NCBI NO: 15237054 NR Description: H+-transporting ATPase chain E, vacuolar; protein At4g11150.1, supported by cDNA: gi_17473676, supported by cDNA: [Arabidopsis thaliana] >gi|12643432|sp|Q39258|VATE_ARATH Vacuolar
  misc_feature (1)..(216): Homolog of NCBI NO: 1143394 NR Description: V-type proton-ATPase [Arabidopsis thaliana]
  misc_feature (1)..(215): Homolog of NCBI NO: 12585474 NR Description: Vacuolar ATP synthase subunit E (V-ATPase E
  misc_feature (1)..(215): Homolog of NCBI NO: 12585492 NR Description: Vacuolar ATP synthase subunit E (V-ATPase E
  misc_feature (1)..(216): Homolog of NCBI NO: 34912000 NR Description: putative YLP [Oryza sativa (japonica
  misc_feature (1)..(216): Homolog of NCBI NO: 15222641 NR Description: H+-transporting ATPase protein, putative; protein
  misc_feature (1)..(216): Homolog of NCBI NO: 3334405 NR Description: Vacuolar ATP synthase subunit E (V-ATPase E
  misc_feature (1)..(214): Homolog of NCBI NO: 3334410 NR Description: Vacuolar ATP synthase subunit E (V-ATPase E
MVRFIRQEAEEKANEISISAEEEFNIERLQLLESAKRKLRQDYDRKLKQVDIRKRIDYSTQLNASRIKYLQAQDDVVTAMKDSAAKDLLRVSNDKNNYKKLLKSLIIESLLRLKEPSVLLRCREMDKKVVESVIEDAKRQYAEKAKVGSPKITIDEKVFLPPPPNPKLPDSHDPHCSGGVVLASQDGKIVCENTLDARLDVAFRQKLPQIRTRLVGAPETSRA

SEQ ID NO: 80381 - protein, 144 aa, Arabidopsis thaliana
  peptide (1)..(144): Ceres Seq. ID no. 12655547
  misc_feature (1)..(136): Pfam Name: ATP synthase (E/31 kDa) subunit Pfam Description: ATP synthase (E/31 kDa) subunit
  misc_feature (1)..(144): Homolog of NCBI NO: 15231933 NR Description: putative vacuolar ATP synthase subunit E; protein At3g08560.1 [Arabidopsis thaliana]
  misc_feature (1)..(137): Homolog of NCBI NO: 20340245 NR Description: vacuolar ATPase subunit E-like protein
  misc_feature (1)..(137): Homolog of NCBI NO: 15237054 NR Description: H+-transporting ATPase chain E, vacuolar; protein At4g11150.1, supported by cDNA: gi_17473676, supported by cDNA: [Arabidopsis thaliana] >gi|12643432|sp|Q39258|VATE_ARATH Vacuolar
  misc_feature (1)..(137): Homolog of NCBI NO: 1143394 NR Description: V-type proton-ATPase [Arabidopsis thaliana]
  misc_feature (1)..(136): Homolog of NCBI NO: 12585474 NR Description: Vacuolar ATP synthase subunit E (V-ATPase E
  misc_feature (1)..(136): Homolog of NCBI NO: 12585492 NR Description: Vacuolar ATP synthase subunit E (V-ATPase E
  misc_feature (1)..(137): Homolog of NCBI NO: 34912000 NR Description: putative YLP [Oryza sativa (japonica
  misc_feature (1)..(137): Homolog of NCBI NO: 15222641 NR Description: H+-transporting ATPase protein, putative; protein
  misc_feature (1)..(137): Homolog of NCBI NO: 3334405 NR Description: Vacuolar ATP synthase subunit E (V-ATPase E
  misc_feature (1)..(135): Homolog of NCBI NO: 3334410 NR Description: Vacuolar ATP synthase subunit E (V-ATPase E
MKDSAAKDLLRVSNDKNNYKKLLKSLIIESLLRLKEPSVLLRCREMDKKVVESVIEDAKRQYAEKAKVGSPKITIDEKVFLPPPPNPKLPDSHDPHCSGGVVLASQDGKIVCENTLDARLDVAFRQKLPQIRTRLVGAPETSRA

SEQ ID NO: 80382 - DNA, 450 bp, Arabidopsis thaliana
  misc_feature (1)..(450): Ceres Seq. ID no. 12655563
  misc_feature: MA Experiment ID: 20000307 Result: Down-regulated in Transcription
  misc_feature: MA Experiment 20000307 PARAMETER Experiment Name: At_Germinating_Seeds_Sub_P Parameter: Age (hr) Value: 24 vs. 0
  misc_feature: MA Experiment 20000307 PARAMETER Experiment Name: At_Germinating_Seeds_Sub_P Parameter: Organism Value: A. thaliana
  misc_feature: MA Experiment 20000307 PARAMETER Experiment Name: At_Germinating_Seeds_Sub_P Parameter: Plant Line Value: WS
  misc_feature: MA Experiment 20000307 PARAMETER Experiment Name: At_Germinating_Seeds_Sub_P Parameter: Tissue Value: Germinating Seeds
atggcttctaagaggatttcaagggaactgagggatatgcagagacatcctccagcaaactgtagcgcaggtcctgtggctgaggaggacatattccattggcaagcaactatcatgggaccgcatgacagtccgtattccggaggcgtatttacggtttctattgatttctcttcggattatcctttcaagccaccaaaggtgaatttcaagactaaggtgtaccacccaaacatcgacagcaaaggaagcatttgccttgacatattgaaagagcaatggagtcctgctcctaccacatccaaggttttgttgtcgatttgctcgctgctgactgacccgaacccaaatgatcctcttgtgccggagatagctcatctctacaaggtagataaatcaaaatacgagtcaactgcacaaaaatggacacagaagtacgcgatgggatga

SEQ ID NO: 80383 - protein, 149 aa, Arabidopsis thaliana
  peptide (1)..(149): Ceres Seq. ID no. 12655564
  misc_feature (1)..(149): Homolog of NCBI NO: 18398208 NR Description: E2, ubiquitin-conjugating enzyme, putative; id: At3g08700.1 [Arabidopsis thaliana]
  misc_feature (1)..(149): Homolog of NCBI NO: 18398206 NR Description: E2, ubiquitin-conjugating enzyme 11 (UBC11); id: At3g08690.1, supported by cDNA: 21455., supported by cDNA: supported by cDNA: gi_20259610 [Arabidopsis thaliana] protein 11)
  misc_feature (1)..(149): Homolog of NCBI NO: 11762186 NR Description: AT4g27960 [Arabidopsis thaliana]
  misc_feature (1)..(149): Homolog of NCBI NO: 18417097 NR Description: E2, ubiquitin-conjugating enzyme 9 (UBC9); id: At4g27960.1, supported by cDNA: gi_13358210 [Arabidopsis
  misc_feature (1)..(149): Homolog of NCBI NO: 30687803 NR Description: ubiquitin-conjugating enzyme 9 (UBC9)
  misc_feature (1)..(149): Homolog of NCBI NO: 18408001 NR Description: E2, ubiquitin-conjugating enzyme, putative; id: At1g64230.1, supported by cDNA: gi_14326528 [Arabidopsis >gi|14326529|gb|AAK60309.1|AF385718_1 At1g64230/F22C12_17
  misc_feature (1)..(149): Homolog of NCBI NO: 40287554 NR Description: ubiquitin-conjugating enzyme 8 [Capsicum annuum]
  misc_feature (1)..(149): Homolog of NCBI NO: 464981 NR Description: Ubiquitin-conjugating enzyme E2-17 kDa ligase) (Ubiquitin carrier protein) >gi|388207|gb|AAA34125.1|
  misc_feature (1)..(149): Homolog of NCBI NO: 18423494 NR Description: E2, ubiquitin-conjugating enzyme 10 (UBC10); id: At5g53300.1, supported by cDNA: 25162., supported by cDNA: supported by cDNA: gi_13265586, supported by cDNA: gi_13358197,
  misc_feature (1)..(149): Homolog of NCBI NO: 441457 NR Description: ubiquitin conjugating enzyme E2 [Lycopersicon
MASKRISRELRDMQRHPPANCSAGPVAEEDIFHWQATIMGPHDSPYSGGVFTVSIDFSSDYPFKPPKVNFKTKVYHPNIDSKGSICLDILKEQWSPAPTTSKVLLSICSLLTDPNPNDPLVPEIAHLYKVDKSKYESTAQKWTQKYAMG

SEQ ID NO: 80384 - protein, 137 aa, Arabidopsis thaliana
  peptide (1)..(137): Ceres Seq. ID no. 12655565
  misc_feature (1)..(137): Homolog of NCBI NO: 18398208 NR Description: E2, ubiquitin-conjugating enzyme, putative; id: At3g08700.1 [Arabidopsis thaliana]
  misc_feature (1)..(137): Homolog of NCBI NO: 18398206 NR Description: E2, ubiquitin-conjugating enzyme 11 (UBC11); id: At3g08690.1, supported by cDNA: 21455., supported by cDNA: supported by cDNA: gi_20259610 [Arabidopsis thaliana] protein 11)
  misc_feature (1)..(137): Homolog of NCBI NO: 11762186 NR Description: AT4g27960 [Arabidopsis thaliana]
  misc_feature (1)..(137): Homolog of NCBI NO: 18417097 NR Description: E2, ubiquitin-conjugating enzyme 9 (UBC9); id: At4g27960.1, supported by cDNA: gi_13358210 [Arabidopsis
  misc_feature (1)..(137): Homolog of NCBI NO: 30687803 NR Description: ubiquitin-conjugating enzyme 9 (UBC9)
  misc_feature (1)..(137): Homolog of NCBI NO: 18408001 NR Description: E2, ubiquitin-conjugating enzyme, putative; id: At1g64230.1, supported by cDNA: gi_14326528 [Arabidopsis >gi|14326529|gb|AAK60309.1|AF385718_1 At1g64230/F22C12_17
  misc_feature (1)..(137): Homolog of NCBI NO: 40287554 NR Description: ubiquitin-conjugating enzyme 8 [Capsicum annuum]
  misc_feature (1)..(137): Homolog of NCBI NO: 464981 NR Description: Ubiquitin-conjugating enzyme E2-17 kDa ligase) (Ubiquitin carrier protein) >gi|388207|gb|AAA34125.1|
  misc_feature (1)..(137): Homolog of NCBI NO: 18423494 NR Description: E2, ubiquitin-conjugating enzyme 10 (UBC10); id: At5g53300.1, supported by cDNA: 25162., supported by cDNA: supported by cDNA: gi_13265586, supported by cDNA: gi_13358197,
  misc_feature (1)..(137): Homolog of NCBI NO: 441457 NR Description: ubiquitin conjugating enzyme E2 [Lycopersicon
MQRHPPANCSAGPVAEEDIFHWQATIMGPHDSPYSGGVFTVSIDFSSDYPFKPPKVNFKTKVYHPNIDSKGSICLDILKEQWSPAPTTSKVLLSICSLLTDPNPNDPLVPEIAHLYKVDKSKYESTAQKWTQKYAMG

SEQ ID NO: 80385 - protein, 111 aa, Arabidopsis thaliana
  peptide (1)..(111): Ceres Seq. ID no. 12655566
  misc_feature (1)..(111): Homolog of NCBI NO: 18398208 NR Description: E2, ubiquitin-conjugating enzyme, putative; id: At3g08700.1 [Arabidopsis thaliana]
  misc_feature (1)..(111): Homolog of NCBI NO: 18398206 NR Description: E2, ubiquitin-conjugating enzyme 11 (UBC11); id: At3g08690.1, supported by cDNA: 21455., supported by cDNA: supported by cDNA: gi_20259610 [Arabidopsis thaliana] protein 11)
  misc_feature (1)..(111): Homolog of NCBI NO: 11762186 NR Description: AT4g27960 [Arabidopsis thaliana]
  misc_feature (1)..(111): Homolog of NCBI NO: 18417097 NR Description: E2, ubiquitin-conjugating enzyme 9 (UBC9); id: At4g27960.1, supported by cDNA: gi_13358210 [Arabidopsis
  misc_feature (1)..(111): Homolog of NCBI NO: 30687803 NR Description: ubiquitin-conjugating enzyme 9 (UBC9)
  misc_feature (1)..(111): Homolog of NCBI NO: 18408001 NR Description: E2, ubiquitin-conjugating enzyme, putative; id: At1g64230.1, supported by cDNA: gi_14326528 [Arabidopsis >gi|14326529|gb|AAK60309.1|AF385718_1 At1g64230/F22C12_17
  misc_feature (1)..(111): Homolog of NCBI NO: 40287554 NR Description: ubiquitin-conjugating enzyme 8 [Capsicum annuum]
  misc_feature (1)..(111): Homolog of NCBI NO: 464981 NR Description: Ubiquitin-conjugating enzyme E2-17 kDa ligase) (Ubiquitin carrier protein) >gi|388207|gb|AAA34125.1|
  misc_feature (1)..(111): Homolog of NCBI NO: 18423494 NR Description: E2, ubiquitin-conjugating enzyme 10 (UBC10); id: At5g53300.1, supported by cDNA: 25162., supported by cDNA: supported by cDNA: gi_13265586, supported by cDNA: gi_13358197,
  misc_feature (1)..(111): Homolog of NCBI NO: 441457 NR Description: ubiquitin conjugating enzyme E2 [Lycopersicon
MGPHDSPYSGGVFTVSIDFSSDYPFKPPKVNFKTKVYHPNIDSKGSICLDILKEQWSPAPTTSKVLLSICSLLTDPNPNDPLVPEIAHLYKVDKSKYESTAQKWTQKYAMG

SEQ ID NO: 80386 - DNA, 1954 bp, Arabidopsis thaliana
  misc_feature (1)..(1954): Ceres Seq. ID no. 12655567
  misc_feature: MA Experiment ID: 20000315 Result: Down-regulated in Transcription
  misc_feature: MA Experiment 20000315 PARAMETER Experiment Name: At_14day_Shoots-Roots_Sub_P Parameter: Age (day) Value: 14
  misc_feature: MA Experiment 20000315 PARAMETER Experiment Name: At_14day_Shoots-Roots_Sub_P Parameter: Organism Value: A. thaliana
  misc_feature: MA Experiment 20000315 PARAMETER Experiment Name: At_14day_Shoots-Roots_Sub_P Parameter: Plant Line Value: WS
  misc_feature: MA Experiment 20000315 PARAMETER Experiment Name: At_14day_Shoots-Roots_Sub_P Parameter: Tissue Value: Shoots vs. Whole Plant
  misc_feature: MA Experiment ID: 20000328 Result: Up-regulated in Transcription
  misc_feature: MA Experiment 20000328 PARAMETER Experiment Name: At_42deg_Heat_Sub_P Parameter: Age (day) Value: 14
  misc_feature: MA Experiment 20000328 PARAMETER Experiment Name: At_42deg_Heat_Sub_P Parameter: Organism Value: A. thaliana
  misc_feature: MA Experiment 20000328 PARAMETER Experiment Name: At_42deg_Heat_Sub_P Parameter: Plant Line Value: WS
  misc_feature: MA Experiment 20000328 PARAMETER Experiment Name: At_42deg_Heat_Sub_P Parameter: Temperature (deg C) Value: 42 vs. 22
  misc_feature: MA Experiment 20000328 PARAMETER Experiment Name: At_42deg_Heat_Sub_P Parameter: Timepoint (hr) Value: 6
  misc_feature: MA Experiment 20000328 PARAMETER Experiment Name: At_42deg_Heat_Sub_P Parameter: Tissue Value: Aerial
  misc_feature: MA Experiment ID: 20000355 Result: Down-regulated in Transcription
  misc_feature: MA Experiment 20000355 PARAMETER Experiment Name: At_Siliques_Sub_P Parameter: Age (day) Value: 21
  misc_feature: MA Experiment 20000355 PARAMETER Experiment Name: At_Siliques_Sub_P Parameter: Organism Value: A. thaliana
  misc_feature: MA Experiment 20000355 PARAMETER Experiment Name: At_Siliques_Sub_P Parameter: Plant Line Value: WS
  misc_feature: MA Experiment 20000355 PARAMETER Experiment Name: At_Siliques_Sub_P Parameter: Tissue Value: Less Than 5mm Siliques vs. Whole Plant
  misc_feature: MA Experiment ID: 20000440 Result: Down-regulated in Transcription
  misc_feature: MA Experiment 20000440 PARAMETER Experiment Name: At_Closed-Flower__Sub_P Parameter: Tissue Value: Closed Flower vs. Whole Plant
gttttactctatatctggatttgtttgaaaattgcttgtgttatgcgccagctttttccctaatatatagactaggtcttaattacagatattagagttcgtttcctcgagggtttctttcgacctcgtgtcctggtgaaattttggaattctaaggctttggggttttatttgggaggggatgatcatctaaaggatattcggtcggtgtcgtgttttcttaatctcaattctgttgactttagctttgcgcttaaagtactttgatggcattgggacacttgtgcagcatccactgtttccttaaaatagggaaacaagaagagcttcttgtcctagatattggtttgcctattcccagtttcttcctcattaactttattggtagcagagcctcatccatctggtgaacttgtgaagcttcctctgtgattcttttggcgattggttagaaatatggtttcttctcagtgttctgttgcaaacaaaaaccagactgggaagccgtttcagaaacatctatctttatccatcagccctccaaaatctgtcttgggtgataaccttgagcttcaattctctgatgtctttggaccaatgcctgaagctaactctgaagaggcctgtgatgttgcttacgacgagcctgctgttgtctacagtcgatcccactcattggttggcccgtctttggttgttagccattctttgaagatgaacaagctcactttacgagaaactgaggactcagttgacttggtggagtgtgttgaaggtgaatcgataaaagagaacgatgaattctctggtaatgatgacactgacagtgagaaatctccagaggaggtctcaggtgtagtaggcattgaggactttgaggtattgaaggttgtgggacaaggtgcatttggaaaagtgtaccaggtgaggaaaaaagacacgtctgagatatacgcgatgaaggtcatgagaaaagataaaattgttgagaagaatcatgctgaatacatgaaagccgagcgcgatattctaaccaaaatcgatcatcctttcattgtgcaacttaaatactcttttcagaccaaatacagattgtatcttgttcttgactttataaacggaggtcatcttttcttccagctctatcaccaagggcttttcagggaggacttggctcgtgtgtacactgcagaaatcgtctctgcagtttcccatctccatgagaaaggcataatgcatagagatcttaaacctgaaaacatactcatggacgtagatggccatgtgatgttaactgattttggtttagcaaaagaatttgaagaaaacacaagatcaaactccatgtgtgggactacggagtatatggcccctgagattgttcgtggaaaaggacatgataaggctgccgactggtggagtgtaggaatccttctgtatgagatgctcactggaaagccgccgtttctcgggagcaaaggaaagatacagcagaaaatcgttaaggacaagatcaagcttccacagtttctgtctaatgaagctcatgccttgctgaaagggctgctgcaaaaagagccagaaaggagactgggaagtggaccgagcggagcagaggagataaaaaaacacaaatggttcaaggcgataaactggaagaagctggaggctagagaagtacaaccaagtttcaagccggcggtttcgggaagacaatgcatagctaattttgacaagtgttggactgacatgtctgttttggattctccagcaagtagtcccaactctgatgctaaggcgaacccttttacaaacttcacatacgtcaggcctcctcattcattccttcatcggaccacatccaacttgtagatgaactataatatgttacccccgcttctgtttttgtaatccgaaacatatgaacatgcacaaaatcaacggttgtttgaag

SEQ ID NO: 80387 - protein, 471 aa, Arabidopsis thaliana
  peptide (1)..(471): Ceres Seq. ID no. 12655568
  misc_feature (140)..(395): Pfam Name: Protein kinase domain Pfam Description: Protein kinase domain
  misc_feature (1)..(471): Homolog of NCBI NO: 15231959 NR Description: putative ribosomal-protein S6 kinase (ATPK19); id: At3g08720.1, supported by cDNA: gi_13272446, supported by
  misc_feature (1)..(471): Homolog of NCBI NO: 2129541 NR Description: protein kinase ATPK19 (EC 2.7.1.-) - Arabidopsis
  misc_feature (1)..(471): Homolog of NCBI NO: 15231960 NR Description: putative ribosomal-protein S6 kinase (ATPK6); id: At3g08730.1, supported by cDNA: 122224., supported by cDNA: supported by cDNA: gi_508307, supported by cDNA: protein kinase
  misc_feature (1)..(471): Homolog of NCBI NO: 21537155 NR Description: putative ribosomal-protein S6 kinase ATPK6
  misc_feature (1)..(463): Homolog of NCBI NO: 1362152 NR Description: ribosomal protein S6 kinase homolog (clone - oat >gi|871986|emb|CAA56313.1| putative pp70 ribosomal protein
  misc_feature (1)..(459): Homolog of NCBI NO: 37575481 NR Description: ribosomal protein S6 kinase [Zea mays]
  misc_feature (26)..(459): Homolog of NCBI NO: 7649389 NR Description: S6 ribosomal protein kinase [Asparagus
  misc_feature (168)..(459): Homolog of NCBI NO: 33146662 NR Description: putative S6 ribosomal protein kinase [Oryza
  misc_feature (106)..(457): Homolog of NCBI NO: 464395 NR Description: Protein kinase 2 >gi|102261|pir||A38578 protein
  misc_feature (90)..(459): Homolog of NCBI NO: 28422368 NR Description: Unknown (protein for MGC:55713) [Danio rerio]
MVSSQCSVANKNQTGKPFQKHLSLSISPPKSVLGDNLELQFSDVFGPMPEANSEEACDVAYDEPAVVYSRSHSLVGPSLVVSHSLKMNKLTLRETEDSVDLVECVEGESIKENDEFSGNDDTDSEKSPEEVSGVVGIEDFEVLKVVGQGAFGKVYQVRKKDTSEIYAMKVMRKDKIVEKNHAEYMKAERDILTKIDHPFIVQLKYSFQTKYRLYLVLDFINGGHLFFQLYHQGLFREDLARVYTAEIVSAVSHLHEKGIMHRDLKPENILMDVDGHVMLTDFGLAKEFEENTRSNSMCGTTEYMAPEIVRGKGHDKAADWWSVGILLYEMLTGKPPFLGSKGKIQQKIVKDKIKLPQFLSNEAHALLKGLLQKEPERRLGSGPSGAEEIKKHKWFKAINWKKLEAREVQPSFKPAVSGRQCIANFDKCWTDMSVLDSPASSPNSDAKANPFTNFTYVRPPHSFLHRTTSNL

SEQ ID NO: 80388 - protein, 424 aa, Arabidopsis thaliana
  peptide (1)..(424): Ceres Seq. ID no. 12655569
  misc_feature (93)..(348): Pfam Name: Protein kinase domain Pfam Description: Protein kinase domain
  misc_feature (1)..(424): Homolog of NCBI NO: 15231959 NR Description: putative ribosomal-protein S6 kinase (ATPK19); id: At3g08720.1, supported by cDNA: gi_13272446, supported by
  misc_feature (1)..(424): Homolog of NCBI NO: 2129541 NR Description: protein kinase ATPK19 (EC 2.7.1.-) - Arabidopsis
  misc_feature (1)..(424): Homolog of NCBI NO: 15231960 NR Description: putative ribosomal-protein S6 kinase (ATPK6); id: At3g08730.1, supported by cDNA: 122224., supported by cDNA: supported by cDNA: gi_508307, supported by cDNA: protein kinase
  misc_feature (1)..(424): Homolog of NCBI NO: 21537155 NR Description: putative ribosomal-protein S6 kinase ATPK6
  misc_feature (1)..(416): Homolog of NCBI NO: 1362152 NR Description: ribosomal protein S6 kinase homolog (clone - oat >gi|871986|emb|CAA56313.1| putative pp70 ribosomal protein
  misc_feature (1)..(412): Homolog of NCBI NO: 37575481 NR Description: ribosomal protein S6 kinase [Zea mays]
  misc_feature (1)..(412): Homolog of NCBI NO: 7649389 NR Description: S6 ribosomal protein kinase [Asparagus
  misc_feature (121)..(412): Homolog of NCBI NO: 33146662 NR Description: putative S6 ribosomal protein kinase [Oryza
  misc_feature (59)..(410): Homolog of NCBI NO: 464395 NR Description: Protein kinase 2 >gi|102261|pir||A38578 protein
  misc_feature (43)..(412): Homolog of NCBI NO: 28422368 NR Description: Unknown (protein for MGC:55713) [Danio rerio]
MPEANSEEACDVAYDEPAVVYSRSHSLVGPSLVVSHSLKMNKLTLRETEDSVDLVECVEGESIKENDEFSGNDDTDSEKSPEEVSGVVGIEDFEVLKVVGQGAFGKVYQVRKKDTSEIYAMKVMRKDKIVEKNHAEYMKAERDILTKIDHPFIVQLKYSFQTKYRLYLVLDFINGGHLFFQLYHQGLFREDLARVYTAEIVSAVSHLHEKGIMHRDLKPENILMDVDGHVMLTDFGLAKEFEENTRSNSMCGTTEYMAPEIVRGKGHDKAADWWSVGILLYEMLTGKPPFLGSKGKIQQKIVKDKIKLPQFLSNEAHALLKGLLQKEPERRLGSGPSGAEEIKKHKWFKAINWKKLEAREVQPSFKPAVSGRQCIANFDKCWTDMSVLDSPASSPNSDAKANPFTNFTYVRPPHSFLHRTTSNL

SEQ ID NO: 80389 - protein, 385 aa, Arabidopsis thaliana
  peptide (1)..(385): Ceres Seq. ID no. 12655570
  misc_feature (54)..(309): Pfam Name: Protein kinase domain Pfam Description: Protein kinase domain
  misc_feature (1)..(385): Homolog of NCBI NO: 15231959 NR Description: putative ribosomal-protein S6 kinase (ATPK19); id: At3g08720.1, supported by cDNA: gi_13272446, supported by
  misc_feature (1)..(385): Homolog of NCBI NO: 2129541 NR Description: protein kinase ATPK19 (EC 2.7.1.-) - Arabidopsis
  misc_feature (1)..(385): Homolog of NCBI NO: 15231960 NR Description: putative ribosomal-protein S6 kinase (ATPK6); id: At3g08730.1, supported by cDNA: 122224., supported by cDNA: supported by cDNA: gi_508307, supported by cDNA: protein kinase
  misc_feature (1)..(385): Homolog of NCBI NO: 21537155 NR Description: putative ribosomal-protein S6 kinase ATPK6
  misc_feature (1)..(377): Homolog of NCBI NO: 1362152 NR Description: ribosomal protein S6 kinase homolog (clone - oat >gi|871986|emb|CAA56313.1| putative pp70 ribosomal protein
  misc_feature (1)..(373): Homolog of NCBI NO: 37575481 NR Description: ribosomal protein S6 kinase [Zea mays]
  misc_feature (1)..(373): Homolog of NCBI NO: 7649389 NR Description: S6 ribosomal protein kinase [Asparagus
  misc_feature (82)..(373): Homolog of NCBI NO: 33146662 NR Description: putative S6 ribosomal protein kinase [Oryza
  misc_feature (20)..(371): Homolog of NCBI NO: 464395 NR Description: Protein kinase 2 >gi|102261|pir||A38578 protein
  misc_feature (4)..(373): Homolog of NCBI NO: 28422368 NR Description: Unknown (protein for MGC:55713) [Danio rerio]
MNKLTLRETEDSVDLVECVEGESIKENDEFSGNDDTDSEKSPEEVSGVVGIEDFEVLKVVGQGAFGKVYQVRKKDTSEIYAMKVMRKDKIVEKNHAEYMKAERDILTKIDHPFIVQLKYSFQTKYRLYLVLDFINGGHLFFQLYHQGLFREDLARVYTAEIVSAVSHLHEKGIMHRDLKPENILMDVDGHVMLTDFGLAKEFEENTRSNSMCGTTEYMAPEIVRGKGHDKAADWWSVGILLYEMLTGKPPFLGSKGKIQQKIVKDKIKLPQFLSNEAHALLKGLLQKEPERRLGSGPSGAEEIKKHKWFKAINWKKLEAREVQPSFKPAVSGRQCIANFDKCWTDMSVLDSPASSPNSDAKANPFTNFTYVRPPHSFLHRTTSNL

SEQ ID NO: 80390 - DNA, 2058 bp, Arabidopsis thaliana
  misc_feature (1)..(2058): Ceres Seq. ID no. 12655585
  misc_feature: MA Experiment ID: 20000171 Result: Up-regulated in Transcription
  misc_feature: MA Experiment 20000171 PARAMETER Experiment Name: At_42deg_Heat_P Parameter: Age (day) Value: 14
  misc_feature: MA Experiment 20000171 PARAMETER Experiment Name: At_42deg_Heat_P Parameter: Organism Value: A. thaliana
  misc_feature: MA Experiment 20000171 PARAMETER Experiment Name: At_42deg_Heat_P Parameter: Plant Line Value: WS
  misc_feature: MA Experiment 20000171 PARAMETER Experiment Name: At_42deg_Heat_P Parameter: Temperature (deg C) Value: 42 vs. 22
  misc_feature: MA Experiment 20000171 PARAMETER Experiment Name: At_42deg_Heat_P Parameter: Timepoint (hr) Value: 1
  misc_feature: MA Experiment 20000171 PARAMETER Experiment Name: At_42deg_Heat_P Parameter: Tissue Value: Aerial
  misc_feature: MA Experiment ID: 20000173 Result: Up-regulated in Transcription
  misc_feature: MA Experiment 20000173 PARAMETER Experiment Name: At_42deg_Heat_P Parameter: Age (day) Value: 14
  misc_feature: MA Experiment 20000173 PARAMETER Experiment Name: At_42deg_Heat_P Parameter: Organism Value: A. thaliana
  misc_feature: MA Experiment 20000173 PARAMETER Experiment Name: At_42deg_Heat_P Parameter: Plant Line Value: WS
  misc_feature: MA Experiment 20000173 PARAMETER Experiment Name: At_42deg_Heat_P Parameter: Temperature (deg C) Value: 42 vs. 22
  misc_feature: MA Experiment 20000173 PARAMETER Experiment Name: At_42deg_Heat_P Parameter: Timepoint (hr) Value: 6
  misc_feature: MA Experiment 20000173 PARAMETER Experiment Name: At_42deg_Heat_P Parameter: Tissue Value: Aerial
  misc_feature: MA Experiment ID: 20000180 Result: Down-regulated in Transcription
  misc_feature: MA Experiment 20000180 PARAMETER Experiment Name: At_Germinating_Seeds_P Parameter: Age (hr) Value: 24 vs. 0
  misc_feature: MA Experiment 20000180 PARAMETER Experiment Name: At_Germinating_Seeds_P Parameter: Tissue Value: Germinating Seeds
atgagcatcgtcaccgttccatcagcaacatcaaaagtccagcagatcaaaactctaatctccgtcgcatgcaccgtcaatcatctgaaacaaatccacgtctctctcattaaccaccatctccaccacgacaccttcctcgtcaacctcctcctcaagcgaactctcttcttccgccaaaccaaatactcctatctcctcttctctcatacccaattccccaacattttcctctacaatagtctcatcaatggcttcgtcaataatcatctcttccatgaaaccctcgatctcttcctctccatccgcaaacatggtctctacctccatggtttcaccttccctttggttctcaaggcatgcaccagagcctcgagtcgcaagcttgggattgatcttcattcccttgtggtcaaatgtgggtttaatcacgatgtggccgctatgacgagcctgctctctatctactctggatccgggcgtttgaatgatgcccacaaactgttcgacgaaattcctgacagaagcgttgttacttggacggctttgtttagtgggtatactacttcaggaagacacagggaagccattgatttgtttaagaagatggtggagatgggtgtgaaacccgatagctactttattgttcaggttttatctgcttgtgttcatgtaggggatctcgacagtggggagtggatagttaagtacatggaagagatggagatgcagaagaattcctttgtgcggacaacacttgtcaatctctatgccaagtgtgggaagatggagaaagcacgttctgttttcgactcgatggtggagaaagatatagttacttggagcactatgatacaagggtatgcatcgaacagcttcccaaaagaaggaatagagttatttctccagatgttgcaggaaaatctgaaaccggaccagttttctattgtcgggtttctttcgtcttgtgcaagcttaggagcccttgatctaggtgaatggggaattagtttaatagataggcatgagtttttgaccaatctgtttatggccaatgccctgatcgacatgtacgcgaaatgtggggctatggctcgaggttttgaagtatttaaagaaatgaaggagaaagatatagttatcatgaatgctgcaatttctggtctggccaagaatggccacgttaagctctcatttgcggtttttggacaaacagagaagttaggtatctcacctgatgggtccacgttccttggactgctctgtgggtgcgttcacgcaggcctaatccaagacgggcttcggtttttcaatgccataagctgtgtttatgctttgaaacgcacggttgagcactatggttgcatggtagatctttggggcagagcaggaatgttagatgacgcataccgtttgatctgcgatatgcccatgaggccaaacgcgatagtctggggagcgttactgagcggatgcagactggtcaaagatacgcagttagctgaaactgttctcaaagagctcatcgctttggagccatggaatgcaggaaactatgttcaattatccaacatatactctgttggtggcagatgggacgaagctgctgaagtaagggacatgatgaacaagaaaggtatgaagaagatcccgggatatagttggatcgagttggaagggaaggtccatgagtttctagcagatgataaatctcatcctctaagcgacaagatatatgcaaagctagaagatttgggtaatgaaatgaggcttatgggttttgttccaacgacagaatttgttttcttcgatgttgaagaggaagaaaaagaaagggtcttggggtatcacagcgagaagcttgcggttgcgttagggctgatcagtacggatcatggccaagtgattcgggtggtgaagaatctaagggtatgtggagattgtcatgaagtgatgaagttgatatcgaagatcacaagacgagagatcgttgttagagacaacaataggtttcattgttttacaaacggctcttgttcttgcaatgactactggtga

SEQ ID NO: 80391 - protein, 685 aa, Arabidopsis thaliana
  peptide (1)..(685): Ceres Seq. ID no. 12655586
  misc_feature (451)..(485): Pfam Name: PPR repeat Pfam Description: PPR repeat
  misc_feature (30)..(685): Homolog of NCBI NO: 15234006 NR Description: putative protein; protein id: At4g18750.1
  misc_feature (18)..(685): Homolog of NCBI NO: 11994419 NR Description: selenium-binding protein-like [Arabidopsis
  misc_feature (18)..(684): Homolog of NCBI NO: 15230593 NR Description: unknown protein; protein id: At3g12770.1
  misc_feature (31)..(685): Homolog of NCBI NO: 15226200 NR Description: putative selenium-binding protein; protein id:
  misc_feature (74)..(685): Homolog of NCBI NO: 15223099 NR Description: unknown protein; protein id: At1g08070.1 thaliana] >gi|8778839|gb|AAF79838.1|AC026875_18 T6D22.15
  misc_feature (30)..(685): Homolog of NCBI NO: 34915012 NR Description: P0458A05.10 [Oryza sativa (japonica
  misc_feature (27)..(685): Homolog of NCBI NO: 15232837 NR Description: hypothetical protein; protein id: At3g02010.1 thaliana] >gi|6091739|gb|AAF03451.1|AC010797_27 hypothetical [Arabidopsis thaliana] >gi|6513930|gb|AAF14834.1|AC011664_16
  misc_feature (170)..(685): Homolog of NCBI NO: 21741755 NR Description: OSJNBa0060B20.9 [Oryza sativa (japonica
  misc_feature (1)..(168): Homolog of NCBI NO: 21741755 NR Description: OSJNBa0060B20.9 [Oryza sativa (japonica
  misc_feature (30)..(685): Homolog of NCBI NO: 15220337 NR Description: hypothetical protein; protein id: At1g11290.1
MSIVTVPSATSKVQQIKTLISVACTVNHLKQIHVSLINHHLHHDTFLVNLLLKRTLFFRQTKYSYLLFSHTQFPNIFLYNSLINGFVNNHLFHETLDLFLSIRKHGLYLHGFTFPLVLKACTRASSRKLGIDLHSLVVKCGFNHDVAAMTSLLSIYSGSGRLNDAHKLFDEIPDRSVVTWTALFSGYTTSGRHREAIDLFKKMVEMGVKPDSYFIVQVLSACVHVGDLDSGEWIVKYMEEMEMQKNSFVRTTLVNLYAKCGKMEKARSVFDSMVEKDIVTWSTMIQGYASNSFPKEGIELFLQMLQENLKPDQFSIVGFLSSCASLGALDLGEWGISLIDRHEFLTNLFMANALIDMYAKCGAMARGFEVFKEMKEKDIVIMNAAISGLAKNGHVKLSFAVFGQTEKLGISPDGSTFLGLLCGCVHAGLIQDGLRFFNAISCVYALKRTVEHYGCMVDLWGRAGMLDDAYRLICDMPMRPNAIVWGALLSGCRLVKDTQLAETVLKELIALEPWNAGNYVQLSNIYSVGGRWDEAAEVRDMMNKKGMKKIPGYSWIELEGKVHEFLADDKSHPLSDKIYAKLEDLGNEMRLMGFVPTTEFVFFDVEEEEKERVLGYHSEKLAVALGLISTDHGQVIRVVKNLRVCGDCHEVMKLISKITRREIVVRDNNRFHCFTNGSCSCNDYW

SEQ ID NO: 80392 - protein, 537 aa, Arabidopsis thaliana
  peptide (1)..(537): Ceres Seq. ID no. 12655587
  misc_feature (303)..(337): Pfam Name: PPR repeat Pfam Description: PPR repeat
  misc_feature (1)..(537): Homolog of NCBI NO: 15234006 NR Description: putative protein; protein id: At4g18750.1
  misc_feature (1)..(537): Homolog of NCBI NO: 11994419 NR Description: selenium-binding protein-like [Arabidopsis
  misc_feature (1)..(536): Homolog of NCBI NO: 15230593 NR Description: unknown protein; protein id: At3g12770.1
  misc_feature (1)..(537): Homolog of NCBI NO: 15226200 NR Description: putative selenium-binding protein; protein id:
  misc_feature (1)..(537): Homolog of NCBI NO: 15223099 NR Description: unknown protein; protein id: At1g08070.1 thaliana] >gi|8778839|gb|AAF79838.1|AC026875_18 T6D22.15
  misc_feature (1)..(537): Homolog of NCBI NO: 34915012 NR Description: P0458A05.10 [Oryza sativa (japonica
  misc_feature (1)..(537): Homolog of NCBI NO: 15232837 NR Description: hypothetical protein; protein id: At3g02010.1 thaliana] >gi|6091739|gb|AAF03451.1|AC010797_27 hypothetical [Arabidopsis thaliana] >gi|6513930|gb|AAF14834.1|AC011664_16
  misc_feature (22)..(537): Homolog of NCBI NO: 21741755 NR Description: OSJNBa0060B20.9 [Oryza sativa (japonica
  misc_feature (1)..(20): Homolog of NCBI NO: 21741755 NR Description: OSJNBa0060B20.9 [Oryza sativa (japonica
  misc_feature (1)..(537): Homolog of NCBI NO: 15220337 NR Description: hypothetical protein; protein id: At1g11290.1
MTSLLSIYSGSGRLNDAHKLFDEIPDRSVVTWTALFSGYTTSGRHREAIDLFKKMVEMGVKPDSYFIVQVLSACVHVGDLDSGEWIVKYMEEMEMQKNSFVRTTLVNLYAKCGKMEKARSVFDSMVEKDIVTWSTMIQGYASNSFPKEGIELFLQMLQENLKPDQFSIVGFLSSCASLGALDLGEWGISLIDRHEFLTNLFMANALIDMYAKCGAMARGFEVFKEMKEKDIVIMNAAISGLAKNGHVKLSFAVFGQTEKLGISPDGSTFLGLLCGCVHAGLIQDGLRFFNAISCVYALKRTVEHYGCMVDLWGRAGMLDDAYRLICDMPMRPNAIVWGALLSGCRLVKDTQLAETVLKELIALEPWNAGNYVQLSNIYSVGGRWDEAAEVRDMMNKKGMKKIPGYSWIELEGKVHEFLADDKSHPLSDKIYAKLEDLGNEMRLMGFVPTTEFVFFDVEEEEKERVLGYHSEKLAVALGLISTDHGQVIRVVKNLRVCGDCHEVMKLISKITRREIVVRDNNRFHCFTNGSCSCNDYW

SEQ ID NO: 80393 - protein, 483 aa, Arabidopsis thaliana
  peptide (1)..(483): Ceres Seq. ID no. 12655588
  misc_feature (249)..(283): Pfam Name: PPR repeat Pfam Description: PPR repeat
  misc_feature (1)..(483): Homolog of NCBI NO: 15234006 NR Description: putative protein; protein id: At4g18750.1
  misc_feature (1)..(483): Homolog of NCBI NO: 11994419 NR Description: selenium-binding protein-like [Arabidopsis
  misc_feature (1)..(482): Homolog of NCBI NO: 15230593 NR Description: unknown protein; protein id: At3g12770.1
  misc_feature (1)..(483): Homolog of NCBI NO: 15226200 NR Description: putative selenium-binding protein; protein id:
  misc_feature (1)..(483): Homolog of NCBI NO: 15223099 NR Description: unknown protein; protein id: At1g08070.1 thaliana] >gi|8778839|gb|AAF79838.1|AC026875_18 T6D22.15
  misc_feature (1)..(483): Homolog of NCBI NO: 34915012 NR Description: P0458A05.10 [Oryza sativa (japonica
  misc_feature (1)..(483): Homolog of NCBI NO: 15232837 NR Description: hypothetical protein; protein id: At3g02010.1 thaliana] >gi|6091739|gb|AAF03451.1|AC010797_27 hypothetical [Arabidopsis thaliana] >gi|6513930|gb|AAF14834.1|AC011664_16
  misc_feature (1)..(483): Homolog of NCBI NO: 21741755 NR Description: OSJNBa0060B20.9 [Oryza sativa (japonica
  misc_feature (1)..(483): Homolog of NCBI NO: 15220337 NR Description: hypothetical protein; protein id: At1g11290.1
  misc_feature (1)..(483): Homolog of NCBI NO: 15231617 NR Description: unknown protein; protein id: At3g26780.1
MVEMGVKPDSYFIVQVLSACVHVGDLDSGEWIVKYMEEMEMQKNSFVRTTLVNLYAKCGKMEKARSVFDSMVEKDIVTWSTMIQGYASNSFPKEGIELFLQMLQENLKPDQFSIVGFLSSCASLGALDLGEWGISLIDRHEFLTNLFMANALIDMYAKCGAMARGFEVFKEMKEKDIVIMNAAISGLAKNGHVKLSFAVFGQTEKLGISPDGSTFLGLLCGCVHAGLIQDGLRFFNAISCVYALKRTVEHYGCMVDLWGRAGMLDDAYRLICDMPMRPNAIVWGALLSGCRLVKDTQLAETVLKELIALEPWNAGNYVQLSNIYSVGGRWDEAAEVRDMMNKKGMKKIPGYSWIELEGKVHEFLADDKSHPLSDKIYAKLEDLGNEMRLMGFVPTTEFVFFDVEEEEKERVLGYHSEKLAVALGLISTDHGQVIRVVKNLRVCGDCHEVMKLISKITRREIVVRDNNRFHCFTNGSCSCNDYW

SEQ ID NO: 80394 - DNA, 2082 bp, Arabidopsis thaliana
  misc_feature (1)..(2082): Ceres Seq. ID no. 12655593
  misc_feature: MA Experiment ID: 20000182 Result: Up-regulated in Transcription
  misc_feature: MA Experiment 20000182 PARAMETER Experiment Name: At_2mM_SA_P Parameter: Age (day) Value: 14
  misc_feature: MA Experiment 20000182 PARAMETER Experiment Name: At_2mM_SA_P Parameter: Organism Value: A. thaliana
  misc_feature: MA Experiment 20000182 PARAMETER Experiment Name: At_2mM_SA_P Parameter: Plant Line Value: WS
  misc_feature: MA Experiment 20000182 PARAMETER Experiment Name: At_2mM_SA_P Parameter: Timepoint (hr) Value: 6
  misc_feature: MA Experiment 20000182 PARAMETER Experiment Name: At_2mM_SA_P Parameter: Tissue Value: Aerial
  misc_feature: MA Experiment 20000182 PARAMETER Experiment Name: At_2mM_SA_P Parameter: Treatment Value: 2mM SA vs. No Treatment
  misc_feature: MA Experiment ID: 20000185 Result: Down-regulated in Transcription
  misc_feature: MA Experiment 20000185 PARAMETER Experiment Name: At_Roots__P Parameter: Age (day) Value: 7 vs. 21
  misc_feature: MA Experiment 20000185 PARAMETER Experiment Name: At_Roots__P Parameter: Organism Value: A. thaliana
  misc_feature: MA Experiment 20000185 PARAMETER Experiment Name: At_Roots__P Parameter: Tissue Value: Roots vs. Whole Plant
  misc_feature: MA Experiment ID: 20000234 Result: Down-regulated in Transcription
  misc_feature: MA Experiment 20000234 PARAMETER Experiment Name: At_Siliques_P Parameter: Age (day) Value: 21
  misc_feature: MA Experiment 20000234 PARAMETER Experiment Name: At_Siliques_P Parameter: Organism Value: A. thaliana
  misc_feature: MA Experiment 20000234 PARAMETER Experiment Name: At_Siliques_P Parameter: Plant Line Value: WS
  misc_feature: MA Experiment 20000234 PARAMETER Experiment Name: At_Siliques_P Parameter: Tissue Value: Less Than 5mm Siliques vs. Whole Plant
  misc_feature: MA Experiment ID: 20000235 Result: Down-regulated in Transcription
  misc_feature: MA Experiment 20000235 PARAMETER Experiment Name: At_Siliques_P Parameter: Age (day) Value: 21
  misc_feature: MA Experiment 20000235 PARAMETER Experiment Name: At_Siliques_P Parameter: Organism Value: A. thaliana
  misc_feature: MA Experiment 20000235 PARAMETER Experiment Name: At_Siliques_P Parameter: Plant Line Value: WS
  misc_feature: MA Experiment 20000235 PARAMETER Experiment Name: At_Siliques_P Parameter: Tissue Value: 5-10mm Siliques vs. Whole Plant
  misc_feature: MA Experiment ID: 20000265 Result: Down-regulated in Transcription
  misc_feature: MA Experiment 20000265 PARAMETER Experiment Name: At_Open_Flower_P Parameter: Age (day) Value: 21
  misc_feature: MA Experiment 20000265 PARAMETER Experiment Name: At_Open_Flower_P Parameter: Plant Line Value: WS
  misc_feature: MA Experiment 20000265 PARAMETER Experiment Name: At_Open_Flower_P Parameter: Tissue Value: Closed Flower vs. Whole Plant
  misc_feature: MA Experiment ID: 20000286 Result: Down-regulated in Transcription
  misc_feature: MA Experiment 20000286 PARAMETER Experiment Name: At_Open_Flower_P Parameter: Age (day) Value: 21
  misc_feature: MA Experiment 20000286 PARAMETER Experiment Name: At_Open_Flower_P Parameter: Plant Line Value: WS
  misc_feature: MA Experiment 20000286 PARAMETER Experiment Name: At_Open_Flower_P Parameter: Tissue Value: Half Open vs. Whole Plant
  misc_feature: MA Experiment ID: 20000439 Result: Down-regulated in Transcription
  misc_feature: MA Experiment 20000439 PARAMETER Experiment Name: At_Roots__P Parameter: Age (day) Value: 14 vs. 21
  misc_feature: MA Experiment 20000439 PARAMETER Experiment Name: At_Roots__P Parameter: Organism Value: A. thaliana
  misc_feature: MA Experiment 20000439 PARAMETER Experiment Name: At_Roots__P Parameter: Tissue Value: Roots vs. Whole Plant
  misc_feature: MA Experiment ID: 20000453 Result: Up-regulated in Transcription
  misc_feature: MA Experiment 20000453 PARAMETER Experiment Name: At_100uM_ABA_P Parameter: Age (day) Value: 15
  misc_feature: MA Experiment 20000453 PARAMETER Experiment Name: At_100uM_ABA_P Parameter: Organism Value: A. thaliana
  misc_feature: MA Experiment 20000453 PARAMETER Experiment Name: At_100uM_ABA_P Parameter: Plant Line Value: WS
  misc_feature: MA Experiment 20000453 PARAMETER Experiment Name: At_100uM_ABA_P Parameter: Timepoint (hr) Value: 24
  misc_feature: MA Experiment 20000453 PARAMETER Experiment Name: At_100uM_ABA_P Parameter: Tissue Value: Aerial
  misc_feature: MA Experiment 20000453 PARAMETER Experiment Name: At_100uM_ABA_P Parameter: Treatment Value: 100uM ABA vs. No Treatment
  misc_feature: MA Experiment ID: 20000495 Result: Down-regulated in Transcription
  misc_feature: MA Experiment 20000495 PARAMETER Experiment Name: At_Guard_Cells_P Parameter: Harvest Date Value: 8/2/2002
  misc_feature: MA Experiment 20000495 PARAMETER Experiment Name: At_Guard_Cells_P Parameter: Organism Value: A. thaliana
  misc_feature: MA Experiment 20000495 PARAMETER Experiment Name: At_Guard_Cells_P Parameter: Tissue Value: Guard Cells vs. Leaves
  misc_feature: MA Experiment ID: 20000527 Result: Down-regulated in Transcription
  misc_feature: MA Experiment 20000527 PARAMETER Experiment Name: At_10percent_PEG_P Parameter: Age (day) Value: 20
  misc_feature: MA Experiment 20000527 PARAMETER Experiment Name: At_10percent_PEG_P Parameter: Organism Value: A. thaliana
  misc_feature: MA Experiment 20000527 PARAMETER Experiment Name: At_10percent_PEG_P Parameter: Plant Line Value: WS
  misc_feature: MA Experiment 20000527 PARAMETER Experiment Name: At_10percent_PEG_P Parameter: Timepoint (day) Value: 20
  misc_feature: MA Experiment 20000527 PARAMETER Experiment Name: At_10percent_PEG_P Parameter: Tissue Value: Whole Plant
  misc_feature: MA Experiment 20000527 PARAMETER Experiment Name: At_10percent_PEG_P Parameter: Treatment Value: 10percent PEG vs. No Treatment
  misc_feature: MA Experiment ID: 20001558 Result: Down-regulated in Transcription
  misc_feature: MA Experiment 20001558 PARAMETER Experiment Name: At_Drought_Soil_Dry_P Parameter: Age (day) Value: 27
  misc_feature: MA Experiment 20001558 PARAMETER Experiment Name: At_Drought_Soil_Dry_P Parameter: Organism Value: A. thaliana
  misc_feature: MA Experiment 20001558 PARAMETER Experiment Name: At_Drought_Soil_Dry_P Parameter: Plant Line Value: WS
  misc_feature: MA Experiment 20001558 PARAMETER Experiment Name: At_Drought_Soil_Dry_P Parameter: Post Timepoint (hr) Value: 6
  misc_feature: MA Experiment 20001558 PARAMETER Experiment Name: At_Drought_Soil_Dry_P Parameter: Post-Treatment Value: Re-Water vs. No Drought
  misc_feature: MA Experiment 20001558 PARAMETER Experiment Name: At_Drought_Soil_Dry_P Parameter: Timepoint (day) Value: 13
  misc_feature: MA Experiment 20001558 PARAMETER Experiment Name: At_Drought_Soil_Dry_P Parameter: Treatment Value: Drought vs. No Drought
  misc_feature: MA Experiment ID: 20001560 Result: Down-regulated in Transcription
  misc_feature: MA Experiment 20001560 PARAMETER Experiment Name: At_Drought_Soil_Dry_P Parameter: Age (day) Value: 28
  misc_feature: MA Experiment 20001560 PARAMETER Experiment Name: At_Drought_Soil_Dry_P Parameter: Organism Value: A. thaliana
  misc_feature: MA Experiment 20001560 PARAMETER Experiment Name: At_Drought_Soil_Dry_P Parameter: Plant Line Value: WS
  misc_feature: MA Experiment 20001560 PARAMETER Experiment Name: At_Drought_Soil_Dry_P Parameter: Post Timepoint (hr) Value: None
  misc_feature: MA Experiment 20001560 PARAMETER Experiment Name: At_Drought_Soil_Dry_P Parameter: Post-Treatment Value: None
  misc_feature: MA Experiment 20001560 PARAMETER Experiment Name: At_Drought_Soil_Dry_P Parameter: Timepoint (day) Value: 14
  misc_feature: MA Experiment 20001560 PARAMETER Experiment Name: At_Drought_Soil_Dry_P Parameter: Treatment Value: Drought vs. No Drought
atgggcatagcaagatccataaactcgttcatgttcttcttctttctaatgatattatcaaacgcttctaaaagctctgttcttgctgaggccacgacagcgaaattcacattcataggtttcaaagaaaaccaaacggatattcaaacagaaggagcttccacaatccaacacgacaatgatcttcttagactaactaatcggaaacaaaacgtcactggaacagcgttttaccgcaaaccaatcagattgcgtgagttaaccaattcctccgatatcaaagtttgttcctttagcacttctttcgtcttcgtcatactcccttcaagtcccggcaacggtggttttggtttcacgttcacactttctccgaccccgaatcgtccaggagccgaatctgcacagtatttgggtctgttgaacagaaccaacaacggtaatccatcgaatcacgtattcgcagtggaattcgacacggtacaaggatttaaagacggcgcagacagaagaggaaaccacatcggtcttaatttcaacaacctctcctccaatgtacaagaaccactcatttactacgacacagaggatcgaaaggaagattttcagctcgagagcggcgaaccaatccgagttcttatcgattacgacggatccagcgaaaccttaaacgttacaatctatccgacgagattagagtttaaacccaagaagcctctaatctcgcgacgagtttcagagctgtcggagattgtgaaggatgaaatgtacgtcggattcaccgccgcgactggaaaagaccagtcgagtgctcactatgtaatgggttggagtttttcaagctgcggagaaaatccaatggcggattggctcgagatctcgcggcttcctcctccacctcgcttgagtaacaagaaaggttacaattctcaagtcattgttttgattgttgctttatcgatcgtcacactggtcttgcttgtgttactatttatatttgtgatgtacaaaaggcgaatccaagaagaagatactctagaggattgggagattgattatcctcataggtttagatacagagatctctacttagcaacgaagaaattcaaagagagtgagattatcggtactggaggatttggaatcgtttacagaggaaatctatcttcttcgggtccaatcgcagtgaagaagataacctcaaatagcttacaaggtgttcgagaatttatggcagagatcgagagtttaggaagattaggtcataagaacctcgtgaatcttcaaggatggtgcaaacacaagaacgagctcttgttaatttacgattatatacccaacggaagtctcgactcgttgctgtaccaaacgccgagaagaaacggcatcgtgttgccgtgggacgtgcgtttcgagatcataaagggaatcgcgtcgggactgttgtaccttcatgaggaatgggaacagatcgtggttcatagagacgtgaaaccgagcaatgttcttattgatgaagatatgaacgctaaattaggcgattttggactcgcgaggctttatgaacgcggaacgttaacgcagaccacgaaaatcgttggcactttagggtacatggcgcctgagctcacacgtaacggtaaaggctcaaccgcgtctgacgttttcgcgtttggcgttttgttgttagaaatagtgtgtgggaataaaccaacgaatgcagagaacttcttcttagctgattgggtaatggaatttcatactaatggtggaatcctttgcgtcgtggatcagaatctcgggtctagtttcaatggcagagaggctaaactagctcttgttgtggggttactatgttgccatcagaaaccaaaatttaggccatcgatgagaatggtgcttagatatttgaatggtgaagagaatgttccacagattgatgaaaattggggattctcggattcttcgagagacgatcataaatcgaatgttgtaggttatgtttcgtctgatagagcctcgagctcgaatactttttcgtctttctccaatgtttcttcaagctctatcgttagtggtagatag

SEQ ID NO: 80395 - protein, 693 aa, Arabidopsis thaliana
  peptide (1)..(693): Ceres Seq. ID no. 12655594
  misc_feature (11)..(693): Homolog of NCBI NO: 15241007 NR Description: receptor like protein kinase; protein id:
  misc_feature (1)..(693): Homolog of NCBI NO: 30679315 NR Description: receptor lectin kinase, putative [Arabidopsis
  misc_feature (16)..(693): Homolog of NCBI NO: 11346438 NR Description: receptor like protein kinase - Arabidopsis >gi|7327815|emb|CAB82272.1| receptor like protein kinase
  misc_feature (1)..(685): Homolog of NCBI NO: 15241006 NR Description: receptor like protein kinase; protein id: supported by cDNA: gi_13605542 [Arabidopsis thaliana]
  misc_feature (27)..(693): Homolog of NCBI NO: 37536406 NR Description: putative receptor-like protein kinase [Oryza
  misc_feature (27)..(693): Homolog of NCBI NO: 15232332 NR Description: serine/threonine-specific kinase like protein;
  misc_feature (40)..(693): Homolog of NCBI NO: 15224347 NR Description: putative receptor-like protein kinase; protein At2g37710.1, supported by cDNA: gi_20259540 [Arabidopsis
  misc_feature (27)..(693): Homolog of NCBI NO: 28416699 NR Description: At3g53810 [Arabidopsis thaliana]
  misc_feature (40)..(645): Homolog of NCBI NO: 11346411 NR Description: receptor-type protein kinase LRK1 [imported] - thaliana >gi|1418331|emb|CAA65153.1| receptor like protein kinase
  misc_feature (11)..(693): Homolog of NCBI NO: 18411935 NR Description: contains similarity to a protein kinase domain pkinase.hmm, score: 166.20) and to legume lectins beta domain lectin_legB.hmm, score: 139.32); protein id: At4g02410.1,
MGIARSINSFMFFFFLMILSNASKSSVLAEATTAKFTFIGFKENQTDIQTEGASTIQHDNDLLRLTNRKQNVTGTAFYRKPIRLRELTNSSDIKVCSFSTSFVFVILPSSPGNGGFGFTFTLSPTPNRPGAESAQYLGLLNRTNNGNPSNHVFAVEFDTVQGFKDGADRRGNHIGLNFNNLSSNVQEPLIYYDTEDRKEDFQLESGEPIRVLIDYDGSSETLNVTIYPTRLEFKPKKPLISRRVSELSEIVKDEMYVGFTAATGKDQSSAHYVMGWSFSSCGENPMADWLEISRLPPPPRLSNKKGYNSQVIVLIVALSIVTLVLLVLLFIFVMYKRRIQEEDTLEDWEIDYPHRFRYRDLYLATKKFKESEIIGTGGFGIVYRGNLSSSGPIAVKKITSNSLQGVREFMAEIESLGRLGHKNLVNLQGWCKHKNELLLIYDYIPNGSLDSLLYQTPRRNGIVLPWDVRFEIIKGIASGLLYLHEEWEQIVVHRDVKPSNVLIDEDMNAKLGDFGLARLYERGTLTQTTKIVGTLGYMAPELTRNGKGSTASDVFAFGVLLLEIVCGNKPTNAENFFLADWVMEFHTNGGILCVVDQNLGSSFNGREAKLALVVGLLCCHQKPKFRPSMRMVLRYLNGEENVPQIDENWGFSDSSRDDHKSNVVGYVSSDRASSSNTFSSFSNVSSSSIVSGR

SEQ ID NO: 80396 - protein, 683 aa, Arabidopsis thaliana
  peptide (1)..(683): Ceres Seq. ID no. 12655595
  misc_feature (1)..(683): Homolog of NCBI NO: 15241007 NR Description: receptor like protein kinase; protein id:
  misc_feature (1)..(683): Homolog of NCBI NO: 30679315 NR Description: receptor lectin kinase, putative [Arabidopsis
  misc_feature (6)..(683): Homolog of NCBI NO: 11346438 NR Description: receptor like protein kinase - Arabidopsis >gi|7327815|emb|CAB82272.1| receptor like protein kinase
  misc_feature (1)..(675): Homolog of NCBI NO: 15241006 NR Description: receptor like protein kinase; protein id: supported by cDNA: gi_13605542 [Arabidopsis thaliana]
  misc_feature (17)..(683): Homolog of NCBI NO: 37536406 NR Description: putative receptor-like protein kinase [Oryza
  misc_feature (17)..(683): Homolog of NCBI NO: 15232332 NR Description: serine/threonine-specific kinase like protein;
  misc_feature (30)..(683): Homolog of NCBI NO: 15224347 NR Description: putative receptor-like protein kinase; protein At2g37710.1, supported by cDNA: gi_20259540 [Arabidopsis
  misc_feature (17)..(683): Homolog of NCBI NO: 28416699 NR Description: At3g53810 [Arabidopsis thaliana]
  misc_feature (30)..(635): Homolog of NCBI NO: 11346411 NR Description: receptor-type protein kinase LRK1 [imported] - thaliana >gi|1418331|emb|CAA65153.1| receptor like protein kinase
  misc_feature (1)..(683): Homolog of NCBI NO: 18411935 NR Description: contains similarity to a protein kinase domain pkinase.hmm, score: 166.20) and to legume lectins beta domain lectin_legB.hmm, score: 139.32); protein id: At4g02410.1,
MFFFFLMILSNASKSSVLAEATTAKFTFIGFKENQTDIQTEGASTIQHDNDLLRLTNRKQNVTGTAFYRKPIRLRELTNSSDIKVCSFSTSFVFVILPSSPGNGGFGFTFTLSPTPNRPGAESAQYLGLLNRTNNGNPSNHVFAVEFDTVQGFKDGADRRGNHIGLNFNNLSSNVQEPLIYYDTEDRKEDFQLESGEPIRVLIDYDGSSETLNVTIYPTRLEFKPKKPLISRRVSELSEIVKDEMYVGFTAATGKDQSSAHYVMGWSFSSCGENPMADWLEISRLPPPPRLSNKKGYNSQVIVLIVALSIVTLVLLVLLFIFVMYKRRIQEEDTLEDWEIDYPHRFRYRDLYLATKKFKESEIIGTGGFGIVYRGNLSSSGPIAVKKITSNSLQGVREFMAEIESLGRLGHKNLVNLQGWCKHKNELLLIYDYIPNGSLDSLLYQTPRRNGIVLPWDVRFEIIKGIASGLLYLHEEWEQIVVHRDVKPSNVLIDEDMNAKLGDFGLARLYERGTLTQTTKIVGTLGYMAPELTRNGKGSTASDVFAFGVLLLEIVCGNKPTNAENFFLADWVMEFHTNGGILCVVDQNLGSSFNGREAKLALVVGLLCCHQKPKFRPSMRMVLRYLNGEENVPQIDENWGFSDSSRDDHKSNVVGYVSSDRASSSNTFSSFSNVSSSSIVSGR

SEQ ID NO: 80397 - protein, 677 aa, Arabidopsis thaliana
  peptide (1)..(677): Ceres Seq. ID no. 12655596
  misc_feature (1)..(677): Homolog of NCBI NO: 15241007 NR Description: receptor like protein kinase; protein id:
  misc_feature (1)..(677): Homolog of NCBI NO: 30679315 NR Description: receptor lectin kinase, putative [Arabidopsis
  misc_feature (1)..(677): Homolog of NCBI NO: 11346438 NR Description: receptor like protein kinase - Arabidopsis >gi|7327815|emb|CAB82272.1| receptor like protein kinase
  misc_feature (1)..(669): Homolog of NCBI NO: 15241006 NR Description: receptor like protein kinase; protein id: supported by cDNA: gi_13605542 [Arabidopsis thaliana]
  misc_feature (11)..(677): Homolog of NCBI NO: 37536406 NR Description: putative receptor-like protein kinase [Oryza
  misc_feature (11)..(677): Homolog of NCBI NO: 15232332 NR Description: serine/threonine-specific kinase like protein;
  misc_feature (24)..(677): Homolog of NCBI NO: 15224347 NR Description: putative receptor-like protein kinase; protein At2g37710.1, supported by cDNA: gi_20259540 [Arabidopsis
  misc_feature (11)..(677): Homolog of NCBI NO: 28416699 NR Description: At3g53810 [Arabidopsis thaliana]
  misc_feature (24)..(629): Homolog of NCBI NO: 11346411 NR Description: receptor-type protein kinase LRK1 [imported] - thaliana >gi|1418331|emb|CAA65153.1| receptor like protein kinase
  misc_feature (1)..(677): Homolog of NCBI NO: 18411935 NR Description: contains similarity to a protein kinase domain pkinase.hmm, score: 166.20) and to legume lectins beta domain lectin_legB.hmm, score: 139.32); protein id: At4g02410.1,
MILSNASKSSVLAEATTAKFTFIGFKENQTDIQTEGASTIQHDNDLLRLTNRKQNVTGTAFYRKPIRLRELTNSSDIKVCSFSTSFVFVILPSSPGNGGFGFTFTLSPTPNRPGAESAQYLGLLNRTNNGNPSNHVFAVEFDTVQGFKDGADRRGNHIGLNFNNLSSNVQEPLIYYDTEDRKEDFQLESGEPIRVLIDYDGSSETLNVTIYPTRLEFKPKKPLISRRVSELSEIVKDEMYVGFTAATGKDQSSAHYVMGWSFSSCGENPMADWLEISRLPPPPRLSNKKGYNSQVIVLIVALSIVTLVLLVLLFIFVMYKRRIQEEDTLEDWEIDYPHRFRYRDLYLATKKFKESEIIGTGGFGIVYRGNLSSSGPIAVKKITSNSLQGVREFMAEIESLGRLGHKNLVNLQGWCKHKNELLLIYDYIPNGSLDSLLYQTPRRNGIVLPWDVRFEIIKGIASGLLYLHEEWEQIVVHRDVKPSNVLIDEDMNAKLGDFGLARLYERGTLTQTTKIVGTLGYMAPELTRNGKGSTASDVFAFGVLLLEIVCGNKPTNAENFFLADWVMEFHTNGGILCVVDQNLGSSFNGREAKLALVVGLLCCHQKPKFRPSMRMVLRYLNGEENVPQIDENWGFSDSSRDDHKSNVVGYVSSDRASSSNTFSSFSNVSSSSIVSGR

SEQ ID NO: 80398 - DNA, 2064 bp, Arabidopsis thaliana
  misc_feature (1)..(2064): Ceres Seq. ID no. 12655608
  misc_feature: MA Experiment ID: 20000184 Result: Up-regulated in Transcription
  misc_feature: MA Experiment 20000184 PARAMETER Experiment Name: At_Shoots__P Parameter: Age (day) Value: 7
  misc_feature: MA Experiment 20000184 PARAMETER Experiment Name: At_Shoots__P Parameter: Tissue Value: Shoots vs. Whole Plant
atggtcgtgttcccaaagtcgctgtcacccaaacacgtccttaagctcttgaaatcggagaagaacccgcgtgcggcttttgctctattcgattcggcgactcgccatccaggctatgcacactccgccgtcgtttaccaccatatcctccgacgtctctcggagacgcggatggttaatcatgtaagtcgaatcgtcgagcttattaggtcacaagaatgtaaatgcgacgaagatgtcgctttatcggttatcaaaacctacggaaagaactccatgcctgatcaagctctagatgttttcaaacgaatgcgagagattttcgggtgcgagcctgcgattcgatcttataacactctacttaatgcgttcgtggaggcgaaacaatgggttaaagtcgagtccttgttcgcctacttcgagactgctggagtggcgccaaatctgcagacgtataatgttttgattaaaatgtcttgtaagaagaaggagttcgagaaagcgagagggtttctagattggatgtggaaagaggggtttaagcctgatgtgtttagttacagcactgtgatcaacgatcttgctaaagctgggaaattggatgatgcactggaactgttcgatgaaatgtctgaaagaggagtggcacctgatgtcacgtgttataatatcttaattgatgggtttcttaaggaaaaagatcacaagacggctatggaactgtgggacagactgttggaggactcttctgtttatccgaatgttaagactcacaacatcatgattagtggtttgagcaaatgcggaagagtagatgattgtttaaagatatgggagagaatgaaacaaaatgagcgtgaaaaagatttatatacatatagcagtttgatacatgggctgtgcgatgcaggtaatgttgataaggctgaaagtgtgtttaatgagttggacgaaaggaaagcctcgattgatgtggttacatacaatactatgcttggtgggttttgccgttgtgggaaaattaaggagagtttggagttgtggagaatcatggagcacaagaattcagttaacatagtgagttataacattttgattaaagggttgttggagaatgggaagatcgatgaagcaacaatgatttggaggcttatgcctgccaagggctatgcagctgacaaaactacttacggtatttttattcacgggttatgtgtgaatggttatgtgaataaagccttgggggtgatgcaagaggtggagagcagtggtgggcatctggatgtttatgcatatgcgtcaattatagactgtttgtgcaaaaagaaaagattagaagaagcgtcaaatttggtaaaagagatgagtaagcatggcgtggagctaaattctcatgtctgtaatgcattaataggtggtttaatccgagactcaagacttggtgaggcttccttttttctgagagagatggggaagaacggttgtcgcccgactgttgtatcctacaacattcttatttgcggtttgtgtaaagcagggaaatttggtgaagcatctgcttttgtgaaagaaatgcttgaaaacggatggaaaccagatctgaaaacttatagtatactcttatgtggtctttgccgcgacaggaagatcgatttggcccttgaattgtggcaccaatttcttcaatcgggactcgaaaccgatgtgatgatgcataacatactaattcatggtctgtgctctgttgggaaacttgatgatgcaatgactgtcatggcaaatatggagcatcggaattgcactgcaaatcttgtaacctacaacaccttgatggaaggattcttcaaagttggagatagcaacagagccacagtgatttggggttacatgtacaagatggggttgcaacctgatattatatcctacaatactataatgaaagggttgtgtatgtgccgcggagtgtcgtatgctatggaattctttgatgatgctagaaaccatggcatttttccaactgtttacacctggaacatacttgttcgagctgtcgtgaatcgctaa

SEQ ID NO: 80399 - protein, 687 aa, Arabidopsis thaliana
  peptide (1)..(687): Ceres Seq. ID no. 12655609
  misc_feature (150)..(184): Pfam Name: PPR repeat Pfam Description: PPR repeat
  misc_feature (10)..(685): Homolog of NCBI NO: 34908368 NR Description: P0529E05.10 [Oryza sativa (japonica
  misc_feature (13)..(649): Homolog of NCBI NO: 15231863 NR Description: putative protein; protein id: At3g53700.1, by cDNA: gi_15982930 [Arabidopsis thaliana]
  misc_feature (8)..(649): Homolog of NCBI NO: 15237662 NR Description: putative protein; protein id: At5g64320.1
  misc_feature (13)..(683): Homolog of NCBI NO: 15227371 NR Description: hypothetical protein; protein id: At2g17140.1
  misc_feature (7)..(649): Homolog of NCBI NO: 15238505 NR Description: putative protein; protein id: At5g65560.1
  misc_feature (8)..(676): Homolog of NCBI NO: 15221300 NR Description: hypothetical protein; protein id: At1g74580.1
  misc_feature (94)..(649): Homolog of NCBI NO: 30840221 NR Description: fertility restorer [Raphanus sativus]
  misc_feature (94)..(649): Homolog of NCBI NO: 30840327 NR Description: fertility restorer homologue [Raphanus sativus]
  misc_feature (6)..(649): Homolog of NCBI NO: 34896698 NR Description: putative pentatricopeptide repeat protein [Oryza
  misc_feature (141)..(664): Homolog of NCBI NO: 15221610 NR Description: hypothetical protein; protein id: At1g62860.1
MVVFPKSLSPKHVLKLLKSEKNPRAAFALFDSATRHPGYAHSAVVYHHILRRLSETRMVNHVSRIVELIRSQECKCDEDVALSVIKTYGKNSMPDQALDVFKRMREIFGCEPAIRSYNTLLNAFVEAKQWVKVESLFAYFETAGVAPNLQTYNVLIKMSCKKKEFEKARGFLDWMWKEGFKPDVFSYSTVINDLAKAGKLDDALELFDEMSERGVAPDVTCYNILIDGFLKEKDHKTAMELWDRLLEDSSVYPNVKTHNIMISGLSKCGRVDDCLKIWERMKQNEREKDLYTYSSLIHGLCDAGNVDKAESVFNELDERKASIDVVTYNTMLGGFCRCGKIKESLELWRIMEHKNSVNIVSYNILIKGLLENGKIDEATMIWRLMPAKGYAADKTTYGIFIHGLCVNGYVNKALGVMQEVESSGGHLDVYAYASIIDCLCKKKRLEEASNLVKEMSKHGVELNSHVCNALIGGLIRDSRLGEASFFLREMGKNGCRPTVVSYNILICGLCKAGKFGEASAFVKEMLENGWKPDLKTYSILLCGLCRDRKIDLALELWHQFLQSGLETDVMMHNILIHGLCSVGKLDDAMTVMANMEHRNCTANLVTYNTLMEGFFKVGDSNRATVIWGYMYKMGLQPDIISYNTIMKGLCMCRGVSYAMEFFDDARNHGIFPTVYTWNILVRAVVNR

SEQ ID NO: 80400 - protein, 630 aa, Arabidopsis thaliana
  peptide (1)..(630): Ceres Seq. ID no. 12655610
  misc_feature (93)..(127): Pfam Name: PPR repeat Pfam Description: PPR repeat
  misc_feature (1)..(628): Homolog of NCBI NO: 34908368 NR Description: P0529E05.10 [Oryza sativa (japonica
  misc_feature (1)..(592): Homolog of NCBI NO: 15231863 NR Description: putative protein; protein id: At3g53700.1, by cDNA: gi_15982930 [Arabidopsis thaliana]
  misc_feature (1)..(592): Homolog of NCBI NO: 15237662 NR Description: putative protein; protein id: At5g64320.1
  misc_feature (1)..(626): Homolog of NCBI NO: 15227371 NR Description: hypothetical protein; protein id: At2g17140.1
  misc_feature (1)..(592): Homolog of NCBI NO: 15238505 NR Description: putative protein; protein id: At5g65560.1
  misc_feature (1)..(619): Homolog of NCBI NO: 15221300 NR Description: hypothetical protein; protein id: At1g74580.1
  misc_feature (37)..(592): Homolog of NCBI NO: 30840221 NR Description: fertility restorer [Raphanus sativus]
  misc_feature (37)..(592): Homolog of NCBI NO: 30840327 NR Description: fertility restorer homologue [Raphanus sativus]
  misc_feature (1)..(592): Homolog of NCBI NO: 34896698 NR Description: putative pentatricopeptide repeat protein [Oryza
  misc_feature (84)..(607): Homolog of NCBI NO: 15221610 NR Description: hypothetical protein; protein id: At1g62860.1
MVNHVSRIVELIRSQECKCDEDVALSVIKTYGKNSMPDQALDVFKRMREIFGCEPAIRSYNTLLNAFVEAKQWVKVESLFAYFETAGVAPNLQTYNVLIKMSCKKKEFEKARGFLDWMWKEGFKPDVFSYSTVINDLAKAGKLDDALELFDEMSERGVAPDVTCYNILIDGFLKEKDHKTAMELWDRLLEDSSVYPNVKTHNIMISGLSKCGRVDDCLKIWERMKQNEREKDLYTYSSLIHGLCDAGNVDKAESVFNELDERKASIDVVTYNTMLGGFCRCGKIKESLELWRIMEHKNSVNIVSYNILIKGLLENGKIDEATMIWRLMPAKGYAADKTTYGIFIHGLCVNGYVNKALGVMQEVESSGGHLDVYAYASIIDCLCKKKRLEEASNLVKEMSKHGVELNSHVCNALIGGLIRDSRLGEASFFLREMGKNGCRPTVVSYNILICGLCKAGKFGEASAFVKEMLENGWKPDLKTYSILLCGLCRDRKIDLALELWHQFLQSGLETDVMMHNILIHGLCSVGKLDDAMTVMANMEHRNCTANLVTYNTLMEGFFKVGDSNRATVIWGYMYKMGLQPDIISYNTIMKGLCMCRGVSYAMEFFDDARNHGIFPTVYTWNILVRAVVNR

SEQ ID NO: 80401 - protein, 595 aa, Arabidopsis thaliana
  peptide (1)..(595): Ceres Seq. ID no. 12655611
  misc_feature (58)..(92): Pfam Name: PPR repeat Pfam Description: PPR repeat
  misc_feature (1)..(593): Homolog of NCBI NO: 34908368 NR Description: P0529E05.10 [Oryza sativa (japonica
  misc_feature (1)..(557): Homolog of NCBI NO: 15231863 NR Description: putative protein; protein id: At3g53700.1, by cDNA: gi_15982930 [Arabidopsis thaliana]
  misc_feature (1)..(557): Homolog of NCBI NO: 15237662 NR Description: putative protein; protein id: At5g64320.1
  misc_feature (1)..(591): Homolog of NCBI NO: 15227371 NR Description: hypothetical protein; protein id: At2g17140.1
  misc_feature (1)..(557): Homolog of NCBI NO: 15238505 NR Description: putative protein; protein id: At5g65560.1
  misc_feature (1)..(584): Homolog of NCBI NO: 15221300 NR Description: hypothetical protein; protein id: At1g74580.1
  misc_feature (2)..(557): Homolog of NCBI NO: 30840221 NR Description: fertility restorer [Raphanus sativus]
  misc_feature (2)..(557): Homolog of NCBI NO: 30840327 NR Description: fertility restorer homologue [Raphanus sativus]
  misc_feature (1)..(557): Homolog of NCBI NO: 34896698 NR Description: putative pentatricopeptide repeat protein [Oryza
  misc_feature (49)..(572): Homolog of NCBI NO: 15221610 NR Description: hypothetical protein; protein id: At1g62860.1
MPDQALDVFKRMREIFGCEPAIRSYNTLLNAFVEAKQWVKVESLFAYFETAGVAPNLQTYNVLIKMSCKKKEFEKARGFLDWMWKEGFKPDVFSYSTVINDLAKAGKLDDALELFDEMSERGVAPDVTCYNILIDGFLKEKDHKTAMELWDRLLEDSSVYPNVKTHNIMISGLSKCGRVDDCLKIWERMKQNEREKDLYTYSSLIHGLCDAGNVDKAESVFNELDERKASIDVVTYNTMLGGFCRCGKIKESLELWRIMEHKNSVNIVSYNILIKGLLENGKIDEATMIWRLMPAKGYAADKTTYGIFIHGLCVNGYVNKALGVMQEVESSGGHLDVYAYASIIDCLCKKKRLEEASNLVKEMSKHGVELNSHVCNALIGGLIRDSRLGEASFFLREMGKNGCRPTVVSYNILICGLCKAGKFGEASAFVKEMLENGWKPDLKTYSILLCGLCRDRKIDLALELWHQFLQSGLETDVMMHNILIHGLCSVGKLDDAMTVMANMEHRNCTANLVTYNTLMEGFFKVGDSNRATVIWGYMYKMGLQPDIISYNTIMKGLCMCRGVSYAMEFFDDARNHGIFPTVYTWNILVRAVVNR

SEQ ID NO: 80402 - DNA, 2058 bp, Arabidopsis thaliana
  misc_feature (1)..(2058): Ceres Seq. ID no. 12655612
  misc_feature: MA Experiment ID: 20000185 Result: Up-regulated in Transcription
  misc_feature: MA Experiment 20000185 PARAMETER Experiment Name: At_Roots__P Parameter: Age (day) Value: 7 vs. 21
  misc_feature: MA Experiment 20000185 PARAMETER Experiment Name: At_Roots__P Parameter: Organism Value: A. thaliana
  misc_feature: MA Experiment 20000185 PARAMETER Experiment Name: At_Roots__P Parameter: Tissue Value: Roots vs. Whole Plant
  misc_feature: MA Experiment ID: 20000234 Result: Up-regulated in Transcription
  misc_feature: MA Experiment 20000234 PARAMETER Experiment Name: At_Siliques_P Parameter: Age (day) Value: 21
  misc_feature: MA Experiment 20000234 PARAMETER Experiment Name: At_Siliques_P Parameter: Organism Value: A. thaliana
  misc_feature: MA Experiment 20000234 PARAMETER Experiment Name: At_Siliques_P Parameter: Plant Line Value: WS
  misc_feature: MA Experiment 20000234 PARAMETER Experiment Name: At_Siliques_P Parameter: Tissue Value: Less Than 5mm Siliques vs. Whole Plant
  misc_feature: MA Experiment ID: 20000264 Result: Up-regulated in Transcription
  misc_feature: MA Experiment 20000264 PARAMETER Experiment Name: At_Open_Flower_P Parameter: Age (day) Value: 21
  misc_feature: MA Experiment 20000264 PARAMETER Experiment Name: At_Open_Flower_P Parameter: Plant Line Value: WS
  misc_feature: MA Experiment 20000264 PARAMETER Experiment Name: At_Open_Flower_P Parameter: Tissue Value: Open Flower vs. Whole Plant
  misc_feature: MA Experiment ID: 20000265 Result: Up-regulated in Transcription
  misc_feature: MA Experiment 20000265 PARAMETER Experiment Name: At_Open_Flower_P Parameter: Age (day) Value: 21
  misc_feature: MA Experiment 20000265 PARAMETER Experiment Name: At_Open_Flower_P Parameter: Plant Line Value: WS
  misc_feature: MA Experiment 20000265 PARAMETER Experiment Name: At_Open_Flower_P Parameter: Tissue Value: Closed Flower vs. Whole Plant
  misc_feature: MA Experiment ID: 20000286 Result: Up-regulated in Transcription
  misc_feature: MA Experiment 20000286 PARAMETER Experiment Name: At_Open_Flower_P Parameter: Age (day) Value: 21
  misc_feature: MA Experiment 20000286 PARAMETER Experiment Name: At_Open_Flower_P Parameter: Plant Line Value: WS
  misc_feature: MA Experiment 20000286 PARAMETER Experiment Name: At_Open_Flower_P Parameter: Tissue Value: Half Open vs. Whole Plant
  misc_feature: MA Experiment ID: 20000439 Result: Up-regulated in Transcription
  misc_feature: MA Experiment 20000439 PARAMETER Experiment Name: At_Roots__P Parameter: Age (day) Value: 14 vs. 21
  misc_feature: MA Experiment 20000439 PARAMETER Experiment Name: At_Roots__P Parameter: Organism Value: A. thaliana
  misc_feature: MA Experiment 20000439 PARAMETER Experiment Name: At_Roots__P Parameter: Tissue Value: Roots vs. Whole Plant
  misc_feature: MA Experiment ID: 20000495 Result: Up-regulated in Transcription
  misc_feature: MA Experiment 20000495 PARAMETER Experiment Name: At_Guard_Cells_P Parameter: Harvest Date Value: 8/2/2002
  misc_feature: MA Experiment 20000495 PARAMETER Experiment Name: At_Guard_Cells_P Parameter: Organism Value: A. thaliana
  misc_feature: MA Experiment 20000495 PARAMETER Experiment Name: At_Guard_Cells_P Parameter: Tissue Value: Guard Cells vs. Leaves
  misc_feature: MA Experiment ID: 20001450 Result: Down-regulated in Transcription
  misc_feature: MA Experiment 20001450 PARAMETER Experiment Name: At_Far-red-induction_P Parameter: Age (day) Value: 7
  misc_feature: MA Experiment 20001450 PARAMETER Experiment Name: At_Far-red-induction_P Parameter: Light Value: Far-red vs. White
  misc_feature: MA Experiment 20001450 PARAMETER Experiment Name: At_Far-red-induction_P Parameter: Organism Value: A. thaliana
  misc_feature: MA Experiment 20001450 PARAMETER Experiment Name: At_Far-red-induction_P Parameter: Plant Line Value: Columbia
  misc_feature: MA Experiment 20001450 PARAMETER Experiment Name: At_Far-red-induction_P Parameter: Timepoint (hr) Value: 8
  misc_feature: MA Experiment 20001450 PARAMETER Experiment Name: At_Far-red-induction_P Parameter: Tissue Value: Whole Plant
  misc_feature: MA Experiment ID: 20001458 Result: Up-regulated in Transcription
  misc_feature: MA Experiment 20001458 PARAMETER Experiment Name: At_50mM_NH4NO3_L-to-H_P Parameter: Age (day) Value: Undefined
  misc_feature: MA Experiment 20001458 PARAMETER Experiment Name: At_50mM_NH4NO3_L-to-H_P Parameter: Organism Value: Undefined
  misc_feature: MA Experiment 20001458 PARAMETER Experiment Name: At_50mM_NH4NO3_L-to-H_P Parameter: Plant Line Value: Undefined
  misc_feature: MA Experiment 20001458 PARAMETER Experiment Name: At_50mM_NH4NO3_L-to-H_P Parameter: Timepoint (hr) Value: 2
  misc_feature: MA Experiment 20001458 PARAMETER Experiment Name: At_50mM_NH4NO3_L-to-H_P Parameter: Tissue Value: Siliques
  misc_feature: MA Experiment 20001458 PARAMETER Experiment Name: At_50mM_NH4NO3_L-to-H_P Parameter: Treatment Value: 50mM NH4NO3 vs. 100mM Manitol
  misc_feature: MA Experiment ID: 20001557 Result: Up-regulated in Transcription
  misc_feature: MA Experiment 20001557 PARAMETER Experiment Name: At_Drought_Soil_Dry_P Parameter: Age (day) Value: 27
  misc_feature: MA Experiment 20001557 PARAMETER Experiment Name: At_Drought_Soil_Dry_P Parameter: Organism Value: A. thaliana
  misc_feature: MA Experiment 20001557 PARAMETER Experiment Name: At_Drought_Soil_Dry_P Parameter: Plant Line Value: WS
  misc_feature: MA Experiment 20001557 PARAMETER Experiment Name: At_Drought_Soil_Dry_P Parameter: Post Timepoint (hr) Value: 3
  misc_feature: MA Experiment 20001557 PARAMETER Experiment Name: At_Drought_Soil_Dry_P Parameter: Post-Treatment Value: Re-Water vs. No Drought
  misc_feature: MA Experiment 20001557 PARAMETER Experiment Name: At_Drought_Soil_Dry_P Parameter: Timepoint (day) Value: 13
  misc_feature: MA Experiment 20001557 PARAMETER Experiment Name: At_Drought_Soil_Dry_P Parameter: Treatment Value: Drought vs. No Drought
atgaatccagctactgacccagtctccgccgccgcagctgctcttgctccgcctccacaacctccgcagcctcaccgtctctctacctcttgcaaccgtcacccagaagagcggttcaccggtttttgcccttcttgtctctgtgaacgtctctcagtcttagatcagaccaacaatggcggttcctcttcttcctctaaaaagcctccgaccatctctgctgcggctctcaaggctctctttaagccttccggaaacaacggagtgggcggtgtaaatacaaacggaaacggccgggttaaacccggattcttcccggagctccgtcgtacgaaatctttctcagcatccaagaacaacgaaggattctccggcgtgtttgagccacaacgtaggtcttgtgacgtcaggcttcgaagctctctttggaacttgtttagccaagatgagcaacgaaaccttccaagcaatgtcaccggcggtgagattgatgtcgagccgaggaaatcaagcgttgcggagcctgttctagaggtaaacgatgaaggagaagctgaaagtgacgacgaagaacttgaagaggaggaggaggaagactacgttgaagctggcgactttgagattctcaatgattccggcgaactaatgagggaaaaaagcgacgagattgttgaagttagagaggagattgaagaagcggtgaaaccaacaaagggtttaagcgaagaggagttaaagccaataaaggattacatagatcttgattctcaaaccaagaagccatcggtacgacggagtttttggtcggcggcctctgttttcagcaagaagcttcagaaatggaggcagaatcaaaagatgaagaagcggcgtaacggcggcgaccatcggccaggatcagctagattaccggtggagaaaccgattgggagacagctccgggatactcaatcggagattgctgattacggatatggtcggaggtcgtgcgataccgaccctcgattctctctagacgccggaagattctctcttgacgccggtagattctccgttgacatcggtaggatctcgcttgatgatcctcgttattcgtttgacgagccgagagcttcttgggacgggtctttgattggacggacaatgtttcctcccgccgcgagagctcctccgccgccgtcaatgctctcggtggtggaggatgcgccgccgccggtgcaccgtcacgtaacccgagcggatatgcagtttccggtggaagaaccggcgccaccaccaccggtggttaaccaaaccaacggtgtgtcagacccggttatcatacccggcggatcaatccaaacccgagactactatactgactcatcgtcaaggaggcggaaaagtctcgacaggtctagtagctccatgaggaaaacggctgcagccgttgtggcggatatggacgagccaaagctttcagtgtcgtcggctatatcaattgacgcttactcaggatcactgagagataacaacaactacgccgtggagacggcagataacggatctttccgggaaccggcgatgatgatcggcgataggaaagtgaatagtaacgataataacaagaagtcgagacggtgggggaagtggagcattttaggacttatttacaggaagagtgttaacaagtatgaggaagaggaggaggaggaagaggataggtataggagattaaacggtggaatggtggagagatcgttatcggagtcatggccggagctgaggaatggaggaggaggaggaggagggccgaggatggtgaggagtaatagcaatgtgagctggaggagttccggaggtggatcagcgaggaaagtcaacggattggataggaggaataagagttcaaggtactcacctaagaatggggaaaacggaatgttgaagttttacttgccacatatgaaagctagtcggagaatgagcggtacaggaggagcaggaggtggcggcggcggagggtgggcgaatagtcacgggcattctatagcgaggagtgtaatgaggctgtattga

SEQ ID NO: 80403 - protein, 685 aa, Arabidopsis thaliana
  peptide (1)..(685): Ceres Seq. ID no. 12655613
  misc_feature (1)..(221): Homolog of NCBI NO: 15240904 NR Description: putative protein; protein id: At5g01170.1
  misc_feature (317)..(506): Homolog of NCBI NO: 15240904 NR Description: putative protein; protein id: At5g01170.1
  misc_feature (521)..(685): Homolog of NCBI NO: 15240904 NR Description: putative protein; protein id: At5g01170.1
  misc_feature (1)..(221): Homolog of NCBI NO: 28393630 NR Description: unknown protein [Arabidopsis thaliana]
  misc_feature (317)..(506): Homolog of NCBI NO: 28393630 NR Description: unknown protein [Arabidopsis thaliana]
  misc_feature (521)..(685): Homolog of NCBI NO: 28393630 NR Description: unknown protein [Arabidopsis thaliana]
  misc_feature (189)..(514): Homolog of NCBI NO: 15224439 NR Description: hypothetical protein; protein id: At2g38070.1
  misc_feature (2)..(191): Homolog of NCBI NO: 15224439 NR Description: hypothetical protein; protein id: At2g38070.1
  misc_feature (189)..(431): Homolog of NCBI NO: 26452998 NR Description: unknown protein [Arabidopsis thaliana]
  misc_feature (2)..(191): Homolog of NCBI NO: 26452998 NR Description: unknown protein [Arabidopsis thaliana]
MNPATDPVSAAAAALAPPPQPPQPHRLSTSCNRHPEERFTGFCPSCLCERLSVLDQTNNGGSSSSSKKPPTISAAALKALFKPSGNNGVGGVNTNGNGRVKPGFFPELRRTKSFSASKNNEGFSGVFEPQRRSCDVRLRSSLWNLFSQDEQRNLPSNVTGGEIDVEPRKSSVAEPVLEVNDEGEAESDDEELEEEEEEDYVEAGDFEILNDSGELMREKSDEIVEVREEIEEAVKPTKGLSEEELKPIKDYIDLDSQTKKPSVRRSFWSAASVFSKKLQKWRQNQKMKKRRNGGDHRPGSARLPVEKPIGRQLRDTQSEIADYGYGRRSCDTDPRFSLDAGRFSLDAGRFSVDIGRISLDDPRYSFDEPRASWDGSLIGRTMFPPAARAPPPPSMLSVVEDAPPPVHRHVTRADMQFPVEEPAPPPPVVNQTNGVSDPVIIPGGSIQTRDYYTDSSSRRRKSLDRSSSSMRKTAAAVVADMDEPKLSVSSAISIDAYSGSLRDNNNYAVETADNGSFREPAMMIGDRKVNSNDNNKKSRRWGKWSILGLIYRKSVNKYEEEEEEEEDRYRRLNGGMVERSLSESWPELRNGGGGGGGPRMVRSNSNVSWRSSGGGSARKVNGLDRRNKSSRYSPKNGENGMLKFYLPHMKASRRMSGTGGAGGGGGGGWANSHGHSIARSVMRLY

SEQ ID NO: 80404 - protein, 470 aa, Arabidopsis thaliana
  peptide (1)..(470): Ceres Seq. ID no. 12655614
  misc_feature (102)..(291): Homolog of NCBI NO: 15240904 NR Description: putative protein; protein id: At5g01170.1
  misc_feature (306)..(470): Homolog of NCBI NO: 15240904 NR Description: putative protein; protein id: At5g01170.1
  misc_feature (102)..(291): Homolog of NCBI NO: 28393630 NR Description: unknown protein [Arabidopsis thaliana]
  misc_feature (306)..(470): Homolog of NCBI NO: 28393630 NR Description: unknown protein [Arabidopsis thaliana]
  misc_feature (1)..(299): Homolog of NCBI NO: 15224439 NR Description: hypothetical protein; protein id: At2g38070.1
  misc_feature (1)..(216): Homolog of NCBI NO: 26452998 NR Description: unknown protein [Arabidopsis thaliana]
  misc_feature (1)..(422): Homolog of NCBI NO: 26452998 NR Description: unknown protein [Arabidopsis thaliana]
  misc_feature (1)..(131): Homolog of NCBI NO: 15240904 NR Description: putative protein; protein id: At5g01170.1
  misc_feature (1)..(131): Homolog of NCBI NO: 28393630 NR Description: unknown protein [Arabidopsis thaliana]
  misc_feature (1)..(145): Homolog of NCBI NO: 15240904 NR Description: putative protein; protein id: At5g01170.1
MREKSDEIVEVREEIEEAVKPTKGLSEEELKPIKDYIDLDSQTKKPSVRRSFWSAASVFSKKLQKWRQNQKMKKRRNGGDHRPGSARLPVEKPIGRQLRDTQSEIADYGYGRRSCDTDPRFSLDAGRFSLDAGRFSVDIGRISLDDPRYSFDEPRASWDGSLIGRTMFPPAARAPPPPSMLSVVEDAPPPVHRHVTRADMQFPVEEPAPPPPVVNQTNGVSDPVIIPGGSIQTRDYYTDSSSRRRKSLDRSSSSMRKTAAAVVADMDEPKLSVSSAISIDAYSGSLRDNNNYAVETADNGSFREPAMMIGDRKVNSNDNNKKSRRWGKWSILGLIYRKSVNKYEEEEEEEEDRYRRLNGGMVERSLSESWPELRNGGGGGGGPRMVRSNSNVSWRSSGGGSARKVNGLDRRNKSSRYSPKNGENGMLKFYLPHMKASRRMSGTGGAGGGGGGGWANSHGHSIARSVMRLY

SEQ ID NO: 80405 - protein, 399 aa, Arabidopsis thaliana
  peptide (1)..(399): Ceres Seq. ID no. 12655615
  misc_feature (31)..(220): Homolog of NCBI NO: 15240904 NR Description: putative protein; protein id: At5g01170.1
  misc_feature (235)..(399): Homolog of NCBI NO: 15240904 NR Description: putative protein; protein id: At5g01170.1
  misc_feature (31)..(220): Homolog of NCBI NO: 28393630 NR Description: unknown protein [Arabidopsis thaliana]
  misc_feature (235)..(399): Homolog of NCBI NO: 28393630 NR Description: unknown protein [Arabidopsis thaliana]
  misc_feature (1)..(228): Homolog of NCBI NO: 15224439 NR Description: hypothetical protein; protein id: At2g38070.1
  misc_feature (1)..(145): Homolog of NCBI NO: 26452998 NR Description: unknown protein [Arabidopsis thaliana]
  misc_feature (1)..(351): Homolog of NCBI NO: 26452998 NR Description: unknown protein [Arabidopsis thaliana]
  misc_feature (1)..(60): Homolog of NCBI NO: 15240904 NR Description: putative protein; protein id: At5g01170.1
  misc_feature (1)..(60): Homolog of NCBI NO: 28393630 NR Description: unknown protein [Arabidopsis thaliana]
  misc_feature (1)..(74): Homolog of NCBI NO: 15240904 NR Description: putative protein; protein id: At5g01170.1
MKKRRNGGDHRPGSARLPVEKPIGRQLRDTQSEIADYGYGRRSCDTDPRFSLDAGRFSLDAGRFSVDIGRISLDDPRYSFDEPRASWDGSLIGRTMFPPAARAPPPPSMLSVVEDAPPPVHRHVTRADMQFPVEEPAPPPPVVNQTNGVSDPVIIPGGSIQTRDYYTDSSSRRRKSLDRSSSSMRKTAAAVVADMDEPKLSVSSAISIDAYSGSLRDNNNYAVETADNGSFREPAMMIGDRKVNSNDNNKKSRRWGKWSILGLIYRKSVNKYEEEEEEEEDRYRRLNGGMVERSLSESWPELRNGGGGGGGPRMVRSNSNVSWRSSGGGSARKVNGLDRRNKSSRYSPKNGENGMLKFYLPHMKASRRMSGTGGAGGGGGGGWANSHGHSIARSVMRLY

SEQ ID NO: 80406 - DNA, 1358 bp, Arabidopsis thaliana
  misc_feature (1)..(1358): Ceres Seq. ID no. 12655628
  misc_feature: MA Experiment ID: 20000171 Result: Down-regulated in Transcription
  misc_feature: MA Experiment 20000171 PARAMETER Experiment Name: At_42deg_Heat_P Parameter: Age (day) Value: 14
  misc_feature: MA Experiment 20000171 PARAMETER Experiment Name: At_42deg_Heat_P Parameter: Organism Value: A. thaliana
  misc_feature: MA Experiment 20000171 PARAMETER Experiment Name: At_42deg_Heat_P Parameter: Plant Line Value: WS
  misc_feature: MA Experiment 20000171 PARAMETER Experiment Name: At_42deg_Heat_P Parameter: Temperature (deg C) Value: 42 vs. 22
  misc_feature: MA Experiment 20000171 PARAMETER Experiment Name: At_42deg_Heat_P Parameter: Timepoint (hr) Value: 1
  misc_feature: MA Experiment 20000171 PARAMETER Experiment Name: At_42deg_Heat_P Parameter: Tissue Value: Aerial
  misc_feature: MA Experiment ID: 20000173 Result: Down-regulated in Transcription
  misc_feature: MA Experiment 20000173 PARAMETER Experiment Name: At_42deg_Heat_P Parameter: Age (day) Value: 14
  misc_feature: MA Experiment 20000173 PARAMETER Experiment Name: At_42deg_Heat_P Parameter: Organism Value: A. thaliana
  misc_feature: MA Experiment 20000173 PARAMETER Experiment Name: At_42deg_Heat_P Parameter: Plant Line Value: WS
  misc_feature: MA Experiment 20000173 PARAMETER Experiment Name: At_42deg_Heat_P Parameter: Temperature (deg C) Value: 42 vs. 22
  misc_feature: MA Experiment 20000173 PARAMETER Experiment Name: At_42deg_Heat_P Parameter: Timepoint (hr) Value: 6
  misc_feature: MA Experiment 20000173 PARAMETER Experiment Name: At_42deg_Heat_P Parameter: Tissue Value: Aerial
  misc_feature: MA Experiment ID: 20000180 Result: Up-regulated in Transcription
  misc_feature: MA Experiment 20000180 PARAMETER Experiment Name: At_Germinating_Seeds_P Parameter: Age (hr) Value: 24 vs. 0
  misc_feature: MA Experiment 20000180 PARAMETER Experiment Name: At_Germinating_Seeds_P Parameter: Tissue Value: Germinating Seeds
  misc_feature: MA Experiment ID: 20000184 Result: Down-regulated in Transcription
  misc_feature: MA Experiment 20000184 PARAMETER Experiment Name: At_Shoots__P Parameter: Age (day) Value: 7
  misc_feature: MA Experiment 20000184 PARAMETER Experiment Name: At_Shoots__P Parameter: Tissue Value: Shoots vs. Whole Plant
  misc_feature: MA Experiment ID: 20000185 Result: Down-regulated in Transcription
  misc_feature: MA Experiment 20000185 PARAMETER Experiment Name: At_Roots__P Parameter: Age (day) Value: 7 vs. 21
  misc_feature: MA Experiment 20000185 PARAMETER Experiment Name: At_Roots__P Parameter: Organism Value: A. thaliana
  misc_feature: MA Experiment 20000185 PARAMETER Experiment Name: At_Roots__P Parameter: Tissue Value: Roots vs. Whole Plant
  misc_feature: MA Experiment ID: 20000234 Result: Up-regulated in Transcription
  misc_feature: MA Experiment 20000234 PARAMETER Experiment Name: At_Siliques_P Parameter: Age (day) Value: 21
  misc_feature: MA Experiment 20000234 PARAMETER Experiment Name: At_Siliques_P Parameter: Organism Value: A. thaliana
  misc_feature: MA Experiment 20000234 PARAMETER Experiment Name: At_Siliques_P Parameter: Plant Line Value: WS
  misc_feature: MA Experiment 20000234 PARAMETER Experiment Name: At_Siliques_P Parameter: Tissue Value: Less Than 5mm Siliques vs. Whole Plant
  misc_feature: MA Experiment ID: 20000439 Result: Down-regulated in Transcription
  misc_feature: MA Experiment 20000439 PARAMETER Experiment Name: At_Roots__P Parameter: Age (day) Value: 14 vs. 21
  misc_feature: MA Experiment 20000439 PARAMETER Experiment Name: At_Roots__P Parameter: Organism Value: A. thaliana
  misc_feature: MA Experiment 20000439 PARAMETER Experiment Name: At_Roots__P Parameter: Tissue Value: Roots vs. Whole Plant
  misc_feature: MA Experiment ID: 20001905 Result: Down-regulated in Transcription
  misc_feature: MA Experiment 20001905 PARAMETER Experiment Name: At_Drought_Reproduction_P Parameter: Age (day) Value: 40
  misc_feature: MA Experiment 20001905 PARAMETER Experiment Name: At_Drought_Reproduction_P Parameter: Organism Value: A. thaliana
  misc_feature: MA Experiment 20001905 PARAMETER Experiment Name: At_Drought_Reproduction_P Parameter: Plant Line Value: WS
  misc_feature: MA Experiment 20001905 PARAMETER Experiment Name: At_Drought_Reproduction_P Parameter: Timepoint (day) Value: 10
  misc_feature: MA Experiment 20001905 PARAMETER Experiment Name: At_Drought_Reproduction_P Parameter: Tissue Value: Rosettes
  misc_feature: MA Experiment 20001905 PARAMETER Experiment Name: At_Drought_Reproduction_P Parameter: Treatment Value: Drought vs. No Drought
gtctcactgaaactgtgaaaattttatctcttttatagataaagaatcttgcttttttcagttttcagtatgaagaagaattgaagagagtgtccgaggaaggagacctttggtttcagtttgtgagtcttgttgtaatggctttatcaatggagtttgggttttcaattgggtcatgcttcaaggcaccaaacccacctgttctaatctctgcaagccctaataagatcaatttcacgttgagaaggagaaagaaaagattcttacttagagtctctgctgtgtcgtataaggaattcgcagagtctgctttagaagaaaccaggaaaaggatcgttcttgaaccttcacatctccaggaaaagtatagtagcatgacaggactagatggtaagaccgaacttcaaatgcttgcttttaaatcttcaaagattagactcttgaggagtatggcaatagagaatgagacaatgcaggtctttgactttgcgggtttcatggagcctgagtatgatactcccatattctgtgctaactttttcacatctaccaacgttaacatagttgtattggaccttaatcctttgcatcagttgactgaccagacggattaccaagacaagtattataacaagataatgtccatatatcacaaatatgctgagactttcccatggggagggaaattgactggtgaatccataaagtttttctcgcctttggtgatgtggactaggttttcgtctagcaaagaaaaacataaggctttgttctctgcgtttctagagtactatcaggcatggcttgagatgacaatccaagtgagggaggagatggaaccatctcatgtgagagccaattgtgaagcacaacacaagtacctgacatggcgagcacaaaaggatcctggacatggtcttcttaaaagattagtaggtgaagcaaaggcaaaggagctgctaagggatttcctgttcaatggggtggatgagttaggcacaaaaacattcattgattactttccagagtaccaaacagaagatggaactgtaagcgataaacgaagtatcattgggaagtcatatgaaactcgtccatgggatttaacaggacaatttatcggctaacaatgatatatgtgaacaagtcagatttcagagtcatcaacacaagaggacgtgaacttagggaagtaggaataagaaagagcagcatgaggagtctctcaggtctatctgcatttcaagatgattgtttgagttaccatgcattgtagttttacaagtgtagctctcagcccttcatcaaaatgagaatcctcgagtatgatatgattttaatgaaaatgtattcgtctc

SEQ ID NO: 80407 - protein, 329 aa, Arabidopsis thaliana; identical to SEQ ID NO: 38491
  peptide (1)..(329): Ceres Seq. ID no. 12655629
  misc_feature (54)..(281): Pfam Name: Ferredoxin-dependent bilin reductase Pfam Description: Ferredoxin-dependent bilin reductase
  misc_feature (1)..(329): Homolog of NCBI NO: 22330928 NR Description: auxin-regulated protein; protein id: At3g09150.2, by cDNA: gi_13359272, supported by cDNA: gi_20466479 [Arabidopsis >gi|28380113|sp|Q9SR43|PFBS_ARATH Phytochromobilin:ferredoxin
  misc_feature (1)..(329): Homolog of NCBI NO: 30680787 NR Description: auxin-regulated protein [Arabidopsis thaliana]
  misc_feature (5)..(329): Homolog of NCBI NO: 21618130 NR Description: unknown [Arabidopsis thaliana]
  misc_feature (94)..(288): Homolog of NCBI NO: 5923680 NR Description: hypothetical protein [Arabidopsis thaliana]
  misc_feature (1)..(74): Homolog of NCBI NO: 5923680 NR Description: hypothetical protein [Arabidopsis thaliana]
  misc_feature (219)..(329): Homolog of NCBI NO: 5923680 NR Description: hypothetical protein [Arabidopsis thaliana]
  misc_feature (51)..(211): Homolog of NCBI NO: 19386814 NR Description: B1147A04.9 [Oryza sativa (japonica
  misc_feature (263)..(329): Homolog of NCBI NO: 19386814 NR Description: B1147A04.9 [Oryza sativa (japonica
  misc_feature (45)..(281): Homolog of NCBI NO: 23127198 NR Description: hypothetical protein [Nostoc punctiforme] Phycoerythrobilin:ferredoxin oxidoreductase
  misc_feature (51)..(281): Homolog of NCBI NO: 34223769 NR Description: PebB [Fremyella diplosiphon]

SEQ ID NO: 80408 - protein, 325 aa, Arabidopsis thaliana; identical to SEQ ID NO: 38492
  peptide (1)..(325): Ceres Seq. ID no. 12655630
  misc_feature (50)..(277): Pfam Name: Ferredoxin-dependent bilin reductase Pfam Description: Ferredoxin-dependent bilin reductase
  misc_feature (1)..(325): Homolog of NCBI NO: 22330928 NR Description: auxin-regulated protein; protein id: At3g09150.2, by cDNA: gi_13359272, supported by cDNA: gi_20466479 [Arabidopsis >gi|28380113|sp|Q9SR43|PFBS_ARATH Phytochromobilin:ferredoxin
  misc_feature (1)..(325): Homolog of NCBI NO: 30680787 NR Description: auxin-regulated protein [Arabidopsis thaliana]
  misc_feature (1)..(325): Homolog of NCBI NO: 21618130 NR Description: unknown [Arabidopsis thaliana]
  misc_feature (90)..(284): Homolog of NCBI NO: 5923680 NR Description: hypothetical protein [Arabidopsis thaliana]
  misc_feature (1)..(70): Homolog of NCBI NO: 5923680 NR Description: hypothetical protein [Arabidopsis thaliana]
  misc_feature (215)..(325): Homolog of NCBI NO: 5923680 NR Description: hypothetical protein [Arabidopsis thaliana]
  misc_feature (47)..(207): Homolog of NCBI NO: 19386814 NR Description: B1147A04.9 [Oryza sativa (japonica
  misc_feature (259)..(325): Homolog of NCBI NO: 19386814 NR Description: B1147A04.9 [Oryza sativa (japonica
  misc_feature (41)..(277): Homolog of NCBI NO: 23127198 NR Description: hypothetical protein [Nostoc punctiforme] Phycoerythrobilin:ferredoxin oxidoreductase
  misc_feature (47)..(277): Homolog of NCBI NO: 34223769 NR Description: PebB [Fremyella diplosiphon]

SEQ ID NO: 80409 - protein, 250 aa, Arabidopsis thaliana; identical to SEQ ID NO: 38493
  peptide (1)..(250): Ceres Seq. ID no. 12655631
  misc_feature (1)..(202): Pfam Name: Ferredoxin-dependent bilin reductase Pfam Description: Ferredoxin-dependent bilin reductase
  misc_feature (1)..(250): Homolog of NCBI NO: 22330928 NR Description: auxin-regulated protein; protein id: At3g09150.2, by cDNA: gi_13359272, supported by cDNA: gi_20466479 [Arabidopsis >gi|28380113|sp|Q9SR43|PFBS_ARATH Phytochromobilin:ferredoxin
  misc_feature (1)..(250): Homolog of NCBI NO: 30680787 NR Description: auxin-regulated protein [Arabidopsis thaliana]
  misc_feature (1)..(250): Homolog of NCBI NO: 21618130 NR Description: unknown [Arabidopsis thaliana]
  misc_feature (15)..(209): Homolog of NCBI NO: 5923680 NR Description: hypothetical protein [Arabidopsis thaliana]
  misc_feature (140)..(250): Homolog of NCBI NO: 5923680 NR Description: hypothetical protein [Arabidopsis thaliana]
  misc_feature (1)..(132): Homolog of NCBI NO: 19386814 NR Description: B1147A04.9 [Oryza sativa (japonica
  misc_feature (184)..(250): Homolog of NCBI NO: 19386814 NR Description: B1147A04.9 [Oryza sativa (japonica
  misc_feature (1)..(202): Homolog of NCBI NO: 23127198 NR Description: hypothetical protein [Nostoc punctiforme] Phycoerythrobilin:ferredoxin oxidoreductase
  misc_feature (1)..(202): Homolog of NCBI NO: 34223769 NR Description: PebB [Fremyella diplosiphon]
  misc_feature (42)..(177): Homolog of NCBI NO: 19386814 NR Description: B1147A04.9 [Oryza sativa (japonica

SEQ ID NO: 80410 - DNA, 756 bp, Arabidopsis thaliana
  misc_feature (1)..(756): Ceres Seq. ID no. 12655658
  misc_feature: MA Experiment ID: 20000171 Result: Up-regulated in Transcription
  misc_feature: MA Experiment 20000171 PARAMETER Experiment Name: At_42deg_Heat_P Parameter: Age (day) Value: 14
  misc_feature: MA Experiment 20000171 PARAMETER Experiment Name: At_42deg_Heat_P Parameter: Organism Value: A. thaliana
  misc_feature: MA Experiment 20000171 PARAMETER Experiment Name: At_42deg_Heat_P Parameter: Plant Line Value: WS
  misc_feature: MA Experiment 20000171 PARAMETER Experiment Name: At_42deg_Heat_P Parameter: Temperature (deg C) Value: 42 vs. 22
  misc_feature: MA Experiment 20000171 PARAMETER Experiment Name: At_42deg_Heat_P Parameter: Timepoint (hr) Value: 1
  misc_feature: MA Experiment 20000171 PARAMETER Experiment Name: At_42deg_Heat_P Parameter: Tissue Value: Aerial
  misc_feature: MA Experiment ID: 20000173 Result: Up-regulated in Transcription
  misc_feature: MA Experiment 20000173 PARAMETER Experiment Name: At_42deg_Heat_P Parameter: Age (day) Value: 14
  misc_feature: MA Experiment 20000173 PARAMETER Experiment Name: At_42deg_Heat_P Parameter: Organism Value: A. thaliana
  misc_feature: MA Experiment 20000173 PARAMETER Experiment Name: At_42deg_Heat_P Parameter: Plant Line Value: WS
  misc_feature: MA Experiment 20000173 PARAMETER Experiment Name: At_42deg_Heat_P Parameter: Temperature (deg C) Value: 42 vs. 22
  misc_feature: MA Experiment 20000173 PARAMETER Experiment Name: At_42deg_Heat_P Parameter: Timepoint (hr) Value: 6
  misc_feature: MA Experiment 20000173 PARAMETER Experiment Name: At_42deg_Heat_P Parameter: Tissue Value: Aerial
  misc_feature: MA Experiment ID: 20000436 Result: Up-regulated in Transcription
  misc_feature: MA Experiment 20000436 PARAMETER Experiment Name: At_Drought_P Parameter: Age (day) Value: 7
  misc_feature: MA Experiment 20000436 PARAMETER Experiment Name: At_Drought_P Parameter: Organism Value: A. thaliana
  misc_feature: MA Experiment 20000436 PARAMETER Experiment Name: At_Drought_P Parameter: Plant Line Value: WS
  misc_feature: MA Experiment 20000436 PARAMETER Experiment Name: At_Drought_P Parameter: Timepoint (hr) Value: 12
  misc_feature: MA Experiment 20000436 PARAMETER Experiment Name: At_Drought_P Parameter: Tissue Value: Whole Plant
  misc_feature: MA Experiment 20000436 PARAMETER Experiment Name: At_Drought_P Parameter: Treatment Value: Drought vs. No Drought
  misc_feature: MA Experiment ID: 20000437 Result: Up-regulated in Transcription
  misc_feature: MA Experiment 20000437 PARAMETER Experiment Name: At_Drought_P Parameter: Age (day) Value: 8
  misc_feature: MA Experiment 20000437 PARAMETER Experiment Name: At_Drought_P Parameter: Organism Value: A. thaliana
  misc_feature: MA Experiment 20000437 PARAMETER Experiment Name: At_Drought_P Parameter: Plant Line Value: WS
  misc_feature: MA Experiment 20000437 PARAMETER Experiment Name: At_Drought_P Parameter: Timepoint (hr) Value: 24
  misc_feature: MA Experiment 20000437 PARAMETER Experiment Name: At_Drought_P Parameter: Tissue Value: Whole Plant
  misc_feature: MA Experiment 20000437 PARAMETER Experiment Name: At_Drought_P Parameter: Treatment Value: Drought vs. No Drought
  misc_feature: MA Experiment ID: 20000453 Result: Up-regulated in Transcription
  misc_feature: MA Experiment 20000453 PARAMETER Experiment Name: At_100uM_ABA_P Parameter: Age (day) Value: 15
  misc_feature: MA Experiment 20000453 PARAMETER Experiment Name: At_100uM_ABA_P Parameter: Organism Value: A. thaliana
  misc_feature: MA Experiment 20000453 PARAMETER Experiment Name: At_100uM_ABA_P Parameter: Plant Line Value: WS
  misc_feature: MA Experiment 20000453 PARAMETER Experiment Name: At_100uM_ABA_P Parameter: Timepoint (hr) Value: 24
  misc_feature: MA Experiment 20000453 PARAMETER Experiment Name: At_100uM_ABA_P Parameter: Tissue Value: Aerial
  misc_feature: MA Experiment 20000453 PARAMETER Experiment Name: At_100uM_ABA_P Parameter: Treatment Value: 100uM ABA vs. No Treatment
  misc_feature: MA Experiment ID: 20001554 Result: Up-regulated in Transcription
  misc_feature: MA Experiment 20001554 PARAMETER Experiment Name: At_Drought_Soil_Dry_P Parameter: Age (day) Value: 21
  misc_feature: MA Experiment 20001554 PARAMETER Experiment Name: At_Drought_Soil_Dry_P Parameter: Organism Value: A. thaliana
  misc_feature: MA Experiment 20001554 PARAMETER Experiment Name: At_Drought_Soil_Dry_P Parameter: Plant Line Value: WS
  misc_feature: MA Experiment 20001554 PARAMETER Experiment Name: At_Drought_Soil_Dry_P Parameter: Post Timepoint (hr) Value: None
  misc_feature: MA Experiment 20001554 PARAMETER Experiment Name: At_Drought_Soil_Dry_P Parameter: Post-Treatment Value: None
  misc_feature: MA Experiment 20001554 PARAMETER Experiment Name: At_Drought_Soil_Dry_P Parameter: Timepoint (day) Value: 7
  misc_feature: MA Experiment 20001554 PARAMETER Experiment Name: At_Drought_Soil_Dry_P Parameter: Treatment Value: Drought vs. No Drought
  misc_feature: MA Experiment ID: 20001555 Result: Up-regulated in Transcription
  misc_feature: MA Experiment 20001555 PARAMETER Experiment Name: At_Drought_Soil_Dry_P Parameter: Age (day) Value: 24
  misc_feature: MA Experiment 20001555 PARAMETER Experiment Name: At_Drought_Soil_Dry_P Parameter: Organism Value: A. thaliana
  misc_feature: MA Experiment 20001555 PARAMETER Experiment Name: At_Drought_Soil_Dry_P Parameter: Plant Line Value: WS
  misc_feature: MA Experiment 20001555 PARAMETER Experiment Name: At_Drought_Soil_Dry_P Parameter: Post Timepoint (hr) Value: None
  misc_feature: MA Experiment 20001555 PARAMETER Experiment Name: At_Drought_Soil_Dry_P Parameter: Post-Treatment Value: None
  misc_feature: MA Experiment 20001555 PARAMETER Experiment Name: At_Drought_Soil_Dry_P Parameter: Timepoint (day) Value: 10
  misc_feature: MA Experiment 20001555 PARAMETER Experiment Name: At_Drought_Soil_Dry_P Parameter: Treatment Value: Drought vs. No Drought
  misc_feature: MA Experiment ID: 20001556 Result: Up-regulated in Transcription
  misc_feature: MA Experiment 20001556 PARAMETER Experiment Name: At_Drought_Soil_Dry_P Parameter: Age (day) Value: 26
  misc_feature: MA Experiment 20001556 PARAMETER Experiment Name: At_Drought_Soil_Dry_P Parameter: Organism Value: A. thaliana
  misc_feature: MA Experiment 20001556 PARAMETER Experiment Name: At_Drought_Soil_Dry_P Parameter: Plant Line Value: WS
  misc_feature: MA Experiment 20001556 PARAMETER Experiment Name: At_Drought_Soil_Dry_P Parameter: Post Timepoint (hr) Value: None
  misc_feature: MA Experiment 20001556 PARAMETER Experiment Name: At_Drought_Soil_Dry_P Parameter: Post-Treatment Value: None
  misc_feature: MA Experiment 20001556 PARAMETER Experiment Name: At_Drought_Soil_Dry_P Parameter: Timepoint (day) Value: 12
  misc_feature: MA Experiment 20001556 PARAMETER Experiment Name: At_Drought_Soil_Dry_P Parameter: Treatment Value: Drought vs. No Drought
atggtgaagaagagttacccggaagtgaaagaagagtacaagaaagctgttcagagatgcaagaggaagctccgtggtcttattgccgagaagcactgtgctcccatcgtcctccgtcttgcatggcactcggctgggacatttgatgtgaagacgaagacaggaggaccgtttgggacgataaggcatccccaagagctagcccatgatgccaacaatggtcttgatattgccgttaggcttcttgaccctatcaaggagctgttccctattctgtcatatgctgacttctaccagctagctggagtagttgctgttgagatcactggaggaccagagattccatttcatcctggtagactggacaaagttgagccacctcctgaaggtcgtctgcctcaggccaccaaaggtgtggatcatctaagagatgtgtttggtcggatgggactcaatgacaaagatatcgttgcattgtctggtggacacaccttgggtcggtgccacaaggagcgttcaggattcgagggtgcatggacaccaaacccgctcatttttgacaactcctatttcaaagagatactaagcggagagaaagaaggacttcttcaactaccaaccgacaaggctcttcttgatgatcctctctttctcccatttgttgaaaaatatgctgcagatgaggatgccttcttcgaagactatacggaagctcatctaaagttgtcagaactcgggtttgctgacaaggagtaa

SEQ ID NO: 80411 - protein, 251 aa, Arabidopsis thaliana
  peptide (1)..(251): Ceres Seq. ID no. 12655659
  misc_feature (20)..(227): Pfam Name: Peroxidase Pfam Description: Peroxidase
  misc_feature (1)..(251): Homolog of NCBI NO: 30680940 NR Description: ascorbate peroxidase (APX) [Arabidopsis thaliana]
  misc_feature (1)..(251): Homolog of NCBI NO: 555576 NR Description: ascorbate peroxidase [Arabidopsis thaliana]
  misc_feature (1)..(246): Homolog of NCBI NO: 6682242 NR Description: putative ascorbate peroxidase [Arabidopsis
  misc_feature (4)..(249): Homolog of NCBI NO: 39939493 NR Description: ascorbate peroxidase [Pinus pinaster]
  misc_feature (4)..(249): Homolog of NCBI NO: 1420938 NR Description: ascorbate peroxidase [Vigna unguiculata]
  misc_feature (4)..(249): Homolog of NCBI NO: 2738949 NR Description: cytosolic ascorbate peroxidase [Fragaria x >gi|5257552|gb|AAD41405.1|AF159630_1 cytosolic ascorbate
MVKKSYPEVKEEYKKAVQRCKRKLRGLIAEKHCAPIVLRLAWHSAGTFDVKTKTGGPFGTIRHPQELAHDANNGLDIAVRLLDPIKELFPILSYADFYQLAGVVAVEITGGPEIPFHPGRLDKVEPPPEGRLPQATKGVDHLRDVFGRMGLNDKDIVALSGGHTLGRCHKERSGFEGAWTPNPLIFDNSYFKEILSGEKEGLLQLPTDKALLDDPLFLPFVEKYAADEDAFFEDYTEAHLKLSELGFADKE

SEQ ID NO: 80412 - DNA, 2133 bp, Arabidopsis thaliana
  misc_feature (1)..(2133): Ceres Seq. ID no. 12655706
  misc_feature: MA Experiment ID: 20000171 Result: Up-regulated in Transcription
  misc_feature: MA Experiment 20000171 PARAMETER Experiment Name: At_42deg_Heat_P Parameter: Age (day) Value: 14
  misc_feature: MA Experiment 20000171 PARAMETER Experiment Name: At_42deg_Heat_P Parameter: Organism Value: A. thaliana
  misc_feature: MA Experiment 20000171 PARAMETER Experiment Name: At_42deg_Heat_P Parameter: Plant Line Value: WS
  misc_feature: MA Experiment 20000171 PARAMETER Experiment Name: At_42deg_Heat_P Parameter: Temperature (deg C) Value: 42 vs. 22
  misc_feature: MA Experiment 20000171 PARAMETER Experiment Name: At_42deg_Heat_P Parameter: Timepoint (hr) Value: 1
  misc_feature: MA Experiment 20000171 PARAMETER Experiment Name: At_42deg_Heat_P Parameter: Tissue Value: Aerial
  misc_feature: MA Experiment ID: 20000173 Result: Up-regulated in Transcription
  misc_feature: MA Experiment 20000173 PARAMETER Experiment Name: At_42deg_Heat_P Parameter: Age (day) Value: 14
  misc_feature: MA Experiment 20000173 PARAMETER Experiment Name: At_42deg_Heat_P Parameter: Organism Value: A. thaliana
  misc_feature: MA Experiment 20000173 PARAMETER Experiment Name: At_42deg_Heat_P Parameter: Plant Line Value: WS
  misc_feature: MA Experiment 20000173 PARAMETER Experiment Name: At_42deg_Heat_P Parameter: Temperature (deg C) Value: 42 vs. 22
  misc_feature: MA Experiment 20000173 PARAMETER Experiment Name: At_42deg_Heat_P Parameter: Timepoint (hr) Value: 6
  misc_feature: MA Experiment 20000173 PARAMETER Experiment Name: At_42deg_Heat_P Parameter: Tissue Value: Aerial
  misc_feature: MA Experiment ID: 20000180 Result: Down-regulated in Transcription
  misc_feature: MA Experiment 20000180 PARAMETER Experiment Name: At_Germinating_Seeds_P Parameter: Age (hr) Value: 24 vs. 0
  misc_feature: MA Experiment 20000180 PARAMETER Experiment Name: At_Germinating_Seeds_P Parameter: Tissue Value: Germinating Seeds
atggtatcttctgtacctaaactccatgctttgtttgtctccaagtctcaaccagttctccgagccgccaaagttaccaatgaagaaaggtccaccaaatcaaaactcgccaggtccttggcccgtgccgtgaactctaacccgtggtcggacgaactcgagtcttcactatcatctcttcatccgtcccaaaccatctccagaaccaccgttctccaaaccctgcgtctcatcaaggtccctgcggatggtctccggttctttgactgggtttccaacaaggggttttctcacaaagagcagtctttcttcctcatgttagagttcctcggtcgagctcgcaatctcaatgtggctcgcaatttcttgttctccatcgagagaaggtctaatggctgcgtcaagctccaggatcgctacttcaacagcttgattaggagctacgggaacgctgggctcttccaggagtcagtgaagctgttccagaccatgaagcagatgggcatctccccttccgttcttaccttcaacagtcttctctccattttgctcaagcgtggcagaactggaatggcccatgacttgttcgacgaaatgcgtcgtacctacggggttaccccagactcctatactttcaatacattgataaatgggttttgtaagaactccatggtcgatgaagcctttaggatttttaaggatatggagctgtatcattgcaatcctgacgttgttacatataacacgatcatcgatgggttatgcagagccggcaaggtcaagattgcacataatgttttgagtggaatgttgaagaaagcaaccgatgtgcatcccaacgttgttagttacactactctggtgcgaggctattgtatgaagcaggaaattgatgaagcagtgcttgtgtttcatgacatgctgagtagagggctgaaacccaatgctgttacttacaatactctgatcaaggggctctctgaggctcacagatatgatgagatcaaagatatcttgattggagggaacgacgcatttaccactttcgctccagatgcctgcacttttaatattttgatcaaagcccactgcgatgctggtcatttggatgcagcgatgaaggtgttccaagaaatgctgaatatgaagttgcatcctgattcagcttcttatagtgttttgattcgtactctgtgcatgagaaacgaatttgatagagctgagacattgttcaatgagttatttgagaaggaagtattgttaggtaaggatgaatgcaagcctctcgctgcagcttataacccaatgtttgaatacttatgtgccaatgggaaaacaaaacaagcggagaaagttttcaggcagctgatgaaaagaggagtgcaagatccgccctcttacaagactttgataacgggtcactgcagagaaggtaaattcaagcctgcttatgagctgttggttctaatgctcaggcgggaatttgtacctgatcttgaaacttacgagttattgattgatggactgttgaagataggtgaagctcttcttgctcacgataccctacaaaggatgctaaggagctcttatcttcctgttgcaaccactttccattctgtacttgcagaacttgcgaaaaggaaatttgctaacgagtctttctgcttggtaacgctaatgttggaaaaacgaataagacagaacattgatctttcaacgcaggttgtcagattgctttttagtagtgcacagaaagagaaggcatttctgattgttaggttgctttatgataacgggtatttggttaagatggaggaattacttggttacctctgcgagaatagaaaactacttgatgcacatacacttgttctgttttgtctggaaaaaagtcaaatggtagatatcgacacatgcaacacggtcatagaaggactctgtaagcataagagacactctgaagcgtttagtttgtacaatgaattagtagaactaggaaaccaccaacagcttagctgccacgtggttttgaggaatgccttagaggctgctggaaagtgggaagaacttcagtttgtgtcaaagaggatggctacattgagagaatcagatgattgctctgtattagaatga

SEQ ID NO: 80413 - protein, 710 aa, Arabidopsis thaliana
  peptide (1)..(710): Ceres Seq. ID no. 12655707
  misc_feature (637)..(671): Pfam Name: PPR repeat Pfam Description: PPR repeat
  misc_feature (238)..(710): Homolog of NCBI NO: 25517994 NR Description: T7I23.14 protein - Arabidopsis thaliana
  misc_feature (29)..(695): Homolog of NCBI NO: 15228104 NR Description: unknown protein; protein id: At2g37230.1
  misc_feature (34)..(541): Homolog of NCBI NO: 22329519 NR Description: hypothetical protein; protein id: At1g12700.1
  misc_feature (143)..(609): Homolog of NCBI NO: 15218325 NR Description: hypothetical protein; protein id: At1g09900.1
  misc_feature (11)..(514): Homolog of NCBI NO: 15237345 NR Description: salt-inducible protein-like; protein id:
  misc_feature (34)..(541): Homolog of NCBI NO: 25402738 NR Description: protein T12C24.22 [imported] - Arabidopsis >gi|9502386|gb|AAF88093.1|AC025417_21 T12C24.22 [Arabidopsis
  misc_feature (141)..(601): Homolog of NCBI NO: 15221691 NR Description: unknown protein; protein id: At1g63130.1
  misc_feature (95)..(657): Homolog of NCBI NO: 15231863 NR Description: putative protein; protein id: At3g53700.1, by cDNA: gi_15982930 [Arabidopsis thaliana]
  misc_feature (75)..(664): Homolog of NCBI NO: 15241049 NR Description: putative protein; protein id: At5g55840.1
  misc_feature (86)..(702): Homolog of NCBI NO: 33146978 NR Description: putative pentatricopeptide (PPR)
MVSSVPKLHALFVSKSQPVLRAAKVTNEERSTKSKLARSLARAVNSNPWSDELESSLSSLHPSQTISRTTVLQTLRLIKVPADGLRFFDWVSNKGFSHKEQSFFLMLEFLGRARNLNVARNFLFSIERRSNGCVKLQDRYFNSLIRSYGNAGLFQESVKLFQTMKQMGISPSVLTFNSLLSILLKRGRTGMAHDLFDEMRRTYGVTPDSYTFNTLINGFCKNSMVDEAFRIFKDMELYHCNPDVVTYNTIIDGLCRAGKVKIAHNVLSGMLKKATDVHPNVVSYTTLVRGYCMKQEIDEAVLVFHDMLSRGLKPNAVTYNTLIKGLSEAHRYDEIKDILIGGNDAFTTFAPDACTFNILIKAHCDAGHLDAAMKVFQEMLNMKLHPDSASYSVLIRTLCMRNEFDRAETLFNELFEKEVLLGKDECKPLAAAYNPMFEYLCANGKTKQAEKVFRQLMKRGVQDPPSYKTLITGHCREGKFKPAYELLVLMLRREFVPDLETYELLIDGLLKIGEALLAHDTLQRMLRSSYLPVATTFHSVLAELAKRKFANESFCLVTLMLEKRIRQNIDLSTQVVRLLFSSAQKEKAFLIVRLLYDNGYLVKMEELLGYLCENRKLLDAHTLVLFCLEKSQMVDIDTCNTVIEGLCKHKRHSEAFSLYNELVELGNHQQLSCHVVLRNALEAAGKWEELQFVSKRMATLRESDDCSVLE

SEQ ID NO: 80414 - protein, 605 aa, Arabidopsis thaliana
  peptide (1)..(605): Ceres Seq. ID no. 12655708
  misc_feature (532)..(566): Pfam Name: PPR repeat Pfam Description: PPR repeat
  misc_feature (133)..(605): Homolog of NCBI NO: 25517994 NR Description: T7I23.14 protein - Arabidopsis thaliana
  misc_feature (1)..(590): Homolog of NCBI NO: 15228104 NR Description: unknown protein; protein id: At2g37230.1
  misc_feature (1)..(436): Homolog of NCBI NO: 22329519 NR Description: hypothetical protein; protein id: At1g12700.1
  misc_feature (38)..(504): Homolog of NCBI NO: 15218325 NR Description: hypothetical protein; protein id: At1g09900.1
  misc_feature (1)..(409): Homolog of NCBI NO: 15237345 NR Description: salt-inducible protein-like; protein id:
  misc_feature (1)..(436): Homolog of NCBI NO: 25402738 NR Description: protein T12C24.22 [imported] - Arabidopsis >gi|9502386|gb|AAF88093.1|AC025417_21 T12C24.22 [Arabidopsis
  misc_feature (36)..(496): Homolog of NCBI NO: 15221691 NR Description: unknown protein; protein id: At1g63130.1
  misc_feature (1)..(552): Homolog of NCBI NO: 15231863 NR Description: putative protein; protein id: At3g53700.1, by cDNA: gi_15982930 [Arabidopsis thaliana]
  misc_feature (1)..(559): Homolog of NCBI NO: 15241049 NR Description: putative protein; protein id: At5g55840.1
  misc_feature (1)..(597): Homolog of NCBI NO: 33146978 NR Description: putative pentatricopeptide (PPR)
MLEFLGRARNLNVARNFLFSIERRSNGCVKLQDRYFNSLIRSYGNAGLFQESVKLFQTMKQMGISPSVLTFNSLLSILLKRGRTGMAHDLFDEMRRTYGVTPDSYTFNTLINGFCKNSMVDEAFRIFKDMELYHCNPDVVTYNTIIDGLCRAGKVKIAHNVLSGMLKKATDVHPNVVSYTTLVRGYCMKQEIDEAVLVFHDMLSRGLKPNAVTYNTLIKGLSEAHRYDEIKDILIGGNDAFTTFAPDACTFNILIKAHCDAGHLDAAMKVFQEMLNMKLHPDSASYSVLIRTLCMRNEFDRAETLFNELFEKEVLLGKDECKPLAAAYNPMFEYLCANGKTKQAEKVFRQLMKRGVQDPPSYKTLITGHCREGKFKPAYELLVLMLRREFVPDLETYELLIDGLLKIGEALLAHDTLQRMLRSSYLPVATTFHSVLAELAKRKFANESFCLVTLMLEKRIRQNIDLSTQVVRLLFSSAQKEKAFLIVRLLYDNGYLVKMEELLGYLCENRKLLDAHTLVLFCLEKSQMVDIDTCNTVIEGLCKHKRHSEAFSLYNELVELGNHQQLSCHVVLRNALEAAGKWEELQFVSKRMATLRESDDCSVLE

SEQ ID NO: 80415 - protein, 547 aa, Arabidopsis thaliana
  peptide (1)..(547): Ceres Seq. ID no. 12655709
  misc_feature (474)..(508): Pfam Name: PPR repeat Pfam Description: PPR repeat
  misc_feature (75)..(547): Homolog of NCBI NO: 25517994 NR Description: T7I23.14 protein - Arabidopsis thaliana
  misc_feature (1)..(532): Homolog of NCBI NO: 15228104 NR Description: unknown protein; protein id: At2g37230.1
  misc_feature (1)..(378): Homolog of NCBI NO: 22329519 NR Description: hypothetical protein; protein id: At1g12700.1
  misc_feature (1)..(446): Homolog of NCBI NO: 15218325 NR Description: hypothetical protein; protein id: At1g09900.1
  misc_feature (1)..(351): Homolog of NCBI NO: 15237345 NR Description: salt-inducible protein-like; protein id:
  misc_feature (1)..(378): Homolog of NCBI NO: 25402738 NR Description: protein T12C24.22 [imported] - Arabidopsis >gi|9502386|gb|AAF88093.1|AC025417_21 T12C24.22 [Arabidopsis
  misc_feature (1)..(438): Homolog of NCBI NO: 15221691 NR Description: unknown protein; protein id: At1g63130.1
  misc_feature (1)..(494): Homolog of NCBI NO: 15231863 NR Description: putative protein; protein id: At3g53700.1, by cDNA: gi_15982930 [Arabidopsis thaliana]
  misc_feature (1)..(501): Homolog of NCBI NO: 15241049 NR Description: putative protein; protein id: At5g55840.1
  misc_feature (1)..(539): Homolog of NCBI NO: 33146978 NR Description: putative pentatricopeptide (PPR)
MKQMGISPSVLTFNSLLSILLKRGRTGMAHDLFDEMRRTYGVTPDSYTFNTLINGFCKNSMVDEAFRIFKDMELYHCNPDVVTYNTIIDGLCRAGKVKIAHNVLSGMLKKATDVHPNVVSYTTLVRGYCMKQEIDEAVLVFHDMLSRGLKPNAVTYNTLIKGLSEAHRYDEIKDILIGGNDAFTTFAPDACTFNILIKAHCDAGHLDAAMKVFQEMLNMKLHPDSASYSVLIRTLCMRNEFDRAETLFNELFEKEVLLGKDECKPLAAAYNPMFEYLCANGKTKQAEKVFRQLMKRGVQDPPSYKTLITGHCREGKFKPAYELLVLMLRREFVPDLETYELLIDGLLKIGEALLAHDTLQRMLRSSYLPVATTFHSVLAELAKRKFANESFCLVTLMLEKRIRQNIDLSTQVVRLLFSSAQKEKAFLIVRLLYDNGYLVKMEELLGYLCENRKLLDAHTLVLFCLEKSQMVDIDTCNTVIEGLCKHKRHSEAFSLYNELVELGNHQQLSCHVVLRNALEAAGKWEELQFVSKRMATLRESDDCSVLE

SEQ ID NO: 80416 - DNA, 1153 bp, Arabidopsis thaliana
  misc_feature (1)..(1153): Ceres Seq. ID no. 12655740
  misc_feature: MA Experiment ID: 20000182 Result: Down-regulated in Transcription
  misc_feature: MA Experiment 20000182 PARAMETER Experiment Name: At_2mM_SA_P Parameter: Age (day) Value: 14
  misc_feature: MA Experiment 20000182 PARAMETER Experiment Name: At_2mM_SA_P Parameter: Organism Value: A. thaliana
  misc_feature: MA Experiment 20000182 PARAMETER Experiment Name: At_2mM_SA_P Parameter: Plant Line Value: WS
  misc_feature: MA Experiment 20000182 PARAMETER Experiment Name: At_2mM_SA_P Parameter: Timepoint (hr) Value: 6
  misc_feature: MA Experiment 20000182 PARAMETER Experiment Name: At_2mM_SA_P Parameter: Tissue Value: Aerial
  misc_feature: MA Experiment 20000182 PARAMETER Experiment Name: At_2mM_SA_P Parameter: Treatment Value: 2mM SA vs. No Treatment
  misc_feature: MA Experiment ID: 20000185 Result: Down-regulated in Transcription
  misc_feature: MA Experiment 20000185 PARAMETER Experiment Name: At_Roots__P Parameter: Age (day) Value: 7 vs. 21
  misc_feature: MA Experiment 20000185 PARAMETER Experiment Name: At_Roots__P Parameter: Organism Value: A. thaliana
  misc_feature: MA Experiment 20000185 PARAMETER Experiment Name: At_Roots__P Parameter: Tissue Value: Roots vs. Whole Plant
  misc_feature: MA Experiment ID: 20000437 Result: Down-regulated in Transcription
  misc_feature: MA Experiment 20000437 PARAMETER Experiment Name: At_Drought_P Parameter: Age (day) Value: 8
  misc_feature: MA Experiment 20000437 PARAMETER Experiment Name: At_Drought_P Parameter: Organism Value: A. thaliana
  misc_feature: MA Experiment 20000437 PARAMETER Experiment Name: At_Drought_P Parameter: Plant Line Value: WS
  misc_feature: MA Experiment 20000437 PARAMETER Experiment Name: At_Drought_P Parameter: Timepoint (hr) Value: 24
  misc_feature: MA Experiment 20000437 PARAMETER Experiment Name: At_Drought_P Parameter: Tissue Value: Whole Plant
  misc_feature: MA Experiment 20000437 PARAMETER Experiment Name: At_Drought_P Parameter: Treatment Value: Drought vs. No Drought
  misc_feature: MA Experiment ID: 20000439 Result: Down-regulated in Transcription
  misc_feature: MA Experiment 20000439 PARAMETER Experiment Name: At_Roots__P Parameter: Age (day) Value: 14 vs. 21
  misc_feature: MA Experiment 20000439 PARAMETER Experiment Name: At_Roots__P Parameter: Organism Value: A. thaliana
  misc_feature: MA Experiment 20000439 PARAMETER Experiment Name: At_Roots__P Parameter: Tissue Value: Roots vs. Whole Plant
  misc_feature: MA Experiment ID: 20000451 Result: Down-regulated in Transcription
  misc_feature: MA Experiment 20000451 PARAMETER Experiment Name: At_CS6879_Shoots-Roots_P Parameter: Age (day) Value: 14
  misc_feature: MA Experiment 20000451 PARAMETER Experiment Name: At_CS6879_Shoots-Roots_P Parameter: Organism Value: A. thaliana
  misc_feature: MA Experiment 20000451 PARAMETER Experiment Name: At_CS6879_Shoots-Roots_P Parameter: Plant Line Value: CS6879 vs. WS
  misc_feature: MA Experiment 20000451 PARAMETER Experiment Name: At_CS6879_Shoots-Roots_P Parameter: Tissue Value: Roots
  misc_feature: MA Experiment ID: 20001451 Result: Up-regulated in Transcription
  misc_feature: MA Experiment 20001451 PARAMETER Experiment Name: At_Far-red-induction_P Parameter: Age (day) Value: 7
  misc_feature: MA Experiment 20001451 PARAMETER Experiment Name: At_Far-red-induction_P Parameter: Light Value: Far-red vs. White
  misc_feature: MA Experiment 20001451 PARAMETER Experiment Name: At_Far-red-induction_P Parameter: Organism Value: A. thaliana
  misc_feature: MA Experiment 20001451 PARAMETER Experiment Name: At_Far-red-induction_P Parameter: Plant Line Value: Columbia
  misc_feature: MA Experiment 20001451 PARAMETER Experiment Name: At_Far-red-induction_P Parameter: Timepoint (hr) Value: 24
  misc_feature: MA Experiment 20001451 PARAMETER Experiment Name: At_Far-red-induction_P Parameter: Tissue Value: Whole Plant
  misc_feature: MA Experiment ID: 20001558 Result: Up-regulated in Transcription
  misc_feature: MA Experiment 20001558 PARAMETER Experiment Name: At_Drought_Soil_Dry_P Parameter: Age (day) Value: 27
  misc_feature: MA Experiment 20001558 PARAMETER Experiment Name: At_Drought_Soil_Dry_P Parameter: Organism Value: A. thaliana
  misc_feature: MA Experiment 20001558 PARAMETER Experiment Name: At_Drought_Soil_Dry_P Parameter: Plant Line Value: WS
  misc_feature: MA Experiment 20001558 PARAMETER Experiment Name: At_Drought_Soil_Dry_P Parameter: Post Timepoint (hr) Value: 6
  misc_feature: MA Experiment 20001558 PARAMETER Experiment Name: At_Drought_Soil_Dry_P Parameter: Post-Treatment Value: Re-Water vs. No Drought
  misc_feature: MA Experiment 20001558 PARAMETER Experiment Name: At_Drought_Soil_Dry_P Parameter: Timepoint (day) Value: 13
  misc_feature: MA Experiment 20001558 PARAMETER Experiment Name: At_Drought_Soil_Dry_P Parameter: Treatment Value: Drought vs. No Drought
  misc_feature: MA Experiment ID: 20001560 Result: Up-regulated in Transcription
  misc_feature: MA Experiment 20001560 PARAMETER Experiment Name: At_Drought_Soil_Dry_P Parameter: Age (day) Value: 28
  misc_feature: MA Experiment 20001560 PARAMETER Experiment Name: At_Drought_Soil_Dry_P Parameter: Organism Value: A. thaliana
  misc_feature: MA Experiment 20001560 PARAMETER Experiment Name: At_Drought_Soil_Dry_P Parameter: Plant Line Value: WS
  misc_feature: MA Experiment 20001560 PARAMETER Experiment Name: At_Drought_Soil_Dry_P Parameter: Post Timepoint (hr) Value: None
  misc_feature: MA Experiment 20001560 PARAMETER Experiment Name: At_Drought_Soil_Dry_P Parameter: Post-Treatment Value: None
  misc_feature: MA Experiment 20001560 PARAMETER Experiment Name: At_Drought_Soil_Dry_P Parameter: Timepoint (day) Value: 14
  misc_feature: MA Experiment 20001560 PARAMETER Experiment Name: At_Drought_Soil_Dry_P Parameter: Treatment Value: Drought vs. No Drought
  misc_feature: MA Experiment ID: 20001757 Result: Up-regulated in Transcription
  misc_feature: MA Experiment 20001757 PARAMETER Experiment Name: At_50mM_NH4NO3_L-to-H_P Parameter: Timepoint (hr) Value: 6
  misc_feature: MA Experiment 20001757 PARAMETER Experiment Name: At_50mM_NH4NO3_L-to-H_P Parameter: Tissue Value: Leaf
  misc_feature: MA Experiment 20001757 PARAMETER Experiment Name: At_50mM_NH4NO3_L-to-H_P Parameter: Treatment Value: 50mM NH4NO3 vs 100mM Mannitol
gcggaacacatcgagagagcttcttccaaaaacctcaaacgctcctcacacaacgggtttaggagtgatggggtctctcgttcgtgaatgggttgggtttcagcaatttccagcagctacccaggaaaagctgattgaattcttcggaaaattgaagcaaaaggatatgaactcaatgacagttcttgttctgggtaaaggcggtgtcggaaaatcatccactgtcaattctcttatcggcgaacaagtcgtccgtgtcagtcctttccaagctgaaggattgagaccagtgatggtttcaagaacaatgggagggttcactatcaacattattgacacccctggacttgtggaagctggatatgtcaatcaccaagctctcgagttaatcaaagggtttcttgtgaacagaacaatagatgtcttgctctatgttgatcgtttggatgtgtatagagtcgatgagctagataagcaagttgttatagcaatcacccaaacctttggaaaagagatatggtgcaaaaccttgcttgttctgactcatgctcaattttcccctcccgatgaactttcctacgaaactttttcctccaagagatcagattctctcctcaaaactatccgggctggttctaagatgcgaaaacaagagtttgaggattctgcaatcgcggtagtctatgcagagaacagcggaagatgcagcaagaacgataaggacgaaaaggctcttccaaatggtgaagcgtggatcccgaacttggttaaggcgataactgatgtagcaacaaaccagaggaaagcaattcatgtagacaagaagatggtagatggatcttactctgatgataaaggaaagaaactcatccctcttatcataggcgctcagtatttgatcgttaagatgattcaaggagcaatcagaaatgatatcaagacaagtggaaagccactttaagaggctctgaagaagaggttttgttgtgagcaaattacaaggagaagaagagtttttcgattgttctttcttttgttagattttatctgcaacattttcttgtttccggctttatctttgtctgtaatttatggagatttgttcaaagaaaagattgccatgctttctggttaaatgaaatggatgtttccc

SEQ ID NO: 80417 - protein, 319 aa, Arabidopsis thaliana
  peptide (1)..(319): Ceres Seq. ID no. 12655741
  misc_feature (59)..(256): Pfam Name: AIG1 family Pfam Description: AIG1 family
  misc_feature (23)..(319): Homolog of NCBI NO: 15217705 NR Description: putative GTP-binding protein; protein id: supported by cDNA: gi_14596162, supported by cDNA: gi_15912340
  misc_feature (23)..(319): Homolog of NCBI NO: 14596163 NR Description: similar to GTP-binding protein [Arabidopsis
  misc_feature (23)..(319): Homolog of NCBI NO: 33391904 NR Description: TOC33 [Brassica napus]
  misc_feature (23)..(319): Homolog of NCBI NO: 36957430 NR Description: TOC33 [Brassica napus]
  misc_feature (23)..(319): Homolog of NCBI NO: 32765535 NR Description: TOC33 [Brassica napus]
  misc_feature (23)..(319): Homolog of NCBI NO: 21780153 NR Description: toc33 protein [Orychophragmus violaceus]
  misc_feature (23)..(319): Homolog of NCBI NO: 34486086 NR Description: TOC33 [Brassica napus]
  misc_feature (23)..(319): Homolog of NCBI NO: 21780151 NR Description: toc33-like protein [Orychophragmus violaceus]
  misc_feature (23)..(319): Homolog of NCBI NO: 34486088 NR Description: TOC33-like protein [Brassica napus]
  misc_feature (27)..(318): Homolog of NCBI NO: 15238381 NR Description: GTP-binding protein (gb|AAD09203.1); protein id:
RNTSRELLPKTSNAPHTTGLGVMGSLVREWVGFQQFPAATQEKLIEFFGKLKQKDMNSMTVLVLGKGGVGKSSTVNSLIGEQVVRVSPFQAEGLRPVMVSRTMGGFTINIIDTPGLVEAGYVNHQALELIKGFLVNRTIDVLLYVDRLDVYRVDELDKQVVIAITQTFGKEIWCKTLLVLTHAQFSPPDELSYETFSSKRSDSLLKTIRAGSKMRKQEFEDSAIAVVYAENSGRCSKNDKDEKALPNGEAWIPNLVKAITDVATNQRKAIHVDKKMVDGSYSDDKGKKLIPLIIGAQYLIVKMIQGAIRNDIKTSGKPL

SEQ ID NO: 80418 - protein, 297 aa, Arabidopsis thaliana
  peptide (1)..(297): Ceres Seq. ID no. 12655742
  misc_feature (37)..(234): Pfam Name: AIG1 family Pfam Description: AIG1 family
  misc_feature (1)..(297): Homolog of NCBI NO: 15217705 NR Description: putative GTP-binding protein; protein id: supported by cDNA: gi_14596162, supported by cDNA: gi_15912340
  misc_feature (1)..(297): Homolog of NCBI NO: 14596163 NR Description: similar to GTP-binding protein [Arabidopsis
  misc_feature (1)..(297): Homolog of NCBI NO: 33391904 NR Description: TOC33 [Brassica napus]
  misc_feature (1)..(297): Homolog of NCBI NO: 36957430 NR Description: TOC33 [Brassica napus]
  misc_feature (1)..(297): Homolog of NCBI NO: 32765535 NR Description: TOC33 [Brassica napus]
  misc_feature (1)..(297): Homolog of NCBI NO: 21780153 NR Description: toc33 protein [Orychophragmus violaceus]
  misc_feature (1)..(297): Homolog of NCBI NO: 34486086 NR Description: TOC33 [Brassica napus]
  misc_feature (1)..(297): Homolog of NCBI NO: 21780151 NR Description: toc33-like protein [Orychophragmus violaceus]
  misc_feature (1)..(297): Homolog of NCBI NO: 34486088 NR Description: TOC33-like protein [Brassica napus]
  misc_feature (5)..(296): Homolog of NCBI NO: 15238381 NR Description: GTP-binding protein (gb|AAD09203.1); protein id:
MGSLVREWVGFQQFPAATQEKLIEFFGKLKQKDMNSMTVLVLGKGGVGKSSTVNSLIGEQVVRVSPFQAEGLRPVMVSRTMGGFTINIIDTPGLVEAGYVNHQALELIKGFLVNRTIDVLLYVDRLDVYRVDELDKQVVIAITQTFGKEIWCKTLLVLTHAQFSPPDELSYETFSSKRSDSLLKTIRAGSKMRKQEFEDSAIAVVYAENSGRCSKNDKDEKALPNGEAWIPNLVKAITDVATNQRKAIHVDKKMVDGSYSDDKGKKLIPLIIGAQYLIVKMIQGAIRNDIKTSGKPL

SEQ ID NO: 80419 - protein, 264 aa, Arabidopsis thaliana
  peptide (1)..(264): Ceres Seq. ID no. 12655743
  misc_feature (4)..(201): Pfam Name: AIG1 family Pfam Description: AIG1 family
  misc_feature (1)..(264): Homolog of NCBI NO: 15217705 NR Description: putative GTP-binding protein; protein id: supported by cDNA: gi_14596162, supported by cDNA: gi_15912340
  misc_feature (1)..(264): Homolog of NCBI NO: 14596163 NR Description: similar to GTP-binding protein [Arabidopsis
  misc_feature (1)..(264): Homolog of NCBI NO: 33391904 NR Description: TOC33 [Brassica napus]
  misc_feature (1)..(264): Homolog of NCBI NO: 36957430 NR Description: TOC33 [Brassica napus]
  misc_feature (1)..(264): Homolog of NCBI NO: 32765535 NR Description: TOC33 [Brassica napus]
  misc_feature (1)..(264): Homolog of NCBI NO: 21780153 NR Description: toc33 protein [Orychophragmus violaceus]
  misc_feature (1)..(264): Homolog of NCBI NO: 34486086 NR Description: TOC33 [Brassica napus]
  misc_feature (1)..(264): Homolog of NCBI NO: 21780151 NR Description: toc33-like protein [Orychophragmus violaceus]
  misc_feature (1)..(264): Homolog of NCBI NO: 34486088 NR Description: TOC33-like protein [Brassica napus]
  misc_feature (1)..(263): Homolog of NCBI NO: 15238381 NR Description: GTP-binding protein (gb|AAD09203.1); protein id:
MNSMTVLVLGKGGVGKSSTVNSLIGEQVVRVSPFQAEGLRPVMVSRTMGGFTINIIDTPGLVEAGYVNHQALELIKGFLVNRTIDVLLYVDRLDVYRVDELDKQVVIAITQTFGKEIWCKTLLVLTHAQFSPPDELSYETFSSKRSDSLLKTIRAGSKMRKQEFEDSAIAVVYAENSGRCSKNDKDEKALPNGEAWIPNLVKAITDVATNQRKAIHVDKKMVDGSYSDDKGKKLIPLIIGAQYLIVKMIQGAIRNDIKTSGKPL

SEQ ID NO: 80420 - DNA, 1789 bp, Arabidopsis thaliana
  misc_feature (1)..(1789): Ceres Seq. ID no. 12655755
  misc_feature: MA Experiment ID: 20000166 Result: Up-regulated in Transcription
  misc_feature: MA Experiment 20000166 PARAMETER Experiment Name: At_100uM_ABA_P Parameter: Age (day) Value: 14
  misc_feature: MA Experiment 20000166 PARAMETER Experiment Name: At_100uM_ABA_P Parameter: Organism Value: A. thaliana
  misc_feature: MA Experiment 20000166 PARAMETER Experiment Name: At_100uM_ABA_P Parameter: Plant Line Value: WS
  misc_feature: MA Experiment 20000166 PARAMETER Experiment Name: At_100uM_ABA_P Parameter: Timepoint (hr) Value: 1
  misc_feature: MA Experiment 20000166 PARAMETER Experiment Name: At_100uM_ABA_P Parameter: Tissue Value: Aerial
  misc_feature: MA Experiment 20000166 PARAMETER Experiment Name: At_100uM_ABA_P Parameter: Treatment Value: 100uM ABA vs. No Treatment
  misc_feature: MA Experiment ID: 20000169 Result: Up-regulated in Transcription
  misc_feature: MA Experiment 20000169 PARAMETER Experiment Name: At_100uM_ABA_P Parameter: Age (day) Value: 14
  misc_feature: MA Experiment 20000169 PARAMETER Experiment Name: At_100uM_ABA_P Parameter: Organism Value: A. thaliana
  misc_feature: MA Experiment 20000169 PARAMETER Experiment Name: At_100uM_ABA_P Parameter: Plant Line Value: WS
  misc_feature: MA Experiment 20000169 PARAMETER Experiment Name: At_100uM_ABA_P Parameter: Timepoint (hr) Value: 6
  misc_feature: MA Experiment 20000169 PARAMETER Experiment Name: At_100uM_ABA_P Parameter: Tissue Value: Aerial
  misc_feature: MA Experiment 20000169 PARAMETER Experiment Name: At_100uM_ABA_P Parameter: Treatment Value: 100uM ABA vs. No Treatment
  misc_feature: MA Experiment ID: 20000182 Result: Up-regulated in Transcription
  misc_feature: MA Experiment 20000182 PARAMETER Experiment Name: At_2mM_SA_P Parameter: Age (day) Value: 14
  misc_feature: MA Experiment 20000182 PARAMETER Experiment Name: At_2mM_SA_P Parameter: Organism Value: A. thaliana
  misc_feature: MA Experiment 20000182 PARAMETER Experiment Name: At_2mM_SA_P Parameter: Plant Line Value: WS
  misc_feature: MA Experiment 20000182 PARAMETER Experiment Name: At_2mM_SA_P Parameter: Timepoint (hr) Value: 6
  misc_feature: MA Experiment 20000182 PARAMETER Experiment Name: At_2mM_SA_P Parameter: Tissue Value: Aerial
  misc_feature: MA Experiment 20000182 PARAMETER Experiment Name: At_2mM_SA_P Parameter: Treatment Value: 2mM SA vs. No Treatment
  misc_feature: MA Experiment ID: 20000185 Result: Down-regulated in Transcription
  misc_feature: MA Experiment 20000185 PARAMETER Experiment Name: At_Roots__P Parameter: Age (day) Value: 7 vs. 21
  misc_feature: MA Experiment 20000185 PARAMETER Experiment Name: At_Roots__P Parameter: Organism Value: A. thaliana
  misc_feature: MA Experiment 20000185 PARAMETER Experiment Name: At_Roots__P Parameter: Tissue Value: Roots vs. Whole Plant
  misc_feature: MA Experiment ID: 20000234 Result: Down-regulated in Transcription
  misc_feature: MA Experiment 20000234 PARAMETER Experiment Name: At_Siliques_P Parameter: Age (day) Value: 21
  misc_feature: MA Experiment 20000234 PARAMETER Experiment Name: At_Siliques_P Parameter: Organism Value: A. thaliana
  misc_feature: MA Experiment 20000234 PARAMETER Experiment Name: At_Siliques_P Parameter: Plant Line Value: WS
  misc_feature: MA Experiment 20000234 PARAMETER Experiment Name: At_Siliques_P Parameter: Tissue Value: Less Than 5mm Siliques vs. Whole Plant
  misc_feature: MA Experiment ID: 20000235 Result: Down-regulated in Transcription
  misc_feature: MA Experiment 20000235 PARAMETER Experiment Name: At_Siliques_P Parameter: Age (day) Value: 21
  misc_feature: MA Experiment 20000235 PARAMETER Experiment Name: At_Siliques_P Parameter: Organism Value: A. thaliana
  misc_feature: MA Experiment 20000235 PARAMETER Experiment Name: At_Siliques_P Parameter: Plant Line Value: WS
  misc_feature: MA Experiment 20000235 PARAMETER Experiment Name: At_Siliques_P Parameter: Tissue Value: 5-10mm Siliques vs. Whole Plant
  misc_feature: MA Experiment ID: 20000265 Result: Down-regulated in Transcription
  misc_feature: MA Experiment 20000265 PARAMETER Experiment Name: At_Open_Flower_P Parameter: Age (day) Value: 21
  misc_feature: MA Experiment 20000265 PARAMETER Experiment Name: At_Open_Flower_P Parameter: Plant Line Value: WS
  misc_feature: MA Experiment 20000265 PARAMETER Experiment Name: At_Open_Flower_P Parameter: Tissue Value: Closed Flower vs. Whole Plant
  misc_feature: MA Experiment ID: 20000267 Result: Up-regulated in Transcription
  misc_feature: MA Experiment 20000267 PARAMETER Experiment Name: At_Drought_P Parameter: Age (day) Value: 7
  misc_feature: MA Experiment 20000267 PARAMETER Experiment Name: At_Drought_P Parameter: Organism Value: A. thaliana
  misc_feature: MA Experiment 20000267 PARAMETER Experiment Name: At_Drought_P Parameter: Plant Line Value: WS
  misc_feature: MA Experiment 20000267 PARAMETER Experiment Name: At_Drought_P Parameter: Timepoint (hr) Value: 6
  misc_feature: MA Experiment 20000267 PARAMETER Experiment Name: At_Drought_P Parameter: Tissue Value: Whole Plant
  misc_feature: MA Experiment 20000267 PARAMETER Experiment Name: At_Drought_P Parameter: Treatment Value: Drought vs. No Drought
  misc_feature: MA Experiment ID: 20000286 Result: Down-regulated in Transcription
  misc_feature: MA Experiment 20000286 PARAMETER Experiment Name: At_Open_Flower_P Parameter: Age (day) Value: 21
  misc_feature: MA Experiment 20000286 PARAMETER Experiment Name: At_Open_Flower_P Parameter: Plant Line Value: WS
  misc_feature: MA Experiment 20000286 PARAMETER Experiment Name: At_Open_Flower_P Parameter: Tissue Value: Half Open vs. Whole Plant
  misc_feature: MA Experiment ID: 20000436 Result: Up-regulated in Transcription
  misc_feature: MA Experiment 20000436 PARAMETER Experiment Name: At_Drought_P Parameter: Age (day) Value: 7
  misc_feature: MA Experiment 20000436 PARAMETER Experiment Name: At_Drought_P Parameter: Organism Value: A. thaliana
  misc_feature: MA Experiment 20000436 PARAMETER Experiment Name: At_Drought_P Parameter: Plant Line Value: WS
  misc_feature: MA Experiment 20000436 PARAMETER Experiment Name: At_Drought_P Parameter: Timepoint (hr) Value: 12
  misc_feature: MA Experiment 20000436 PARAMETER Experiment Name: At_Drought_P Parameter: Tissue Value: Whole Plant
  misc_feature: MA Experiment 20000436 PARAMETER Experiment Name: At_Drought_P Parameter: Treatment Value: Drought vs. No Drought
  misc_feature: MA Experiment ID: 20000437 Result: Up-regulated in Transcription
  misc_feature: MA Experiment 20000437 PARAMETER Experiment Name: At_Drought_P Parameter: Age (day) Value: 8
  misc_feature: MA Experiment 20000437 PARAMETER Experiment Name: At_Drought_P Parameter: Organism Value: A. thaliana
  misc_feature: MA Experiment 20000437 PARAMETER Experiment Name: At_Drought_P Parameter: Plant Line Value: WS
  misc_feature: MA Experiment 20000437 PARAMETER Experiment Name: At_Drought_P Parameter: Timepoint (hr) Value: 24
  misc_feature: MA Experiment 20000437 PARAMETER Experiment Name: At_Drought_P Parameter: Tissue Value: Whole Plant
  misc_feature: MA Experiment 20000437 PARAMETER Experiment Name: At_Drought_P Parameter: Treatment Value: Drought vs. No Drought
  misc_feature: MA Experiment ID: 20000439 Result: Down-regulated in Transcription
  misc_feature: MA Experiment 20000439 PARAMETER Experiment Name: At_Roots__P Parameter: Age (day) Value: 14 vs. 21
  misc_feature: MA Experiment 20000439 PARAMETER Experiment Name: At_Roots__P Parameter: Organism Value: A. thaliana
  misc_feature: MA Experiment 20000439 PARAMETER Experiment Name: At_Roots__P Parameter: Tissue Value: Roots vs. Whole Plant
  misc_feature: MA Experiment ID: 20000451 Result: Up-regulated in Transcription
  misc_feature: MA Experiment 20000451 PARAMETER Experiment Name: At_CS6879_Shoots-Roots_P Parameter: Age (day) Value: 14
  misc_feature: MA Experiment 20000451 PARAMETER Experiment Name: At_CS6879_Shoots-Roots_P Parameter: Organism Value: A. thaliana
  misc_feature: MA Experiment 20000451 PARAMETER Experiment Name: At_CS6879_Shoots-Roots_P Parameter: Plant Line Value: CS6879 vs. WS
  misc_feature: MA Experiment 20000451 PARAMETER Experiment Name: At_CS6879_Shoots-Roots_P Parameter: Tissue Value: Roots
  misc_feature: MA Experiment ID: 20000453 Result: Up-regulated in Transcription
  misc_feature: MA Experiment 20000453 PARAMETER Experiment Name: At_100uM_ABA_P Parameter: Age (day) Value: 15
  misc_feature: MA Experiment 20000453 PARAMETER Experiment Name: At_100uM_ABA_P Parameter: Organism Value: A. thaliana
  misc_feature: MA Experiment 20000453 PARAMETER Experiment Name: At_100uM_ABA_P Parameter: Plant Line Value: WS
  misc_feature: MA Experiment 20000453 PARAMETER Experiment Name: At_100uM_ABA_P Parameter: Timepoint (hr) Value: 24
  misc_feature: MA Experiment 20000453 PARAMETER Experiment Name: At_100uM_ABA_P Parameter: Tissue Value: Aerial
  misc_feature: MA Experiment 20000453 PARAMETER Experiment Name: At_100uM_ABA_P Parameter: Treatment Value: 100uM ABA vs. No Treatment
  misc_feature: MA Experiment ID: 20000455 Result: Up-regulated in Transcription
  misc_feature: MA Experiment 20000455 PARAMETER Experiment Name: At_100uM_ABA_P Parameter: Age (day) Value: 16
  misc_feature: MA Experiment 20000455 PARAMETER Experiment Name: At_100uM_ABA_P Parameter: Organism Value: A. thaliana
  misc_feature: MA Experiment 20000455 PARAMETER Experiment Name: At_100uM_ABA_P Parameter: Plant Line Value: WS
  misc_feature: MA Experiment 20000455 PARAMETER Experiment Name: At_100uM_ABA_P Parameter: Timepoint (hr) Value: 48
  misc_feature: MA Experiment 20000455 PARAMETER Experiment Name: At_100uM_ABA_P Parameter: Tissue Value: Aerial
  misc_feature: MA Experiment 20000455 PARAMETER Experiment Name: At_100uM_ABA_P Parameter: Treatment Value: 100uM ABA vs. No Treatment
  misc_feature: MA Experiment ID: 20000460 Result: Up-regulated in Transcription
  misc_feature: MA Experiment 20000460 PARAMETER Experiment Name: At_10percent_PEG_P Parameter: Age (day) Value: 12
  misc_feature: MA Experiment 20000460 PARAMETER Experiment Name: At_10percent_PEG_P Parameter: Organism Value: A. thaliana
  misc_feature: MA Experiment 20000460 PARAMETER Experiment Name: At_10percent_PEG_P Parameter: Plant Line Value: WS
  misc_feature: MA Experiment 20000460 PARAMETER Experiment Name: At_10percent_PEG_P Parameter: Timepoint (day) Value: 12
  misc_feature: MA Experiment 20000460 PARAMETER Experiment Name: At_10percent_PEG_P Parameter: Tissue Value: Whole Plant
  misc_feature: MA Experiment 20000460 PARAMETER Experiment Name: At_10percent_PEG_P Parameter: Treatment Value: 10percent PEG vs. No Treatment
  misc_feature: MA Experiment ID: 20000495 Result: Down-regulated in Transcription
  misc_feature: MA Experiment 20000495 PARAMETER Experiment Name: At_Guard_Cells_P Parameter: Harvest Date Value: 8/2/2002
  misc_feature: MA Experiment 20000495 PARAMETER Experiment Name: At_Guard_Cells_P Parameter: Organism Value: A. thaliana
  misc_feature: MA Experiment 20000495 PARAMETER Experiment Name: At_Guard_Cells_P Parameter: Tissue Value: Guard Cells vs. Leaves
  misc_feature: MA Experiment ID: 20000496 Result: Down-regulated in Transcription
  misc_feature: MA Experiment 20000496 PARAMETER Experiment Name: At_Guard_Cells_P Parameter: Harvest Date Value: 7/19/2002
  misc_feature: MA Experiment 20000496 PARAMETER Experiment Name: At_Guard_Cells_P Parameter: Organism Value: Canola
  misc_feature: MA Experiment 20000496 PARAMETER Experiment Name: At_Guard_Cells_P Parameter: Tissue Value: Guard Cells vs. Leaves
  misc_feature: MA Experiment ID: 20000573 Result: Down-regulated in Transcription
  misc_feature: MA Experiment 20000573 PARAMETER Experiment Name: At_100uM_ABA_Mutants__P Parameter: Organism Value: A. thaliana
  misc_feature: MA Experiment 20000573 PARAMETER Experiment Name: At_100uM_ABA_Mutants__P Parameter: Plant Line Value: CS22 vs. Ler wt
  misc_feature: MA Experiment 20000573 PARAMETER Experiment Name: At_100uM_ABA_Mutants__P Parameter: Timepoint (hr) Value: N/A
  misc_feature: MA Experiment 20000573 PARAMETER Experiment Name: At_100uM_ABA_Mutants__P Parameter: Tissue Value: Whole Plant
  misc_feature: MA Experiment 20000573 PARAMETER Experiment Name: At_100uM_ABA_Mutants__P Parameter: Treatment Value: None
  misc_feature: MA Experiment ID: 20000574 Result: Down-regulated in Transcription
  misc_feature: MA Experiment 20000574 PARAMETER Experiment Name: At_100uM_ABA_Mutants__P Parameter: Organism Value: A. thaliana
  misc_feature: MA Experiment 20000574 PARAMETER Experiment Name: At_100uM_ABA_Mutants__P Parameter: Plant Line Value: CS23 vs. Ler wt
  misc_feature: MA Experiment 20000574 PARAMETER Experiment Name: At_100uM_ABA_Mutants__P Parameter: Timepoint (hr) Value: N/A
  misc_feature: MA Experiment 20000574 PARAMETER Experiment Name: At_100uM_ABA_Mutants__P Parameter: Tissue Value: Whole Plant
  misc_feature: MA Experiment 20000574 PARAMETER Experiment Name: At_100uM_ABA_Mutants__P Parameter: Treatment Value: None
  misc_feature: MA Experiment ID: 20000794 Result: Up-regulated in Transcription
  misc_feature: MA Experiment 20000794 PARAMETER Experiment Name: At_Petals_P Parameter: Age (day) Value: 23-25 days
  misc_feature: MA Experiment 20000794 PARAMETER Experiment Name: At_Petals_P Parameter: Plant Line Value: WS
  misc_feature: MA Experiment 20000794 PARAMETER Experiment Name: At_Petals_P Parameter: Tissue Value: Petals vs. Whole plant
  misc_feature: MA Experiment ID: 20001248 Result: Down-regulated in Transcription
  misc_feature: MA Experiment 20001248 PARAMETER Experiment Name: At_Far-red-induction_P Parameter: Age (day) Value: 7
  misc_feature: MA Experiment 20001248 PARAMETER Experiment Name: At_Far-red-induction_P Parameter: Light Value: Far-red vs. White
  misc_feature: MA Experiment 20001248 PARAMETER Experiment Name: At_Far-red-induction_P Parameter: Organism Value: A. thaliana
  misc_feature: MA Experiment 20001248 PARAMETER Experiment Name: At_Far-red-induction_P Parameter: Plant Line Value: Columbia
  misc_feature: MA Experiment 20001248 PARAMETER Experiment Name: At_Far-red-induction_P Parameter: Timepoint (hr) Value: 4
  misc_feature: MA Experiment 20001248 PARAMETER Experiment Name: At_Far-red-induction_P Parameter: Tissue Value: Whole Plant
  misc_feature: MA Experiment ID: 20001450 Result: Down-regulated in Transcription
  misc_feature: MA Experiment 20001450 PARAMETER Experiment Name: At_Far-red-induction_P Parameter: Age (day) Value: 7
  misc_feature: MA Experiment 20001450 PARAMETER Experiment Name: At_Far-red-induction_P Parameter: Light Value: Far-red vs. White
  misc_feature: MA Experiment 20001450 PARAMETER Experiment Name: At_Far-red-induction_P Parameter: Organism Value: A. thaliana
  misc_feature: MA Experiment 20001450 PARAMETER Experiment Name: At_Far-red-induction_P Parameter: Plant Line Value: Columbia
  misc_feature: MA Experiment 20001450 PARAMETER Experiment Name: At_Far-red-induction_P Parameter: Timepoint (hr) Value: 8
  misc_feature: MA Experiment 20001450 PARAMETER Experiment Name: At_Far-red-induction_P Parameter: Tissue Value: Whole Plant
  misc_feature: MA Experiment ID: 20001554 Result: Up-regulated in Transcription
  misc_feature: MA Experiment 20001554 PARAMETER Experiment Name: At_Drought_Soil_Dry_P Parameter: Age (day) Value: 21
  misc_feature: MA Experiment 20001554 PARAMETER Experiment Name: At_Drought_Soil_Dry_P Parameter: Organism Value: A. thaliana
  misc_feature: MA Experiment 20001554 PARAMETER Experiment Name: At_Drought_Soil_Dry_P Parameter: Plant Line Value: WS
  misc_feature: MA Experiment 20001554 PARAMETER Experiment Name: At_Drought_Soil_Dry_P Parameter: Post Timepoint (hr) Value: None
  misc_feature: MA Experiment 20001554 PARAMETER Experiment Name: At_Drought_Soil_Dry_P Parameter: Post-Treatment Value: None
  misc_feature: MA Experiment 20001554 PARAMETER Experiment Name: At_Drought_Soil_Dry_P Parameter: Timepoint (day) Value: 7
  misc_feature: MA Experiment 20001554 PARAMETER Experiment Name: At_Drought_Soil_Dry_P Parameter: Treatment Value: Drought vs. No Drought
  misc_feature: MA Experiment ID: 20001555 Result: Up-regulated in Transcription
  misc_feature: MA Experiment 20001555 PARAMETER Experiment Name: At_Drought_Soil_Dry_P Parameter: Age (day) Value: 24
  misc_feature: MA Experiment 20001555 PARAMETER Experiment Name: At_Drought_Soil_Dry_P Parameter: Organism Value: A. thaliana
  misc_feature: MA Experiment 20001555 PARAMETER Experiment Name: At_Drought_Soil_Dry_P Parameter: Plant Line Value: WS
  misc_feature: MA Experiment 20001555 PARAMETER Experiment Name: At_Drought_Soil_Dry_P Parameter: Post Timepoint (hr) Value: None
  misc_feature: MA Experiment 20001555 PARAMETER Experiment Name: At_Drought_Soil_Dry_P Parameter: Post-Treatment Value: None
  misc_feature: MA Experiment 20001555 PARAMETER Experiment Name: At_Drought_Soil_Dry_P Parameter: Timepoint (day) Value: 10
  misc_feature: MA Experiment 20001555 PARAMETER Experiment Name: At_Drought_Soil_Dry_P Parameter: Treatment Value: Drought vs. No Drought
  misc_feature: MA Experiment ID: 20001556 Result: Up-regulated in Transcription
  misc_feature: MA Experiment 20001556 PARAMETER Experiment Name: At_Drought_Soil_Dry_P Parameter: Age (day) Value: 26
  misc_feature: MA Experiment 20001556 PARAMETER Experiment Name: At_Drought_Soil_Dry_P Parameter: Organism Value: A. thaliana
  misc_feature: MA Experiment 20001556 PARAMETER Experiment Name: At_Drought_Soil_Dry_P Parameter: Plant Line Value: WS
  misc_feature: MA Experiment 20001556 PARAMETER Experiment Name: At_Drought_Soil_Dry_P Parameter: Post Timepoint (hr) Value: None
  misc_feature: MA Experiment 20001556 PARAMETER Experiment Name: At_Drought_Soil_Dry_P Parameter: Post-Treatment Value: None
  misc_feature: MA Experiment 20001556 PARAMETER Experiment Name: At_Drought_Soil_Dry_P Parameter: Timepoint (day) Value: 12
  misc_feature: MA Experiment 20001556 PARAMETER Experiment Name: At_Drought_Soil_Dry_P Parameter: Treatment Value: Drought vs. No Drought
  misc_feature: MA Experiment ID: 20001558 Result: Up-regulated in Transcription
  misc_feature: MA Experiment 20001558 PARAMETER Experiment Name: At_Drought_Soil_Dry_P Parameter: Age (day) Value: 27
  misc_feature: MA Experiment 20001558 PARAMETER Experiment Name: At_Drought_Soil_Dry_P Parameter: Organism Value: A. thaliana
  misc_feature: MA Experiment 20001558 PARAMETER Experiment Name: At_Drought_Soil_Dry_P Parameter: Plant Line Value: WS
  misc_feature: MA Experiment 20001558 PARAMETER Experiment Name: At_Drought_Soil_Dry_P Parameter: Post Timepoint (hr) Value: 6
  misc_feature: MA Experiment 20001558 PARAMETER Experiment Name: At_Drought_Soil_Dry_P Parameter: Post-Treatment Value: Re-Water vs. No Drought
  misc_feature: MA Experiment 20001558 PARAMETER Experiment Name: At_Drought_Soil_Dry_P Parameter: Timepoint (day) Value: 13
  misc_feature: MA Experiment 20001558 PARAMETER Experiment Name: At_Drought_Soil_Dry_P Parameter: Treatment Value: Drought vs. No Drought
  misc_feature: MA Experiment ID: 20001904 Result: Up-regulated in Transcription
  misc_feature: MA Experiment 20001904 PARAMETER Experiment Name: At_Drought_Reproduction_P Parameter: Age (day) Value: 37
  misc_feature: MA Experiment 20001904 PARAMETER Experiment Name: At_Drought_Reproduction_P Parameter: Organism Value: A. thaliana
  misc_feature: MA Experiment 20001904 PARAMETER Experiment Name: At_Drought_Reproduction_P Parameter: Plant Line Value: WS
  misc_feature: MA Experiment 20001904 PARAMETER Experiment Name: At_Drought_Reproduction_P Parameter: Timepoint (day) Value: 7
  misc_feature: MA Experiment 20001904 PARAMETER Experiment Name: At_Drought_Reproduction_P Parameter: Tissue Value: Rosettes
  misc_feature: MA Experiment 20001904 PARAMETER Experiment Name: At_Drought_Reproduction_P Parameter: Treatment Value: Drought vs. No Drought
  misc_feature: MA Experiment ID: 20001905 Result: Up-regulated in Transcription
  misc_feature: MA Experiment 20001905 PARAMETER Experiment Name: At_Drought_Reproduction_P Parameter: Age (day) Value: 40
  misc_feature: MA Experiment 20001905 PARAMETER Experiment Name: At_Drought_Reproduction_P Parameter: Organism Value: A. thaliana
  misc_feature: MA Experiment 20001905 PARAMETER Experiment Name: At_Drought_Reproduction_P Parameter: Plant Line Value: WS
  misc_feature: MA Experiment 20001905 PARAMETER Experiment Name: At_Drought_Reproduction_P Parameter: Timepoint (day) Value: 10
  misc_feature: MA Experiment 20001905 PARAMETER Experiment Name: At_Drought_Reproduction_P Parameter: Tissue Value: Rosettes
  misc_feature: MA Experiment 20001905 PARAMETER Experiment Name: At_Drought_Reproduction_P Parameter: Treatment Value: Drought vs. No Drought
gacatgcagagtctagattccagcgacaccatataatatagttattagaaaacgagaggtcaaaaccatgtccggtaataagatctcgactcttcaagctcttgtcttcttcttgtaccggtttttcattctccgtcgttggtgtcatcgtagccctaaacaaaaataccaaaaatgcccttctcacggcctccaccaatatcaagacctatcgaatcacactttgatattcaacgtcgaaggagctctactcaaatcaaactctttattcccttacttcatggttgtggcattcgaagccggaggggtgataaggtcacttttcctcttagttctttatccatttataagcttgatgagctacgaaatgggcttgaagacgatggtgatgctgagcttctttggagttaaaaaggaaagcttccgagtggggaaatcagttttgcctaagtattttctagaagatgttgggctcgagatgttccaggttttgaaaagaggaggcaagagagttgctgtgagtgatttaccacaagttatgattgatgtattcttgcgagattacttggagatagaagttgtggtcggaagagacatgaaaatggtcggtggttactacctaggcatcgtggaggataagaagaaccttgaaattgcttttgataaagtggttcaagaagaaagacttggtagtggtcgtcgtcttattggcatcacttcctttaactcgccaagtcacagatctctcttctctcaattttgccaggaaatttacttcgtcagaaattcagacaagaaaagttggcaaaccctaccacaagatcaataccctaaaccattgattttccacgatggtcgtttagccgttaagccaacacctttaaacacactcgtattattcatgtgggccccattcgccgccgtcttagccgctgcaagactcgtcttcggcctaaacttaccttactccctagccaatcccttcctcgccttttccggtatccaccttactctcactgtcaacaaccacaacgacctaatatccgccgacagaaaaagaggttgtctctttgtgtgtaaccatagaacgttattggacccactttacatttcatacgctctaagaaagaaaaacatgaaagccgtgacgtatagtctaagcagattatctgagcttctggctccgatcaagaccgttagattgactcgtgatcgagtcaaagatggtcaagccatggagaaattgctgagccagggagatctcgtggtttgtccggaagggactacgtgtagagagccttacttgcttcggtttagtccacttttctctgaggtttgtgacgtcatcgtacctgttgctattgactcacacgtgactttcttctatggcacgacggctagtggtcttaaggcatttgatcccattttcttccttttgaatcctttcccttcctacaccgtcaaattgcttgaccctgtctctggaagtagctcgtccacgtgtcgaggagtccctgacaatggaaaagttaacttcgaggtggctaatcacgtgcagcatgagatcgggaatgcgttggggtttgagtgcaccaacctcacgagaagagataagtacttgatcttggccggtaataacggagttgtcaagaaaaaataattgatttgagtagtttattttcttaattagggcctttttgtgtgacgtacactttatttcttataagattttttttctatgatgtatctatctttttttagttaaatgtaattatctaattgtgtgacc

SEQ ID NO: 80421 - protein, 530 aa, Arabidopsis thaliana
  peptide (1)..(530): Ceres Seq. ID no. 12655756
  misc_feature (1)..(530): Homolog of NCBI NO: 18378959 NR Description: expressed protein; protein id: At1g02390.1, by cDNA: gi_16930412, supported by cDNA: gi_20453232 [Arabidopsis
  misc_feature (5)..(529): Homolog of NCBI NO: 15235185 NR Description: unknown protein; protein id: At4g01950.1, by cDNA: gi_20453057 [Arabidopsis thaliana]
  misc_feature (33)..(528): Homolog of NCBI NO: 21618047 NR Description: unknown [Arabidopsis thaliana]
  misc_feature (33)..(528): Homolog of NCBI NO: 18390661 NR Description: expressed protein; protein id: At1g06520.1, by cDNA: 94974. [Arabidopsis thaliana] >gi|25372666|pir||G86200
  misc_feature (52)..(530): Homolog of NCBI NO: 34894812 NR Description: P0554D10.9 [Oryza sativa (japonica
  misc_feature (36)..(527): Homolog of NCBI NO: 34905450 NR Description: P0487H02.19 [Oryza sativa (japonica
  misc_feature (29)..(530): Homolog of NCBI NO: 38000002 NR Description: unknown protein [Oryza sativa (japonica
  misc_feature (57)..(526): Homolog of NCBI NO: 18481713 NR Description: hypothetical protein [Sorghum bicolor]
  misc_feature (29)..(528): Homolog of NCBI NO: 17064780 NR Description: Unknown protein [Arabidopsis thaliana]
  misc_feature (29)..(528): Homolog of NCBI NO: 15223437 NR Description: hypothetical protein; protein id: At1g01610.1, by cDNA: gi_17064779, supported by cDNA: gi_20259891 [Arabidopsis
MSGNKISTLQALVFFLYRFFILRRWCHRSPKQKYQKCPSHGLHQYQDLSNHTLIFNVEGALLKSNSLFPYFMVVAFEAGGVIRSLFLLVLYPFISLMSYEMGLKTMVMLSFFGVKKESFRVGKSVLPKYFLEDVGLEMFQVLKRGGKRVAVSDLPQVMIDVFLRDYLEIEVVVGRDMKMVGGYYLGIVEDKKNLEIAFDKVVQEERLGSGRRLIGITSFNSPSHRSLFSQFCQEIYFVRNSDKKSWQTLPQDQYPKPLIFHDGRLAVKPTPLNTLVLFMWAPFAAVLAAARLVFGLNLPYSLANPFLAFSGIHLTLTVNNHNDLISADRKRGCLFVCNHRTLLDPLYISYALRKKNMKAVTYSLSRLSELLAPIKTVRLTRDRVKDGQAMEKLLSQGDLVVCPEGTTCREPYLLRFSPLFSEVCDVIVPVAIDSHVTFFYGTTASGLKAFDPIFFLLNPFPSYTVKLLDPVSGSSSSTCRGVPDNGKVNFEVANHVQHEIGNALGFECTNLTRRDKYLILAGNNGVVKKK

SEQ ID NO: 80422 - protein, 459 aa, Arabidopsis thaliana
  peptide (1)..(459): Ceres Seq. ID no. 12655757
  misc_feature (1)..(459): Homolog of NCBI NO: 18378959 NR Description: expressed protein; protein id: At1g02390.1, by cDNA: gi_16930412, supported by cDNA: gi_20453232 [Arabidopsis
  misc_feature (1)..(458): Homolog of NCBI NO: 15235185 NR Description: unknown protein; protein id: At4g01950.1, by cDNA: gi_20453057 [Arabidopsis thaliana]
  misc_feature (1)..(457): Homolog of NCBI NO: 21618047 NR Description: unknown [Arabidopsis thaliana]
  misc_feature (1)..(457): Homolog of NCBI NO: 18390661 NR Description: expressed protein; protein id: At1g06520.1, by cDNA: 94974. [Arabidopsis thaliana] >gi|25372666|pir||G86200
  misc_feature (1)..(459): Homolog of NCBI NO: 34894812 NR Description: P0554D10.9 [Oryza sativa (japonica
  misc_feature (1)..(456): Homolog of NCBI NO: 34905450 NR Description: P0487H02.19 [Oryza sativa (japonica
  misc_feature (1)..(459): Homolog of NCBI NO: 38000002 NR Description: unknown protein [Oryza sativa (japonica
  misc_feature (1)..(455): Homolog of NCBI NO: 18481713 NR Description: hypothetical protein [Sorghum bicolor]
  misc_feature (1)..(457): Homolog of NCBI NO: 17064780 NR Description: Unknown protein [Arabidopsis thaliana]
  misc_feature (1)..(457): Homolog of NCBI NO: 15223437 NR Description: hypothetical protein; protein id: At1g01610.1, by cDNA: gi_17064779, supported by cDNA: gi_20259891 [Arabidopsis
MVVAFEAGGVIRSLFLLVLYPFISLMSYEMGLKTMVMLSFFGVKKESFRVGKSVLPKYFLEDVGLEMFQVLKRGGKRVAVSDLPQVMIDVFLRDYLEIEVVVGRDMKMVGGYYLGIVEDKKNLEIAFDKVVQEERLGSGRRLIGITSFNSPSHRSLFSQFCQEIYFVRNSDKKSWQTLPQDQYPKPLIFHDGRLAVKPTPLNTLVLFMWAPFAAVLAAARLVFGLNLPYSLANPFLAFSGIHLTLTVNNHNDLISADRKRGCLFVCNHRTLLDPLYISYALRKKNMKAVTYSLSRLSELLAPIKTVRLTRDRVKDGQAMEKLLSQGDLVVCPEGTTCREPYLLRFSPLFSEVCDVIVPVAIDSHVTFFYGTTASGLKAFDPIFFLLNPFPSYTVKLLDPVSGSSSSTCRGVPDNGKVNFEVANHVQHEIGNALGFECTNLTRRDKYLILAGNNGVVKKK

SEQ ID NO: 80423 - protein, 434 aa, Arabidopsis thaliana
  peptide (1)..(434): Ceres Seq. ID no. 12655758
  misc_feature (1)..(434): Homolog of NCBI NO: 18378959 NR Description: expressed protein; protein id: At1g02390.1, by cDNA: gi_16930412, supported by cDNA: gi_20453232 [Arabidopsis
  misc_feature (1)..(433): Homolog of NCBI NO: 15235185 NR Description: unknown protein; protein id: At4g01950.1, by cDNA: gi_20453057 [Arabidopsis thaliana]
  misc_feature (1)..(432): Homolog of NCBI NO: 21618047 NR Description: unknown [Arabidopsis thaliana]
  misc_feature (1)..(432): Homolog of NCBI NO: 18390661 NR Description: expressed protein; protein id: At1g06520.1, by cDNA: 94974. [Arabidopsis thaliana] >gi|25372666|pir||G86200
  misc_feature (1)..(434): Homolog of NCBI NO: 34894812 NR Description: P0554D10.9 [Oryza sativa (japonica
  misc_feature (1)..(431): Homolog of NCBI NO: 34905450 NR Description: P0487H02.19 [Oryza sativa (japonica
  misc_feature (1)..(434): Homolog of NCBI NO: 38000002 NR Description: unknown protein [Oryza sativa (japonica
  misc_feature (1)..(430): Homolog of NCBI NO: 18481713 NR Description: hypothetical protein [Sorghum bicolor]
  misc_feature (1)..(432): Homolog of NCBI NO: 17064780 NR Description: Unknown protein [Arabidopsis thaliana]
  misc_feature (1)..(432): Homolog of NCBI NO: 15223437 NR Description: hypothetical protein; protein id: At1g01610.1, by cDNA: gi_17064779, supported by cDNA: gi_20259891 [Arabidopsis
MSYEMGLKTMVMLSFFGVKKESFRVGKSVLPKYFLEDVGLEMFQVLKRGGKRVAVSDLPQVMIDVFLRDYLEIEVVVGRDMKMVGGYYLGIVEDKKNLEIAFDKVVQEERLGSGRRLIGITSFNSPSHRSLFSQFCQEIYFVRNSDKKSWQTLPQDQYPKPLIFHDGRLAVKPTPLNTLVLFMWAPFAAVLAAARLVFGLNLPYSLANPFLAFSGIHLTLTVNNHNDLISADRKRGCLFVCNHRTLLDPLYISYALRKKNMKAVTYSLSRLSELLAPIKTVRLTRDRVKDGQAMEKLLSQGDLVVCPEGTTCREPYLLRFSPLFSEVCDVIVPVAIDSHVTFFYGTTASGLKAFDPIFFLLNPFPSYTVKLLDPVSGSSSSTCRGVPDNGKVNFEVANHVQHEIGNALGFECTNLTRRDKYLILAGNNGVVKKK

SEQ ID NO: 80424 - DNA, 990 bp, Arabidopsis thaliana
  misc_feature (1)..(990): Ceres Seq. ID no. 12655759
  misc_feature: MA Experiment ID: 20000182 Result: Up-regulated in Transcription
  misc_feature: MA Experiment 20000182 PARAMETER Experiment Name: At_2mM_SA_P Parameter: Age (day) Value: 14
  misc_feature: MA Experiment 20000182 PARAMETER Experiment Name: At_2mM_SA_P Parameter: Organism Value: A. thaliana
  misc_feature: MA Experiment 20000182 PARAMETER Experiment Name: At_2mM_SA_P Parameter: Plant Line Value: WS
  misc_feature: MA Experiment 20000182 PARAMETER Experiment Name: At_2mM_SA_P Parameter: Timepoint (hr) Value: 6
  misc_feature: MA Experiment 20000182 PARAMETER Experiment Name: At_2mM_SA_P Parameter: Tissue Value: Aerial
  misc_feature: MA Experiment 20000182 PARAMETER Experiment Name: At_2mM_SA_P Parameter: Treatment Value: 2mM SA vs. No Treatment
  misc_feature: MA Experiment ID: 20000227 Result: Down-regulated in Transcription
  misc_feature: MA Experiment 20000227 PARAMETER Experiment Name: At_Root-Tips-vs-Tops_P Parameter: Tissue Value: Root Tips vs. Root Tops
  misc_feature: MA Experiment ID: 20000234 Result: Down-regulated in Transcription
  misc_feature: MA Experiment 20000234 PARAMETER Experiment Name: At_Siliques_P Parameter: Age (day) Value: 21
  misc_feature: MA Experiment 20000234 PARAMETER Experiment Name: At_Siliques_P Parameter: Organism Value: A. thaliana
  misc_feature: MA Experiment 20000234 PARAMETER Experiment Name: At_Siliques_P Parameter: Plant Line Value: WS
  misc_feature: MA Experiment 20000234 PARAMETER Experiment Name: At_Siliques_P Parameter: Tissue Value: Less Than 5mm Siliques vs. Whole Plant
  misc_feature: MA Experiment ID: 20000264 Result: Down-regulated in Transcription
  misc_feature: MA Experiment 20000264 PARAMETER Experiment Name: At_Open_Flower_P Parameter: Age (day) Value: 21
  misc_feature: MA Experiment 20000264 PARAMETER Experiment Name: At_Open_Flower_P Parameter: Plant Line Value: WS
  misc_feature: MA Experiment 20000264 PARAMETER Experiment Name: At_Open_Flower_P Parameter: Tissue Value: Open Flower vs. Whole Plant
  misc_feature: MA Experiment ID: 20000265 Result: Down-regulated in Transcription
  misc_feature: MA Experiment 20000265 PARAMETER Experiment Name: At_Open_Flower_P Parameter: Age (day) Value: 21
  misc_feature: MA Experiment 20000265 PARAMETER Experiment Name: At_Open_Flower_P Parameter: Plant Line Value: WS
  misc_feature: MA Experiment 20000265 PARAMETER Experiment Name: At_Open_Flower_P Parameter: Tissue Value: Closed Flower vs. Whole Plant
  misc_feature: MA Experiment ID: 20000267 Result: Up-regulated in Transcription
  misc_feature: MA Experiment 20000267 PARAMETER Experiment Name: At_Drought_P Parameter: Age (day) Value: 7
  misc_feature: MA Experiment 20000267 PARAMETER Experiment Name: At_Drought_P Parameter: Organism Value: A. thaliana
  misc_feature: MA Experiment 20000267 PARAMETER Experiment Name: At_Drought_P Parameter: Plant Line Value: WS
  misc_feature: MA Experiment 20000267 PARAMETER Experiment Name: At_Drought_P Parameter: Timepoint (hr) Value: 6
  misc_feature: MA Experiment 20000267 PARAMETER Experiment Name: At_Drought_P Parameter: Tissue Value: Whole Plant
  misc_feature: MA Experiment 20000267 PARAMETER Experiment Name: At_Drought_P Parameter: Treatment Value: Drought vs. No Drought
  misc_feature: MA Experiment ID: 20000286 Result: Down-regulated in Transcription
  misc_feature: MA Experiment 20000286 PARAMETER Experiment Name: At_Open_Flower_P Parameter: Age (day) Value: 21
  misc_feature: MA Experiment 20000286 PARAMETER Experiment Name: At_Open_Flower_P Parameter: Plant Line Value: WS
  misc_feature: MA Experiment 20000286 PARAMETER Experiment Name: At_Open_Flower_P Parameter: Tissue Value: Half Open vs. Whole Plant
  misc_feature: MA Experiment ID: 20000288 Result: Up-regulated in Transcription
  misc_feature: MA Experiment 20000288 PARAMETER Experiment Name: At_Drought_P Parameter: Age (day) Value: 7
  misc_feature: MA Experiment 20000288 PARAMETER Experiment Name: At_Drought_P Parameter: Organism Value: A. thaliana
  misc_feature: MA Experiment 20000288 PARAMETER Experiment Name: At_Drought_P Parameter: Plant Line Value: WS
  misc_feature: MA Experiment 20000288 PARAMETER Experiment Name: At_Drought_P Parameter: Timepoint (hr) Value: 1
  misc_feature: MA Experiment 20000288 PARAMETER Experiment Name: At_Drought_P Parameter: Tissue Value: Whole Plant
  misc_feature: MA Experiment 20000288 PARAMETER Experiment Name: At_Drought_P Parameter: Treatment Value: Drought vs. No Drought
  misc_feature: MA Experiment ID: 20000436 Result: Up-regulated in Transcription
  misc_feature: MA Experiment 20000436 PARAMETER Experiment Name: At_Drought_P Parameter: Age (day) Value: 7
  misc_feature: MA Experiment 20000436 PARAMETER Experiment Name: At_Drought_P Parameter: Organism Value: A. thaliana
  misc_feature: MA Experiment 20000436 PARAMETER Experiment Name: At_Drought_P Parameter: Plant Line Value: WS
  misc_feature: MA Experiment 20000436 PARAMETER Experiment Name: At_Drought_P Parameter: Timepoint (hr) Value: 12
  misc_feature: MA Experiment 20000436 PARAMETER Experiment Name: At_Drought_P Parameter: Tissue Value: Whole Plant
  misc_feature: MA Experiment 20000436 PARAMETER Experiment Name: At_Drought_P Parameter: Treatment Value: Drought vs. No Drought
  misc_feature: MA Experiment ID: 20000437 Result: Up-regulated in Transcription
  misc_feature: MA Experiment 20000437 PARAMETER Experiment Name: At_Drought_P Parameter: Age (day) Value: 8
  misc_feature: MA Experiment 20000437 PARAMETER Experiment Name: At_Drought_P Parameter: Organism Value: A. thaliana
  misc_feature: MA Experiment 20000437 PARAMETER Experiment Name: At_Drought_P Parameter: Plant Line Value: WS
  misc_feature: MA Experiment 20000437 PARAMETER Experiment Name: At_Drought_P Parameter: Timepoint (hr) Value: 24
  misc_feature: MA Experiment 20000437 PARAMETER Experiment Name: At_Drought_P Parameter: Tissue Value: Whole Plant
  misc_feature: MA Experiment 20000437 PARAMETER Experiment Name: At_Drought_P Parameter: Treatment Value: Drought vs. No Drought
  misc_feature: MA Experiment ID: 20000438 Result: Down-regulated in Transcription
  misc_feature: MA Experiment 20000438 PARAMETER Experiment Name: At_Shoots__P Parameter: Age (day) Value: 14
  misc_feature: MA Experiment 20000438 PARAMETER Experiment Name: At_Shoots__P Parameter: Tissue Value: Shoots vs. Whole Plant
  misc_feature: MA Experiment ID: 20000453 Result: Up-regulated in Transcription
  misc_feature: MA Experiment 20000453 PARAMETER Experiment Name: At_100uM_ABA_P Parameter: Age (day) Value: 15
  misc_feature: MA Experiment 20000453 PARAMETER Experiment Name: At_100uM_ABA_P Parameter: Organism Value: A. thaliana
  misc_feature: MA Experiment 20000453 PARAMETER Experiment Name: At_100uM_ABA_P Parameter: Plant Line Value: WS
  misc_feature: MA Experiment 20000453 PARAMETER Experiment Name: At_100uM_ABA_P Parameter: Timepoint (hr) Value: 24
  misc_feature: MA Experiment 20000453 PARAMETER Experiment Name: At_100uM_ABA_P Parameter: Tissue Value: Aerial
  misc_feature: MA Experiment 20000453 PARAMETER Experiment Name: At_100uM_ABA_P Parameter: Treatment Value: 100uM ABA vs. No Treatment
  misc_feature: MA Experiment ID: 20000495 Result: Down-regulated in Transcription
  misc_feature: MA Experiment 20000495 PARAMETER Experiment Name: At_Guard_Cells_P Parameter: Harvest Date Value: 8/2/2002
  misc_feature: MA Experiment 20000495 PARAMETER Experiment Name: At_Guard_Cells_P Parameter: Organism Value: A. thaliana
  misc_feature: MA Experiment 20000495 PARAMETER Experiment Name: At_Guard_Cells_P Parameter: Tissue Value: Guard Cells vs. Leaves
  misc_feature: MA Experiment ID: 20000496 Result: Down-regulated in Transcription
  misc_feature: MA Experiment 20000496 PARAMETER Experiment Name: At_Guard_Cells_P Parameter: Harvest Date Value: 7/19/2002
  misc_feature: MA Experiment 20000496 PARAMETER Experiment Name: At_Guard_Cells_P Parameter: Organism Value: Canola
  misc_feature: MA Experiment 20000496 PARAMETER Experiment Name: At_Guard_Cells_P Parameter: Tissue Value: Guard Cells vs. Leaves
  misc_feature: MA Experiment ID: 20001248 Result: Up-regulated in Transcription
  misc_feature: MA Experiment 20001248 PARAMETER Experiment Name: At_Far-red-induction_P Parameter: Age (day) Value: 7
  misc_feature: MA Experiment 20001248 PARAMETER Experiment Name: At_Far-red-induction_P Parameter: Light Value: Far-red vs. White
  misc_feature: MA Experiment 20001248 PARAMETER Experiment Name: At_Far-red-induction_P Parameter: Organism Value: A. thaliana
  misc_feature: MA Experiment 20001248 PARAMETER Experiment Name: At_Far-red-induction_P Parameter: Plant Line Value: Columbia
  misc_feature: MA Experiment 20001248 PARAMETER Experiment Name: At_Far-red-induction_P Parameter: Timepoint (hr) Value: 4
  misc_feature: MA Experiment 20001248 PARAMETER Experiment Name: At_Far-red-induction_P Parameter: Tissue Value: Whole Plant
  misc_feature: MA Experiment ID: 20001450 Result: Up-regulated in Transcription
  misc_feature: MA Experiment 20001450 PARAMETER Experiment Name: At_Far-red-induction_P Parameter: Age (day) Value: 7
  misc_feature: MA Experiment 20001450 PARAMETER Experiment Name: At_Far-red-induction_P Parameter: Light Value: Far-red vs. White
  misc_feature: MA Experiment 20001450 PARAMETER Experiment Name: At_Far-red-induction_P Parameter: Organism Value: A. thaliana
  misc_feature: MA Experiment 20001450 PARAMETER Experiment Name: At_Far-red-induction_P Parameter: Plant Line Value: Columbia
  misc_feature: MA Experiment 20001450 PARAMETER Experiment Name: At_Far-red-induction_P Parameter: Timepoint (hr) Value: 8
  misc_feature: MA Experiment 20001450 PARAMETER Experiment Name: At_Far-red-induction_P Parameter: Tissue Value: Whole Plant
  misc_feature: MA Experiment ID: 20001905 Result: Up-regulated in Transcription
  misc_feature: MA Experiment 20001905 PARAMETER Experiment Name: At_Drought_Reproduction_P Parameter: Age (day) Value: 40
  misc_feature: MA Experiment 20001905 PARAMETER Experiment Name: At_Drought_Reproduction_P Parameter: Organism Value: A. thaliana
  misc_feature: MA Experiment 20001905 PARAMETER Experiment Name: At_Drought_Reproduction_P Parameter: Plant Line Value: WS
  misc_feature: MA Experiment 20001905 PARAMETER Experiment Name: At_Drought_Reproduction_P Parameter: Timepoint (day) Value: 10
  misc_feature: MA Experiment 20001905 PARAMETER Experiment Name: At_Drought_Reproduction_P Parameter: Tissue Value: Rosettes
  misc_feature: MA Experiment 20001905 PARAMETER Experiment Name: At_Drought_Reproduction_P Parameter: Treatment Value: Drought vs. No Drought
  misc_feature: MA Experiment ID: 20001906 Result: Up-regulated in Transcription
  misc_feature: MA Experiment 20001906 PARAMETER Experiment Name: At_Drought_Reproduction_P Parameter: Age (day) Value: 35
  misc_feature: MA Experiment 20001906 PARAMETER Experiment Name: At_Drought_Reproduction_P Parameter: Organism Value: A. thaliana
  misc_feature: MA Experiment 20001906 PARAMETER Experiment Name: At_Drought_Reproduction_P Parameter: Plant Line Value: WS
  misc_feature: MA Experiment 20001906 PARAMETER Experiment Name: At_Drought_Reproduction_P Parameter: Timepoint (day) Value: 5
  misc_feature: MA Experiment 20001906 PARAMETER Experiment Name: At_Drought_Reproduction_P Parameter: Tissue Value: Siliques
  misc_feature: MA Experiment 20001906 PARAMETER Experiment Name: At_Drought_Reproduction_P Parameter: Treatment Value: Drought vs. No Drought
atggttttgccatcttcaacaccgttacaaaccaccggaaagaagacgatatcctcgccggaatataacttcccggtgatcgatttctccttaaacgatcggtcaaaactatcggagaagatcgtaaaagcctgtgaggttaatgggtttttcaaggtgataaaccatggagttaaaccggagataataaagagattcgagcatgaaggagaagagttctttaataaaccggaatcagataagctacgagccggtccggcgagtccgttcggttacggatgcaagaacatcgggttcaacggcgatttgggtgagcttgagtatcttcttctccacgcaaatccgacagctgtcgctgataaatctgaaactatatctcatgatgatcctttcaagttcagctcggcgacgaatgattacatacgcacggttagagatttggcatgtgagatcattgatctgacgatcgagaatttatggggacagaagtctagcgaagtgagtgagctgatcagagacgttcgtagcgattcgatcctacggttgaatcactatccaccagcaccgtacgcgttaagtggcgttggtcaaataggtttcggagaacattctgaccctcagatcttgacggtgttaagatccaacgacgtagatggacttgagatttgctcacgtgacggcttgtggatcccaatcccatctgaccctacatgcttcttcgtattggtcggtgactgccttcaggcattgacgaatgggagattcactagcgtgaggcatagggttttagcaaacacagcaaagaagccacgtatgtcggcgatgtactttgcagctccaccgttagaggcgaaaatatcaccgttgccaaaaatggtgtcgccggaaaatccaagacgttataattcattcacatggggtgactacaaaaaagctacatactctctccgtttagatgtccctcgtctcgagtttttcaagactttatag

SEQ ID NO: 80425 - protein, 329 aa, Arabidopsis thaliana [sequence omitted]

SEQ ID NO: 80426 - DNA, 369 bp, Arabidopsis thaliana
  misc_feature (1)..(369): Ceres Seq. ID no. 12655784
  misc_feature: MA Experiment ID: 20000307 Result: Up-regulated in Transcription
  misc_feature: MA Experiment 20000307 PARAMETER Experiment Name: At_Germinating_Seeds_Sub_P Parameter: Age (hr) Value: 24 vs. 0
  misc_feature: MA Experiment 20000307 PARAMETER Experiment Name: At_Germinating_Seeds_Sub_P Parameter: Organism Value: A. thaliana
  misc_feature: MA Experiment 20000307 PARAMETER Experiment Name: At_Germinating_Seeds_Sub_P Parameter: Plant Line Value: WS
  misc_feature: MA Experiment 20000307 PARAMETER Experiment Name: At_Germinating_Seeds_Sub_P Parameter: Tissue Value: Germinating Seeds
atgggccctctcactcgggtattgattcttgttgagtggttttcacaggttgatgctctggtctacttagtggatgcttatgaccaggagagatttgcagaatcaaaaaaggagcttgatgcacttctctcagacgaatccttagccactgtcccattcctcatcttaggaaacaaaatcgacataccttacgctgcatctgaggacgagcttcgattccatcttggcctctccaatttcacaactggtaaaggcaaagtgaatctaactgattcgaatgtgagaccattggaggtgtttatgtgcagcattgttagaaaaatgggatatggtgaaggcttcaagtggctctctcaatacatcaaataa

SEQ ID NO: 80427 - protein, 122 aa, Arabidopsis thaliana
  peptide (1)..(122): Ceres Seq. ID no. 12655785
  misc_feature (12)..(121): Pfam Name: ADP-ribosylation factor family Pfam Description: ADP-ribosylation factor family
  misc_feature (1)..(122): Homolog of NCBI NO: 15217820 NR Description: GTP-binding protein Sar1, putative; protein id:
  misc_feature (12)..(122): Homolog of NCBI NO: 15235226 NR Description: SAR1/GTP-binding secretory factor; protein id: supported by cDNA: 94610., supported by cDNA: gi_1314859,
  misc_feature (12)..(122): Homolog of NCBI NO: 3334321 NR Description: GTP-binding protein SAR1A
  misc_feature (12)..(122): Homolog of NCBI NO: 7438455 NR Description: GTP-binding protein Sar1, pollination-induced -
  misc_feature (12)..(121): Homolog of NCBI NO: 15223516 NR Description: GTP-binding protein (SAR1B); protein id: supported by cDNA: 1854., supported by cDNA: gi_166733, supported cDNA: gi_18176421, supported by cDNA: gi_20465532 [Arabidopsis
  misc_feature (12)..(122): Homolog of NCBI NO: 34894960 NR Description: putative GTP-binding protein [Oryza sativa
  misc_feature (12)..(121): Homolog of NCBI NO: 15228793 NR Description: Sar1-like GTP binding protein; protein id: supported by cDNA: gi_17979296 [Arabidopsis thaliana] putative Sar1 GTP binding protein [Arabidopsis thaliana]
  misc_feature (12)..(122): Homolog of NCBI NO: 25294173 NR Description: small GTP-binding protein Sar1BNt [imported] -
  misc_feature (12)..(122): Homolog of NCBI NO: 34902852 NR Description: unnamed protein product [Oryza sativa (japonica group)] >gi|5922611|dbj|BAA84612.1| unnamed protein product
  misc_feature (12)..(121): Homolog of NCBI NO: 25294172 NR Description: ras-like small monomeric GTP-binding protein
MGPLTRVLILVEWFSQVDALVYLVDAYDQERFAESKKELDALLSDESLATVPFLILGNKIDIPYAASEDELRFHLGLSNFTTGKGKVNLTDSNVRPLEVFMCSIVRKMGYGEGFKWLSQYIK

SEQ ID NO: 80428 - DNA, 4116 bp, Arabidopsis thaliana
  misc_feature (1)..(4116): Ceres Seq. ID no. 12655805
  misc_feature: MA Experiment ID: 20000439 Result: Up-regulated in Transcription
  misc_feature: MA Experiment 20000439 PARAMETER Experiment Name: At_Roots__P Parameter: Age (day) Value: 14 vs. 21
  misc_feature: MA Experiment 20000439 PARAMETER Experiment Name: At_Roots__P Parameter: Organism Value: A. thaliana
  misc_feature: MA Experiment 20000439 PARAMETER Experiment Name: At_Roots__P Parameter: Tissue Value: Roots vs. Whole Plant
  misc_feature: MA Experiment ID: 20000794 Result: Up-regulated in Transcription
  misc_feature: MA Experiment 20000794 PARAMETER Experiment Name: At_Petals_P Parameter: Age (day) Value: 23-25 days
  misc_feature: MA Experiment 20000794 PARAMETER Experiment Name: At_Petals_P Parameter: Plant Line Value: WS
  misc_feature: MA Experiment 20000794 PARAMETER Experiment Name: At_Petals_P Parameter: Tissue Value: Petals vs. Whole plant
  misc_feature: MA Experiment ID: 20001451 Result: Down-regulated in Transcription
  misc_feature: MA Experiment 20001451 PARAMETER Experiment Name: At_Far-red-induction_P Parameter: Age (day) Value: 7
  misc_feature: MA Experiment 20001451 PARAMETER Experiment Name: At_Far-red-induction_P Parameter: Light Value: Far-red vs. White
  misc_feature: MA Experiment 20001451 PARAMETER Experiment Name: At_Far-red-induction_P Parameter: Organism Value: A. thaliana
  misc_feature: MA Experiment 20001451 PARAMETER Experiment Name: At_Far-red-induction_P Parameter: Plant Line Value: Columbia
  misc_feature: MA Experiment 20001451 PARAMETER Experiment Name: At_Far-red-induction_P Parameter: Timepoint (hr) Value: 24
  misc_feature: MA Experiment 20001451 PARAMETER Experiment Name: At_Far-red-induction_P Parameter: Tissue Value: Whole Plant
atggttggagaaggaggcgcacacaagcctactacaaatgacgcgcttaaataccttagagccgtgaaggctaaatttcaaggtcaacgtgaaaaatatgacgagtttcttcagatcatgatagattataaaactcagagaattgatatatctggtgttataataaggatgaaagaactcttgaaagaacaacaaggattacttttgggtttcaatgccttcttaccaaatggttatatgatcacacatcatgaacaaccttcacagaagaaacctgtcgagttaggggaagcaattagttttattaacaagattaagacaaggtttcagggcgatgatcgtgtatacaaatcagttttagacattttaaacatgtacagaaaggataggaagcccatcaccgcggtctaccgggagaagctaactacaaacgacgctcttgcatatcttaaagccgtgaaggacaaatttcaggatcaacgtggaaaatatgacgagtttctcgaggttatgaagaattttaaatctcaaagagttgatacagctggtgtgataactagggtaaaagaacttttcaaaggacaccaagagttgattttggggtttaatactttcttgcctaagggttttgagatcacacttcaacctgaggatggacaacctccactgaagaaacgtgttgagtttgaggaagctattagctttgttaacaagattaagacaaggtttcagggagatgatcgtgtatacaaatcatttttagacattttaaacatgtacagaagggatagcaagtccatcactgaggtctaccaggaggttgcgatcctatttcgggatcattcagatctgctcgtggagtttactcactttctacctgatacttcagcaacggcctctattccatctgttaaaacttcagttcgtgagagaggggtttctctggctgataagaaggaccggatcattactccacatcctgaccatgactatggtactgaacatattgaccaggaccgggagagacctattaagaaagaaaataaagaacacatgagaggtactaacaaagaaaatgagcatagggatgccagagatttcgaaccacatagcaaaaaagagcaatttctcaacaagaagcagaaactacatattagaggcgatgatcctgctgaaatttccaatcaaagtaaactttctggagcggttcctagttcatctacttatgatgaaaaaggtgccatgaaaagttacagtcaagatctagctattgtcgatagagtaaaggaaaagcttaacgcctcagagtaccaggagtttttacgttgtcttaatctcttttcaaaagagataatcagccgaccagaactgcaatctttggtagggaatttaatcggagtatatcctgacctcatggattcctttatagagtttttggtgcaatgtgaaaagaatgaaggactgctctctggtattctgactaagaaatccttgtggagtgaaggcaaatatcctcaaccgtcactggacaatgatagagaccaggaacataagagagatgacgggcttagagatagagatcatgaaaaggaaaggcttgaaaaagcagctgcaaatctgaaatgggcaaagccaatcagtgaactagatctctcgaactgtgaacaatgcactcctagttatcggttacttccaaagaattacccaatttctattgcaagccagaagacagagatcggtaaactggttcttaatgatcactgggtctccgtcacatcaggaagtgaagattattcatttagccacatgcgtaagaaccagtatgaagagagcctcttcaaatgtgaggatgacaggtttgagctggacatgctattagagtctgtaaattcaacgacaaagcatgtggaagaattattgacaaaaattaacagtaatgaactgaaaaccaacagtcccatccgtgtcgaggatcacctcacagctctaaacttaagatgcatagaacggttgtatggtgatcacgggctcgatgtgatggatgtgctgaagaagaacgtgtctcttgctttacctgttatcctaacacgtttgaaacagaagcaagaagagtgggcaaggtgtcgttctgattttgacaaagtctgggctgagatatatgctaagaattactacaagtcgcttgatcatcgaagtttctacttcaaacagcaggattcaaagaagctgagcatgaaagcattgttggcagagataaaagagattactgaaaagaagcgagaggatgattcacttcttgcatttgcagccggaaatagactatccatttccccagatttggagtttgattatccggatcatgaccttcatgaagatctttaccagctgatcaaatattcgtgtgcagaaatgtgctctaccgaacagttagataaggtaatgaagatttggacaactttcgtggaacaaatatttggtgttccttctcgccctcaaggtgctgaagaccaagaagacgttgtcaagtccatgaaccagaatgtaaagagcggtagttcaagtgctggcgagagtgagggaagtcctcacaattacgctagtgttgccgactctagacgctcaaagtcatctcgaaaagctaatgaacatagtcagttggggcaaactagtaattcggagagggatggcgccgctggtaggacatcagatgccttatgtgagactgctcagcatgagaaaatgctgaagaatgtagttacgtctgatgaaaagcctgaaagaacatccaaagttgaaagagaagaaggtgaactttctccaaatggagactttgaggaagataattttgcagtttatgcaaaaactgattttgagaccttcagcaaagcgaatgatagtactggaaataacattagcggagatagaagtagagaaggggaaccatcttgtctggagacaagggctgagaatgacgctgaaggtgacgaaaacgccgcaagatcatcagaggacagcagaaatgaatatgagaacggtgatgtttctggaacggaatctggtggtggtgaagatccggaggatgatttggataacaataacaaaggagaaagcgaaggtgaggctgaatgtatggctgatgcacatgatgctgaagaaaatgggtctgccttacccgtttcagcacgattcttgctgcatgtaaagcccttagtaaagtatgttccttcagctatagctttgcatgacaaggacaaagactctctgaagaactcccaagttttctatggaaatgattcgttttacgtgcttttcaggctgcaccggatattgtatgagagaatactatcagcaaaagttaactcatcatccccggaaggaaagtggaggacctcaaataccaaaaatcctactgattcctatgctagattcatgactgcactctacaacttacttgatggtacatctgataatgccaagtttgaagatgactgccgagcgataatcgggactcagtcttatattctcttcacattggacaaactgatccataaattcatcaagcatctacaagtagtagtagctgatgagatggacaacaagcttcttcagctttatttttatgagaaatccagaaggcctgaaacgatttttgatgctgtgtattacgataatacccgtgtcctcctccctgatgagaatatttaccgtattgaatgtagattatcaaccccagcgaaactctctattcagcttatgtgcaacggtcttgataagcccgatgtgacatctgtatccattgacccgacctttgcagcttatctccacaatgacttcctctccatacaaccaaatgcaagggaggatcgcagaatctatttaaataggaacaagcgcaaagtttgtcgtgaagatgaacagttatacagcacagatgaagttaagatcaaaaatggtttggagtgtaagatagcttgcggttcttcaaaggtctcctatgtactagaaacagaagatttgttggtgcgagttaaaaagagaagaaaaactttgtgccacaatcaggattcttgggtaaggcaaatgaggttacaatattacaaaaataacttcttgtga

SEQ ID NO: 80429 - protein, 1371 aa, Arabidopsis thaliana
  peptide (1)..(1371): Ceres Seq. ID no. 12655806
  misc_feature (161)..(207): Pfam Name: Paired amphipathic helix repeat Pfam Description: Paired amphipathic helix repeat
  misc_feature (139)..(1054): Homolog of NCBI NO: 6094552 NR Description: unknown protein [Arabidopsis thaliana]
  misc_feature (973)..(1349): Homolog of NCBI NO: 6094552 NR Description: unknown protein [Arabidopsis thaliana]
  misc_feature (470)..(1061): Homolog of NCBI NO: 15223031 NR Description: hypothetical protein; protein id: At1g70060.1
  misc_feature (470)..(1061): Homolog of NCBI NO: 25406027 NR Description: hypothetical protein F20P5.21 [imported] - thaliana >gi|2194132|gb|AAB61107.1| F20P5.21 gene product
  misc_feature (304)..(532): Homolog of NCBI NO: 15223031 NR Description: hypothetical protein; protein id: At1g70060.1
  misc_feature (304)..(532): Homolog of NCBI NO: 25406027 NR Description: hypothetical protein F20P5.21 [imported] - thaliana >gi|2194132|gb|AAB61107.1| F20P5.21 gene product
  misc_feature (1)..(139): Homolog of NCBI NO: 15223031 NR Description: hypothetical protein; protein id: At1g70060.1
  misc_feature (1)..(139): Homolog of NCBI NO: 25406027 NR Description: hypothetical protein F20P5.21 [imported] - thaliana >gi|2194132|gb|AAB61107.1| F20P5.21 gene product
  misc_feature (139)..(398): Homolog of NCBI NO: 15223031 NR Description: hypothetical protein; protein id: At1g70060.1
  misc_feature (139)..(398): Homolog of NCBI NO: 25406027 NR Description: hypothetical protein F20P5.21 [imported] - thaliana >gi|2194132|gb|AAB61107.1| F20P5.21 gene product
MVGEGGAHKPTTNDALKYLRAVKAKFQGQREKYDEFLQIMIDYKTQRIDISGVIIRMKELLKEQQGLLLGFNAFLPNGYMITHHEQPSQKKPVELGEAISFINKIKTRFQGDDRVYKSVLDILNMYRKDRKPITAVYREKLTTNDALAYLKAVKDKFQDQRGKYDEFLEVMKNFKSQRVDTAGVITRVKELFKGHQELILGFNTFLPKGFEITLQPEDGQPPLKKRVEFEEAISFVNKIKTRFQGDDRVYKSFLDILNMYRRDSKSITEVYQEVAILFRDHSDLLVEFTHFLPDTSATASIPSVKTSVRERGVSLADKKDRIITPHPDHDYGTEHIDQDRERPIKKENKEHMRGTNKENEHRDARDFEPHSKKEQFLNKKQKLHIRGDDPAEISNQSKLSGAVPSSSTYDEKGAMKSYSQDLAIVDRVKEKLNASEYQEFLRCLNLFSKEIISRPELQSLVGNLIGVYPDLMDSFIEFLVQCEKNEGLLSGILTKKSLWSEGKYPQPSLDNDRDQEHKRDDGLRDRDHEKERLEKAAANLKWAKPISELDLSNCEQCTPSYRLLPKNYPISIASQKTEIGKLVLNDHWVSVTSGSEDYSFSHMRKNQYEESLFKCEDDRFELDMLLESVNSTTKHVEELLTKINSNELKTNSPIRVEDHLTALNLRCIERLYGDHGLDVMDVLKKNVSLALPVILTRLKQKQEEWARCRSDFDKVWAEIYAKNYYKSLDHRSFYFKQQDSKKLSMKALLAEIKEITEKKREDDSLLAFAAGNRLSISPDLEFDYPDHDLHEDLYQLIKYSCAEMCSTEQLDKVMKIWTTFVEQIFGVPSRPQGAEDQEDVVKSMNQNVKSGSSSAGESEGSPHNYASVADSRRSKSSRKANEHSQLGQTSNSERDGAAGRTSDALCETAQHEKMLKNVVTSDEKPERTSKVEREEGELSPNGDFEEDNFAVYAKTDFETFSKANDSTGNNISGDRSREGEPSCLETRAENDAEGDENAARSSEDSRNEYENGDVSGTESGGGEDPEDDLDNNNKGESEGEAECMADAHDAEENGSALPVSARFLLHVKPLVKYVPSAIALHDKDKDSLKNSQVFYGNDSFYVLFRLHRILYERILSAKVNSSSPEGKWRTSNTKNPTDSYARFMTALYNLLDGTSDNAKFEDDCRAIIGTQSYILFTLDKLIHKFIKHLQVVVADEMDNKLLQLYFYEKSRRPETIFDAVYYDNTRVLLPDENIYRIECRLSTPAKLSIQLMCNGLDKPDVTSVSIDPTFAAYLHNDFLSIQPNAREDRRIYLNRNKRKVCREDEQLYSTDEVKIKNGLECKIACGSSKVSYVLETEDLLVRVKKRRKTLCHNQDSWVRQMRLQYYKNNFL

SEQ ID NO: 80430 - protein, 1332 aa, Arabidopsis thaliana
  peptide (1)..(1332): Ceres Seq. ID no. 12655807
  misc_feature (122)..(168): Pfam Name: Paired amphipathic helix repeat Pfam Description: Paired amphipathic helix repeat
  misc_feature (100)..(1015): Homolog of NCBI NO: 6094552 NR Description: unknown protein [Arabidopsis thaliana]
  misc_feature (934)..(1310): Homolog of NCBI NO: 6094552 NR Description: unknown protein [Arabidopsis thaliana]
  misc_feature (431)..(1022): Homolog of NCBI NO: 15223031 NR Description: hypothetical protein; protein id: At1g70060.1
  misc_feature (431)..(1022): Homolog of NCBI NO: 25406027 NR Description: hypothetical protein F20P5.21 [imported] - thaliana >gi|2194132|gb|AAB61107.1| F20P5.21 gene product
  misc_feature (265)..(493): Homolog of NCBI NO: 15223031 NR Description: hypothetical protein; protein id: At1g70060.1
  misc_feature (265)..(493): Homolog of NCBI NO: 25406027 NR Description: hypothetical protein F20P5.21 [imported] - thaliana >gi|2194132|gb|AAB61107.1| F20P5.21 gene product
  misc_feature (1)..(100): Homolog of NCBI NO: 15223031 NR Description: hypothetical protein; protein id: At1g70060.1
  misc_feature (1)..(100): Homolog of NCBI NO: 25406027 NR Description: hypothetical protein F20P5.21 [imported] - thaliana >gi|2194132|gb|AAB61107.1| F20P5.21 gene product
  misc_feature (100)..(359): Homolog of NCBI NO: 15223031 NR Description: hypothetical protein; protein id: At1g70060.1
  misc_feature (100)..(359): Homolog of NCBI NO: 25406027 NR Description: hypothetical protein F20P5.21 [imported] - thaliana >gi|2194132|gb|AAB61107.1| F20P5.21 gene product
MIDYKTQRIDISGVIIRMKELLKEQQGLLLGFNAFLPNGYMITHHEQPSQKKPVELGEAISFINKIKTRFQGDDRVYKSVLDILNMYRKDRKPITAVYREKLTTNDALAYLKAVKDKFQDQRGKYDEFLEVMKNFKSQRVDTAGVITRVKELFKGHQELILGFNTFLPKGFEITLQPEDGQPPLKKRVEFEEAISFVNKIKTRFQGDDRVYKSFLDILNMYRRDSKSITEVYQEVAILFRDHSDLLVEFTHFLPDTSATASIPSVKTSVRERGVSLADKKDRIITPHPDHDYGTEHIDQDRERPIKKENKEHMRGTNKENEHRDARDFEPHSKKEQFLNKKQKLHIRGDDPAEISNQSKLSGAVPSSSTYDEKGAMKSYSQDLAIVDRVKEKLNASEYQEFLRCLNLFSKEIISRPELQSLVGNLIGVYPDLMDSFIEFLVQCEKNEGLLSGILTKKSLWSEGKYPQPSLDNDRDQEHKRDDGLRDRDHEKERLEKAAANLKWAKPISELDLSNCEQCTPSYRLLPKNYPISIASQKTEIGKLVLNDHWVSVTSGSEDYSFSHMRKNQYEESLFKCEDDRFELDMLLESVNSTTKHVEELLTKINSNELKTNSPIRVEDHLTALNLRCIERLYGDHGLDVMDVLKKNVSLALPVILTRLKQKQEEWARCRSDFDKVWAEIYAKNYYKSLDHRSFYFKQQDSKKLSMKALLAEIKEITEKKREDDSLLAFAAGNRLSISPDLEFDYPDHDLHEDLYQLIKYSCAEMCSTEQLDKVMKIWTTFVEQIFGVPSRPQGAEDQEDVVKSMNQNVKSGSSSAGESEGSPHNYASVADSRRSKSSRKANEHSQLGQTSNSERDGAAGRTSDALCETAQHEKMLKNVVTSDEKPERTSKVEREEGELSPNGDFEEDNFAVYAKTDFETFSKANDSTGNNISGDRSREGEPSCLETRAENDAEGDENAARSSEDSRNEYENGDVSGTESGGGEDPEDDLDNNNKGESEGEAECMADAHDAEENGSALPVSARFLLHVKPLVKYVPSAIALHDKDKDSLKNSQVFYGNDSFYVLFRLHRILYERILSAKVNSSSPEGKWRTSNTKNPTDSYARFMTALYNLLDGTSDNAKFEDDCRAIIGTQSYILFTLDKLIHKFIKHLQVVVADEMDNKLLQLYFYEKSRRPETIFDAVYYDNTRVLLPDENIYRIECRLSTPAKLSIQLMCNGLDKPDVTSVSIDPTFAAYLHNDFLSIQPNAREDRRIYLNRNKRKVCREDEQLYSTDEVKIKNGLECKIACGSSKVSYVLETEDLLVRVKKRRKTLCHNQDSWVRQMRLQYYKNNFL

SEQ ID NO: 80431 - protein, 1315 aa, Arabidopsis thaliana
  peptide (1)..(1315): Ceres Seq. ID no. 12655808
  misc_feature (105)..(151): Pfam Name: Paired amphipathic helix repeat Pfam Description: Paired amphipathic helix repeat
  misc_feature (83)..(998): Homolog of NCBI NO: 6094552 NR Description: unknown protein [Arabidopsis thaliana]
  misc_feature (917)..(1293): Homolog of NCBI NO: 6094552 NR Description: unknown protein [Arabidopsis thaliana]
  misc_feature (414)..(1005): Homolog of NCBI NO: 15223031 NR Description: hypothetical protein; protein id: At1g70060.1
  misc_feature (414)..(1005): Homolog of NCBI NO: 25406027 NR Description: hypothetical protein F20P5.21 [imported] - thaliana >gi|2194132|gb|AAB61107.1| F20P5.21 gene product
  misc_feature (248)..(476): Homolog of NCBI NO: 15223031 NR Description: hypothetical protein; protein id: At1g70060.1
  misc_feature (248)..(476): Homolog of NCBI NO: 25406027 NR Description: hypothetical protein F20P5.21 [imported] - thaliana >gi|2194132|gb|AAB61107.1| F20P5.21 gene product
  misc_feature (1)..(83): Homolog of NCBI NO: 15223031 NR Description: hypothetical protein; protein id: At1g70060.1
  misc_feature (1)..(83): Homolog of NCBI NO: 25406027 NR Description: hypothetical protein F20P5.21 [imported] - thaliana >gi|2194132|gb|AAB61107.1| F20P5.21 gene product
  misc_feature (83)..(342): Homolog of NCBI NO: 15223031 NR Description: hypothetical protein; protein id: At1g70060.1
  misc_feature (83)..(342): Homolog of NCBI NO: 25406027 NR Description: hypothetical protein F20P5.21 [imported] - thaliana >gi|2194132|gb|AAB61107.1| F20P5.21 gene product
MKELLKEQQGLLLGFNAFLPNGYMITHHEQPSQKKPVELGEAISFINKIKTRFQGDDRVYKSVLDILNMYRKDRKPITAVYREKLTTNDALAYLKAVKDKFQDQRGKYDEFLEVMKNFKSQRVDTAGVITRVKELFKGHQELILGFNTFLPKGFEITLQPEDGQPPLKKRVEFEEAISFVNKIKTRFQGDDRVYKSFLDILNMYRRDSKSITEVYQEVAILFRDHSDLLVEFTHFLPDTSATASIPSVKTSVRERGVSLADKKDRIITPHPDHDYGTEHIDQDRERPIKKENKEHMRGTNKENEHRDARDFEPHSKKEQFLNKKQKLHIRGDDPAEISNQSKLSGAVPSSSTYDEKGAMKSYSQDLAIVDRVKEKLNASEYQEFLRCLNLFSKEIISRPELQSLVGNLIGVYPDLMDSFIEFLVQCEKNEGLLSGILTKKSLWSEGKYPQPSLDNDRDQEHKRDDGLRDRDHEKERLEKAAANLKWAKPISELDLSNCEQCTPSYRLLPKNYPISIASQKTEIGKLVLNDHWVSVTSGSEDYSFSHMRKNQYEESLFKCEDDRFELDMLLESVNSTTKHVEELLTKINSNELKTNSPIRVEDHLTALNLRCIERLYGDHGLDVMDVLKKNVSLALPVILTRLKQKQEEWARCRSDFDKVWAEIYAKNYYKSLDHRSFYFKQQDSKKLSMKALLAEIKEITEKKREDDSLLAFAAGNRLSISPDLEFDYPDHDLHEDLYQLIKYSCAEMCSTEQLDKVMKIWTTFVEQIFGVPSRPQGAEDQEDVVKSMNQNVKSGSSSAGESEGSPHNYASVADSRRSKSSRKANEHSQLGQTSNSERDGAAGRTSDALCETAQHEKMLKNVVTSDEKPERTSKVEREEGELSPNGDFEEDNFAVYAKTDFETFSKANDSTGNNISGDRSREGEPSCLETRAENDAEGDENAARSSEDSRNEYENGDVSGTESGGGEDPEDDLDNNNKGESEGEAECMADAHDAEENGSALPVSARFLLHVKPLVKYVPSAIALHDKDKDSLKNSQVFYGNDSFYVLFRLHRILYERILSAKVNSSSPEGKWRTSNTKNPTDSYARFMTALYNLLDGTSDNAKFEDDCRAIIGTQSYILFTLDKLIHKFIKHLQVVVADEMDNKLLQLYFYEKSRRPETIFDAVYYDNTRVLLPDENIYRIECRLSTPAKLSIQLMCNGLDKPDVTSVSIDPTFAAYLHNDFLSIQPNAREDRRIYLNRNKRKVCREDEQLYSTDEVKIKNGLECKIACGSSKVSYVLETEDLLVRVKKRRKTLCHNQDSWVRQMRLQYYKNNFL

SEQ ID NO: 80432 - DNA, 575 bp, Arabidopsis thaliana
  misc_feature (1)..(575): Ceres Seq. ID no. 12655872
  misc_feature: MA Experiment ID: 20000185 Result: Down-regulated in Transcription
  misc_feature: MA Experiment 20000185 PARAMETER Experiment Name: At_Roots__P Parameter: Age (day) Value: 7 vs. 21
  misc_feature: MA Experiment 20000185 PARAMETER Experiment Name: At_Roots__P Parameter: Organism Value: A. thaliana
  misc_feature: MA Experiment 20000185 PARAMETER Experiment Name: At_Roots__P Parameter: Tissue Value: Roots vs. Whole Plant
  misc_feature: MA Experiment ID: 20000234 Result: Up-regulated in Transcription
  misc_feature: MA Experiment 20000234 PARAMETER Experiment Name: At_Siliques_P Parameter: Age (day) Value: 21
  misc_feature: MA Experiment 20000234 PARAMETER Experiment Name: At_Siliques_P Parameter: Organism Value: A. thaliana
  misc_feature: MA Experiment 20000234 PARAMETER Experiment Name: At_Siliques_P Parameter: Plant Line Value: WS
  misc_feature: MA Experiment 20000234 PARAMETER Experiment Name: At_Siliques_P Parameter: Tissue Value: Less Than 5mm Siliques vs. Whole Plant
  misc_feature: MA Experiment ID: 20000264 Result: Up-regulated in Transcription
  misc_feature: MA Experiment 20000264 PARAMETER Experiment Name: At_Open_Flower_P Parameter: Age (day) Value: 21
  misc_feature: MA Experiment 20000264 PARAMETER Experiment Name: At_Open_Flower_P Parameter: Plant Line Value: WS
  misc_feature: MA Experiment 20000264 PARAMETER Experiment Name: At_Open_Flower_P Parameter: Tissue Value: Open Flower vs. Whole Plant
  misc_feature: MA Experiment ID: 20000286 Result: Up-regulated in Transcription
  misc_feature: MA Experiment 20000286 PARAMETER Experiment Name: At_Open_Flower_P Parameter: Age (day) Value: 21
  misc_feature: MA Experiment 20000286 PARAMETER Experiment Name: At_Open_Flower_P Parameter: Plant Line Value: WS
  misc_feature: MA Experiment 20000286 PARAMETER Experiment Name: At_Open_Flower_P Parameter: Tissue Value: Half Open vs. Whole Plant
  misc_feature: MA Experiment ID: 20000794 Result: Up-regulated in Transcription
  misc_feature: MA Experiment 20000794 PARAMETER Experiment Name: At_Petals_P Parameter: Age (day) Value: 23-25 days
  misc_feature: MA Experiment 20000794 PARAMETER Experiment Name: At_Petals_P Parameter: Plant Line Value: WS
  misc_feature: MA Experiment 20000794 PARAMETER Experiment Name: At_Petals_P Parameter: Tissue Value: Petals vs. Whole plant
  misc_feature: MA Experiment ID: 20001757 Result: Down-regulated in Transcription
  misc_feature: MA Experiment 20001757 PARAMETER Experiment Name: At_50mM_NH4NO3_L-to-H_P Parameter: Timepoint (hr) Value: 6
  misc_feature: MA Experiment 20001757 PARAMETER Experiment Name: At_50mM_NH4NO3_L-to-H_P Parameter: Tissue Value: Leaf
  misc_feature: MA Experiment 20001757 PARAMETER Experiment Name: At_50mM_NH4NO3_L-to-H_P Parameter: Treatment Value: 50mM NH4NO3 vs 100mM Mannitol
  misc_feature: MA Experiment ID: 20001905 Result: Up-regulated in Transcription
  misc_feature: MA Experiment 20001905 PARAMETER Experiment Name: At_Drought_Reproduction_P Parameter: Age (day) Value: 40
  misc_feature: MA Experiment 20001905 PARAMETER Experiment Name: At_Drought_Reproduction_P Parameter: Organism Value: A. thaliana
  misc_feature: MA Experiment 20001905 PARAMETER Experiment Name: At_Drought_Reproduction_P Parameter: Plant Line Value: WS
  misc_feature: MA Experiment 20001905 PARAMETER Experiment Name: At_Drought_Reproduction_P Parameter: Timepoint (day) Value: 10
  misc_feature: MA Experiment 20001905 PARAMETER Experiment Name: At_Drought_Reproduction_P Parameter: Tissue Value: Rosettes
  misc_feature: MA Experiment 20001905 PARAMETER Experiment Name: At_Drought_Reproduction_P Parameter: Treatment Value: Drought vs. No Drought
atcacaatcaataaacctcaaaccctaaaataaattaaacgagttctacgtaagaaggagagagagaagaatgggtcgccaaaacattgtcgtcgtggttgccctcgtcttcatggccatcattggccttgccgcagctgcctcctctccatctccttcagcgtctccctccaaagctccagctgcctccaaaaccgatcatgtcgaggctccagtcaccgatgaccaaatcggaaccaccgatgacgatgcagctcctactcctggtgacggtgacgttgcagtggctggtcctctaggaagtgactcctcgtacgacaatgcgcctacaggctctgctgattctgccaaaagcggtgcggcagctcttggcgtctctgcggtcgtcgttggtgtacatccattgctggttctttcttgttactctaagttgggcattgttttatgataagaaggttattttaaacgaagattatttatatgtaaggatgattgtgatgatcttgttgtaatttgtttctcctttgttaggagaaacgttgtctttgtaataatactgaaaaaaaaaacttttc

SEQ ID NO: 80433 - protein, 125 aa, Arabidopsis thaliana
  peptide (1)..(125): Ceres Seq. ID no. 12655873
  misc_feature (1)..(125): Homolog of NCBI NO: 15221772 NR Description: putative agp1; protein id: At1g24520.1, supported
  misc_feature (1)..(119): Homolog of NCBI NO: 780177 NR Description: agp1 [Arabidopsis thaliana]
  misc_feature (1)..(109): Homolog of NCBI NO: 25355278 NR Description: protein F21J9.18 [imported] - Arabidopsis >gi|9743338|gb|AAF97962.1|AC000103_12 F21J9.18 [Arabidopsis
  misc_feature (1)..(109): Homolog of NCBI NO: 21592730 NR Description: putative agp1 [Arabidopsis thaliana]
  misc_feature (1)..(109): Homolog of NCBI NO: 1168619 NR Description: ANTHER-SPECIFIC PROTEIN BCP1
  misc_feature (1)..(109): Homolog of NCBI NO: 486757 NR Description: anther-specific protein (clone Bgp1) - field >gi|311938|emb|CAA48292.1| bgp1 [Brassica rapa]
  misc_feature (1)..(109): Homolog of NCBI NO: 18404806 NR Description: expressed protein; protein id: At3g26110.1,
  misc_feature (1)..(109): Homolog of NCBI NO: 21536506 NR Description: unknown [Arabidopsis thaliana]
MGRQNIVVVVALVFMAIIGLAAAASSPSPSASPSKAPAASKTDHVEAPVTDDQIGTTDDDAAPTPGDGDVAVAGPLGSDSSYDNAPTGSADSAKSGAAALGVSAVVVGVHPLLVLSCYSKLGIVL

SEQ ID NO: 80434 - protein, 111 aa, Arabidopsis thaliana
  peptide (1)..(111): Ceres Seq. ID no. 12655874
  misc_feature (1)..(111): Homolog of NCBI NO: 15221772 NR Description: putative agp1; protein id: At1g24520.1, supported
  misc_feature (1)..(105): Homolog of NCBI NO: 780177 NR Description: agp1 [Arabidopsis thaliana]
  misc_feature (1)..(95): Homolog of NCBI NO: 25355278 NR Description: protein F21J9.18 [imported] - Arabidopsis >gi|9743338|gb|AAF97962.1|AC000103_12 F21J9.18 [Arabidopsis
  misc_feature (1)..(95): Homolog of NCBI NO: 21592730 NR Description: putative agp1 [Arabidopsis thaliana]
  misc_feature (1)..(95): Homolog of NCBI NO: 1168619 NR Description: ANTHER-SPECIFIC PROTEIN BCP1
  misc_feature (1)..(95): Homolog of NCBI NO: 486757 NR Description: anther-specific protein (clone Bgp1) - field >gi|311938|emb|CAA48292.1| bgp1 [Brassica rapa]
  misc_feature (1)..(95): Homolog of NCBI NO: 18404806 NR Description: expressed protein; protein id: At3g26110.1,
  misc_feature (1)..(95): Homolog of NCBI NO: 21536506 NR Description: unknown [Arabidopsis thaliana]
MAIIGLAAAASSPSPSASPSKAPAASKTDHVEAPVTDDQIGTTDDDAAPTPGDGDVAVAGPLGSDSSYDNAPTGSADSAKSGAAALGVSAVVVGVHPLLVLSCYSKLGIVL

SEQ ID NO: 80435 - protein, 63 aa, Arabidopsis thaliana
  peptide (1)..(63): Ceres Seq. ID no. 12655875
MRLQALLILPKAVRQLLASLRSSLVYIHCWFFLVTLSWALFYDKKVILNEDYLYVRMIVMILL

SEQ ID NO: 80436 - DNA, 1454 bp, Arabidopsis thaliana
  misc_feature (1)..(1454): Ceres Seq. ID no. 12655876
  misc_feature: MA Experiment ID: 108463 Result: Up-regulated in Transcription
  misc_feature: MA Experiment 108463 PARAMETER Experiment Name: At_Germinating_Seeds_cDNA_P Parameter: Age (day) Value: 3 vs. 0
  misc_feature: MA Experiment 108463 PARAMETER Experiment Name: At_Germinating_Seeds_cDNA_P Parameter: Tissue Value: Germinating Seeds
  misc_feature: MA Experiment ID: 108464 Result: Up-regulated in Transcription
  misc_feature: MA Experiment 108464 PARAMETER Experiment Name: At_Germinating_Seeds_cDNA_P Parameter: Age (day) Value: 4 vs. 0
  misc_feature: MA Experiment 108464 PARAMETER Experiment Name: At_Germinating_Seeds_cDNA_P Parameter: Tissue Value: Germinating Seeds
  misc_feature: MA Experiment ID: 108572 Result: Down-regulated in Transcription
  misc_feature: MA Experiment 108572 PARAMETER Experiment Name: At_Drought_cDNA_P Parameter: Timepoint (hr) Value: 1
  misc_feature: MA Experiment 108572 PARAMETER Experiment Name: At_Drought_cDNA_P Parameter: Tissue Value: Aerial
  misc_feature: MA Experiment 108572 PARAMETER Experiment Name: At_Drought_cDNA_P Parameter: Treatment Value: Drought vs. No Drought
  misc_feature: MA Experiment ID: 108579 Result: Up-regulated in Transcription
  misc_feature: MA Experiment 108579 PARAMETER Experiment Name: At_4deg_Cold_cDNA_P Parameter: Temperature (deg C) Value: 4 vs. 22
  misc_feature: MA Experiment 108579 PARAMETER Experiment Name: At_4deg_Cold_cDNA_P Parameter: Timepoint (hr) Value: 6
  misc_feature: MA Experiment 108579 PARAMETER Experiment Name: At_4deg_Cold_cDNA_P Parameter: Tissue Value: Aerial
  misc_feature: MA Experiment ID: 108595 Result: Up-regulated in Transcription
  misc_feature: MA Experiment 108595 PARAMETER Experiment Name: At_Ler-pi_Ovule_cDNA_P Parameter: Plant Line Value: null
  misc_feature: MA Experiment ID: 20000184 Result: Up-regulated in Transcription
  misc_feature: MA Experiment 20000184 PARAMETER Experiment Name: At_Shoots__P Parameter: Age (day) Value: 7
  misc_feature: MA Experiment 20000184 PARAMETER Experiment Name: At_Shoots__P Parameter: Tissue Value: Shoots vs. Whole Plant
  misc_feature: MA Experiment ID: 20000224 Result: Down-regulated in Transcription
  misc_feature: MA Experiment ID: 20001247 Result: Up-regulated in Transcription
  misc_feature: MA Experiment 20001247 PARAMETER Experiment Name: At_Far-red-induction_P Parameter: Age (day) Value: 7
  misc_feature: MA Experiment 20001247 PARAMETER Experiment Name: At_Far-red-induction_P Parameter: Light Value: Far-red vs. White
  misc_feature: MA Experiment 20001247 PARAMETER Experiment Name: At_Far-red-induction_P Parameter: Organism Value: A. thaliana
  misc_feature: MA Experiment 20001247 PARAMETER Experiment Name: At_Far-red-induction_P Parameter: Plant Line Value: Columbia
  misc_feature: MA Experiment 20001247 PARAMETER Experiment Name: At_Far-red-induction_P Parameter: Timepoint (hr) Value: 1
  misc_feature: MA Experiment 20001247 PARAMETER Experiment Name: At_Far-red-induction_P Parameter: Tissue Value: Whole Plant
gaatcactttagttatcaatcgatagaaacgcctttcaattaccaaacatcgaaaccaccatgagggttatctcaaaactgttcgattccgacagaagacgaatacccaaatcgccgaagcatttggattccggcgaaagcgccacgtcatcttcctcactcagcgacgtaaccaccggctcaagcagccttcatagcagtctctctctccaaacgcttccttcagttccctctcttcagaaaatcccatccaccaccgtcaccgtctctcactccgttacctcctcgtttaaactccgtgaacggagtcttcctgtaacttgtctcgccgtcaatggtggttacctcttcgccgtgtctggacacgaagtaagtatctacgatcgcgacatgtgtgctcatctcgacacattcaacggccaagatcctttctcaggaaccgtgaagtccgtcggcttctccggtgagaaaatcttcacggcgcatcaagacggtaaaatcggagtttggaaacttacggcgaaaagcggttataaacagttaacgacgcttcctactttaaacgaccgtttacgacgtttcgctcttcctaaaaactacgttcaagtacgccgtcataagaaacgtctctggatcgaacatgctgacgccgttactgctctcgccgttagtgacggattcatttactctgtttcttgggataagactttgaagatatggagagcctccgatcttcgttgcaaagaatcaatcaaagctcacgatgacgccgttaatgccattgccgtttctactaacggcaccgtttacactggatccgcggatagacgtatccgggtttgggccaaaccgaccggtgagaaacgtcacacgttagttgcgactttagagaagcacaaatcggcggttaacgcattagcattaaacgacgacggatcggttttgttctccggttcgtgtgaccggtctattttggtttgggagagagaggatacttccaattacatggcggtgagaggtgcgttgaggggacatgataaagcaatacttagcttgttcaacgtctctgatttgctactcagtggatcagctgatcggacggtcaggatttggcgacgtggacccgattctagttatagttgtttggaggttctttccggtcataccaagccggttaagtcgttggcggcggttagagaaaaggagttagacgatgtcgtttcgatcattagtggaagtcttgacggagaggttaaatgttggaaggtgtccgtcaccaaaccggataattcattttacacgaatctcgttcaataaattagtggcattaatttgttcttttgtcggtgtgttttatttatttgttagtactttagtattgttcggcgaacaaacaatttggcgtttttcagaagtcatttacacaaaatgagtaagaaataattgagcattat

SEQ ID NO: 80437 - protein, 418 aa, Arabidopsis thaliana; identical to SEQ ID NO: 35445
  peptide (1)..(418): Ceres Seq. ID no. 12655877
  misc_feature (1)..(418): Homolog of NCBI NO: 18395507 NR Description: G-protein beta family; protein id: At1g24530.1, by cDNA: gi_19310648 [Arabidopsis thaliana] F21J9.19 [Arabidopsis thaliana] >gi|15028341|gb|AAK76647.1|
  misc_feature (26)..(406): Homolog of NCBI NO: 15221675 NR Description: G-protein beta family; protein id: At1g24130.1
  misc_feature (116)..(405): Homolog of NCBI NO: 15240616 NR Description: G-protein beta family; protein id: At5g50120.1
  misc_feature (26)..(404): Homolog of NCBI NO: 15225317 NR Description: G-protein beta family; protein id: At2g26490.1
  misc_feature (125)..(409): Homolog of NCBI NO: 31126785 NR Description: putative WD repeat-protein [Oryza sativa
  misc_feature (86)..(404): Homolog of NCBI NO: 15230244 NR Description: hypothetical protein; protein id: At3g18950.1
  misc_feature (86)..(404): Homolog of NCBI NO: 15222143 NR Description: En/Spm-like transposon protein, putative; protein At1g49450.1, supported by cDNA: gi_17979258 [Arabidopsis >gi|25405310|pir||B96531 hypothetical protein F13F21.11
  misc_feature (86)..(404): Homolog of NCBI NO: 17979259 NR Description: At1g49450/F13F21_11 [Arabidopsis thaliana]
  misc_feature (26)..(418): Homolog of NCBI NO: 15231088 NR Description: G-protein beta family; protein id: At3g51930.1
  misc_feature (40)..(408): Homolog of NCBI NO: 15229740 NR Description: G-protein beta family; protein id: At3g50390.1

SEQ ID NO: 80438 - protein, 308 aa, Arabidopsis thaliana; identical to SEQ ID NO: 35446
  peptide (1)..(308): Ceres Seq. ID no. 12655878
  misc_feature (1)..(308): Homolog of NCBI NO: 18395507 NR Description: G-protein beta family; protein id: At1g24530.1, by cDNA: gi_19310648 [Arabidopsis thaliana] F21J9.19 [Arabidopsis thaliana] >gi|15028341|gb|AAK76647.1|
  misc_feature (1)..(296): Homolog of NCBI NO: 15221675 NR Description: G-protein beta family; protein id: At1g24130.1
  misc_feature (6)..(295): Homolog of NCBI NO: 15240616 NR Description: G-protein beta family; protein id: At5g50120.1
  misc_feature (1)..(294): Homolog of NCBI NO: 15225317 NR Description: G-protein beta family; protein id: At2g26490.1
  misc_feature (15)..(299): Homolog of NCBI NO: 31126785 NR Description: putative WD repeat-protein [Oryza sativa
  misc_feature (1)..(294): Homolog of NCBI NO: 15230244 NR Description: hypothetical protein; protein id: At3g18950.1
  misc_feature (1)..(294): Homolog of NCBI NO: 15222143 NR Description: En/Spm-like transposon protein, putative; protein At1g49450.1, supported by cDNA: gi_17979258 [Arabidopsis >gi|25405310|pir||B96531 hypothetical protein F13F21.11
  misc_feature (1)..(294): Homolog of NCBI NO: 17979259 NR Description: At1g49450/F13F21_11 [Arabidopsis thaliana]
  misc_feature (1)..(308): Homolog of NCBI NO: 15231088 NR Description: G-protein beta family; protein id: At3g51930.1
  misc_feature (1)..(298): Homolog of NCBI NO: 15229740 NR Description: G-protein beta family; protein id: At3g50390.1

SEQ ID NO: 80439 - DNA, 5097 bp, Arabidopsis thaliana
  misc_feature (1)..(5097): Ceres Seq. ID no. 12655895
  misc_feature: MA Experiment ID: 20000794 Result: Up-regulated in Transcription
  misc_feature: MA Experiment 20000794 PARAMETER Experiment Name: At_Petals_P Parameter: Age (day) Value: 23-25 days
  misc_feature: MA Experiment 20000794 PARAMETER Experiment Name: At_Petals_P Parameter: Plant Line Value: WS
  misc_feature: MA Experiment 20000794 PARAMETER Experiment Name: At_Petals_P Parameter: Tissue Value: Petals vs. Whole plant
atggcttgtggaatcacagacagtccctcaaaggcttttccaagagcgttgcgagatgtaaaggataggagcgggcaagaggagtttctctgggaagctgatatggttaaaataaaggcccaagatttgaaggggaaagaggtgcgattaaacactcgtcttctgtaccagcagacaaagttcaacttactccgtgaagaaagcgagggatatgccaaattggccactcttttgtgccgaggatctgcaagttcttcgcacaatgcatcagcagcaacgatgggaattatcaagtcattaattgggcattttgacctggatccaaaccgtgttttcgacattgttttagattgctttgaactcgaacaagattacgacacatttctcaatctaattcctatctttcccaagtctcatgcttcacaaattcttggatttaaattccaatactatcagagactagaggtgaatagccctgttccagttgggctctataagcttacagccttgctagtaaaggaagaatatgcacatctgctacctaaggacgaggaagtttttgaggattataatgtttcttctgcaaagcggtttgaagaggccaataaaattggaaagattaatctcgctgctactgggaaggatcttatggaagatgagaagcaaggagatgtcacagtagatctctttgctgctttagacatggaaagtgaagctgttactgagcgattaccagagcttgaaaataatcagactctgggcctacttaatggtttcctctctgtggacgattggtatcatgcaaatatcttgttcgagcgtcttgcacctcttaatccagtggcacacgatcagatctgtagtgggttgtttaggcttatagagaagtcaatcactcattcttatcgcattgctcgtcagacacgttttcaaagttcttcttctgcgagcacagttaagctcacacccactgctaatacgacagctaataggacttatctagatcttccgaaagaagtgtttcaaatgcttgttactgttggaccctacctctaccgcaatacacaattgttgcagaagatttgtagagtattaagggcttactacttgtcggccttggatcttgttcgcgatgggtcaaatcaagaaggtagtgcatatgaagtttctcgtgggcacctgaaagaagttaggttgagagtggaagaagctctaggaacatgtcttctgccatcgttacagttagtacctgcaaatccagcagttggtcatgagatttgggaagtgatgagtctccttccatatgaggctcgttatcgcttatatggtgagtgggaaaaggacgatgagcagaatcctttgttgttggcagcaaggcaagtggcaaagttggatactagaagaattctgaaacggcttgcaaaagaaaatctgaagcagttaggaaggatggtggcaaaactagctcatgccaatcccatgacggtgcttcggacaattgtaaatcagattgaagcatacagagatatgattgctcctgttgtggatgccttcaagtacttgacacagcttgagtatgatatcctggaatatgtagtgattgagagactggcacaaagcggacgagataaacttaaagacgacgggattaatttatcagactggcttcaatctttggcatccttttggggtcacctgtgtaagaagtatccatcaatggagttgaggggtctttttcagtatctcgtaaaccagttaaagaggggccaagggattgagcttgttcttctccaggaactggtccagcagatggcaaatgtacaatacactgagaaccttactgaagatcagttggatgccatggcaggaagtgagactttacgttatcatgcaacatcatttggcatgatgcgaaacaacaaggcacttatcaaatcatcaaaccgtctacgagattcgttacttccaaatgatgaaccaaagttagctatcccccttttgttacttatcgcgcagcatcgttctctagttgtggtgaatgcggatgcgccttatattaagatggtcactgaacagttcgacagatgtcatggaattcttctccaatacgtggacttcctttctagtgctgtcagtcctactactgcttatgctcggctggtaccttcgcttgatgagcttgttcatacataccatctcgaagcagaggtcgcatttttggtatttcgccctgtgatgaggctcttcaagtgtcgacggaatggtgatgtttcatggcctttagatagtggggaatctatggatgcggattctgaaatatcagagtctgagagttccatgattctcgatgtcggtacatctgaaaaagctgtaacgtggtctgatgttcttgatacagtaaggacaatgctgccctcaaaagcttggaatagtctatcgccagacctctacgctacattttgggggcttacgctttatgatctccatgtccccagaaatcgttatgagtctgagatatctaaacagcatactgcccttaagacacttgaagaggttgctgataattctagctcagcaattaccaagaggaagaaagagaaggaaaggattcaagagtctcttgatcgtctaaccggtgagctgaaaaagcatgaagaacatgtggcttctgtccgtagaaggctttcacgtgaaaaggatacatggttgagctcctgtccagatactttgaagattaatatggagttcctgcagcgttgtattttccctcgttgcacatttagcatggcagattctgtgtactgcgcgatgtttgtaaatatgcttcactcgcttggaacacccttttttaacactgtcaaccacattgatgtcctgatatgtaaaacgctgcaaccaatgatctgctgctgtactgaatatgaagttggaagactggggaggtttttgtttgagaccttgaagattgcataccactggaagagtaaagaatcagtctatgaacatgagtgcggaaacatgccagggtttgctgtttattatagatacccgaacagccagcgtgtcacatttggacaatttgtgaagtatttagctatcacgtgttctgcttcaattaatggtaacaaagtcttgttccttctgtgtttcatgtctgtttcatctgttgatctgaaagccaagattaaaaatgatgagcgagaggaccttaaggtcttagcaactggtgttggggctgctctgtctgcaagaaaaccacattgggttacagacgaagaatttagcatgggcttccttgaactaaaggctccgccagtacatactccaaaacatgcttcttcccagaatggcttgttagttggtgtctcccaaggtgaaccaactggggaaagagctactgttaaccagcagcctgagtctggtggattgggcaaggaccagatgttgaaaactaaacctctagatggaagaacggaaagtataccttcaaaatctgatcaaggacatctaaaatcaaagggaggcaatccattggattcccaaccatccatatctaagaagtcaatggaacaaaaggaaacagatgaaacacccagaatatctgacgagaatcctgtcaaacctgcttcaaaatattctgaagccgagttaaaagcttcctctaaacgaggtgcgtcagtgaacaaatctgcaaagcaagattttggaaaagatgatggaaagtccggtaaagctattggaagaacatccacagctgacaaagatcttaattatctggagagcaggcaatcaggtttgaccaaagctctttccagcacagcagccaatggtagcatagctactgggtcgtccaaagtaaaagatgatggcgctgaagctttggatgcacaaaagcaatcttctcggactgttcattcccctaggcatgaaattgtcacttctgtgagatccagtgataggttacaaaaacgagctaatgctgttgaagatagtgaaaggataagtaaacgtcgtaaaggagatgctgagcacaaagagcatgacagtgagcctcgatcgagtgaccgagatagatcagtcgaggcccgattggatttaaacaaaacagttactgatgaccaaagcacccatagggatcaagatagatcaaaggataagggttatgaaagacaggatcgagaccacagagaaagagtcgatcgttctgataaacctcgtggagatgatgttgagaaagcacgagacaaatccttggaacgtcatggtagagaacgctcagttgagaagggtctagataaaggaacaactaggagttatgatagaaacaaggatgaaagaaacaaagatgatagaagcaaactgcgtcatagtgaagcatcacttgagaaatctcatcctgatgaccattttcattctcaaggtttacccccacctccacctttacctcctaacatcattccacattctatggccgcaaaagaagacctcgaaagaagggctggcggtgcaaggcattctcagaggctttccccgaggcatgaagaaagagagaaacgacgctctgaagagaatttatcagtttctgtggatgatgcaaaacgtagaagagatgatgatattagggaccgaaagcgagatgaccgagaaacaatcactgtgaagggagaagaaagagaaagggaaagggaaagagagagggaaagagaaaaaagcctccctttgaaagaggattttgaagcctccaagagaaggaagcttaagagggagcaacaggtcccatctgcagagccaggagaatactctcctatgccacatcattcgtctttatcgaccagtatgggaccatcatcgtacgaaggcagagagcggaagagcagtagtatgattcaacacggaggttatcttgaagagccaagcatcagacttcttggaaaagaagcttccagcaaaatggctcgtcgtgatcctgacccaattgcaaaatccaaatccaagaatagcaatttccttgacattgctctagaatctatgaccgtgaatgggaagacgacaagaggagagcagagcggaagcggagagatcggaagtagagagtga

SEQ ID NO: 80440 - protein, 1698 aa, Arabidopsis thaliana
  peptide (1)..(1698): Ceres Seq. ID no. 12655896
  misc_feature (1131)..(1593): Pfam Name: Caldesmon Pfam Description: Caldesmon
  misc_feature (10)..(566): Homolog of NCBI NO: 27311827 NR Description: F5A9.22 [Arabidopsis thaliana]
  misc_feature (12)..(1018): Homolog of NCBI NO: 24581012 NR Description: CG31671-PA [Drosophila melanogaster]
  misc_feature (27)..(876): Homolog of NCBI NO: 17552208 NR Description: Tho2 (164.4 kD) [Caenorhabditis elegans]
  misc_feature (796)..(1396): Homolog of NCBI NO: 17552208 NR Description: Tho2 (164.4 kD) [Caenorhabditis elegans]
  misc_feature (1316)..(1543): Homolog of NCBI NO: 17552208 NR Description: Tho2 (164.4 kD) [Caenorhabditis elegans]
  misc_feature (27)..(1358): Homolog of NCBI NO: 39584988 NR Description: Hypothetical protein CBG09105 [Caenorhabditis
  misc_feature (409)..(887): Homolog of NCBI NO: 27802720 NR Description: SI:bZ1O18.2 (novel protein similar to human THO
  misc_feature (20)..(175): Homolog of NCBI NO: 27802720 NR Description: SI:bZ1O18.2 (novel protein similar to human THO
  misc_feature (249)..(368): Homolog of NCBI NO: 27802720 NR Description: SI:bZ1O18.2 (novel protein similar to human THO
  misc_feature (387)..(792): Homolog of NCBI NO: 40744755 NR Description: hypothetical protein AN2226.2 [Aspergillus
MACGITDSPSKAFPRALRDVKDRSGQEEFLWEADMVKIKAQDLKGKEVRLNTRLLYQQTKFNLLREESEGYAKLATLLCRGSASSSHNASAATMGIIKSLIGHFDLDPNRVFDIVLDCFELEQDYDTFLNLIPIFPKSHASQILGFKFQYYQRLEVNSPVPVGLYKLTALLVKEEYAHLLPKDEEVFEDYNVSSAKRFEEANKIGKINLAATGKDLMEDEKQGDVTVDLFAALDMESEAVTERLPELENNQTLGLLNGFLSVDDWYHANILFERLAPLNPVAHDQICSGLFRLIEKSITHSYRIARQTRFQSSSSASTVKLTPTANTTANRTYLDLPKEVFQMLVTVGPYLYRNTQLLQKICRVLRAYYLSALDLVRDGSNQEGSAYEVSRGHLKEVRLRVEEALGTCLLPSLQLVPANPAVGHEIWEVMSLLPYEARYRLYGEWEKDDEQNPLLLAARQVAKLDTRRILKRLAKENLKQLGRMVAKLAHANPMTVLRTIVNQIEAYRDMIAPVVDAFKYLTQLEYDILEYVVIERLAQSGRDKLKDDGINLSDWLQSLASFWGHLCKKYPSMELRGLFQYLVNQLKRGQGIELVLLQELVQQMANVQYTENLTEDQLDAMAGSETLRYHATSFGMMRNNKALIKSSNRLRDSLLPNDEPKLAIPLLLLIAQHRSLVVVNADAPYIKMVTEQFDRCHGILLQYVDFLSSAVSPTTAYARLVPSLDELVHTYHLEAEVAFLVFRPVMRLFKCRRNGDVSWPLDSGESMDADSEISESESSMILDVGTSEKAVTWSDVLDTVRTMLPSKAWNSLSPDLYATFWGLTLYDLHVPRNRYESEISKQHTALKTLEEVADNSSSAITKRKKEKERIQESLDRLTGELKKHEEHVASVRRRLSREKDTWLSSCPDTLKINMEFLQRCIFPRCTFSMADSVYCAMFVNMLHSLGTPFFNTVNHIDVLICKTLQPMICCCTEYEVGRLGRFLFETLKIAYHWKSKESVYEHECGNMPGFAVYYRYPNSQRVTFGQFVKYLAITCSASINGNKVLFLLCFMSVSSVDLKAKIKNDEREDLKVLATGVGAALSARKPHWVTDEEFSMGFLELKAPPVHTPKHASSQNGLLVGVSQGEPTGERATVNQQPESGGLGKDQMLKTKPLDGRTESIPSKSDQGHLKSKGGNPLDSQPSISKKSMEQKETDETPRISDENPVKPASKYSEAELKASSKRGASVNKSAKQDFGKDDGKSGKAIGRTSTADKDLNYLESRQSGLTKALSSTAANGSIATGSSKVKDDGAEALDAQKQSSRTVHSPRHEIVTSVRSSDRLQKRANAVEDSERISKRRKGDAEHKEHDSEPRSSDRDRSVEARLDLNKTVTDDQSTHRDQDRSKDKGYERQDRDHRERVDRSDKPRGDDVEKARDKSLERHGRERSVEKGLDKGTTRSYDRNKDERNKDDRSKLRHSEASLEKSHPDDHFHSQGLPPPPPLPPNIIPHSMAAKEDLERRAGGARHSQRLSPRHEEREKRRSEENLSVSVDDAKRRRDDDIRDRKRDDRETITVKGEEREREREREREREKSLPLKEDFEASKRRKLKREQQVPSAEPGEYSPMPHHSSLSTSMGPSSYEGRERKSSSMIQHGGYLEEPSIRLLGKEASSKMARRDPDPIAKSKSKNSNFLDIALESMTVNGKTTRGEQSGSGEIGSRE

SEQ ID NO: 80441 - protein, 1664 aa, Arabidopsis thaliana
  peptide (1)..(1664): Ceres Seq. ID no. 12655897
  misc_feature (1097)..(1559): Pfam Name: Caldesmon Pfam Description: Caldesmon
  misc_feature (1)..(532): Homolog of NCBI NO: 27311827 NR Description: F5A9.22 [Arabidopsis thaliana]
  misc_feature (1)..(984): Homolog of NCBI NO: 24581012 NR Description: CG31671-PA [Drosophila melanogaster]
  misc_feature (1)..(842): Homolog of NCBI NO: 17552208 NR Description: Tho2 (164.4 kD) [Caenorhabditis elegans]
  misc_feature (762)..(1362): Homolog of NCBI NO: 17552208 NR Description: Tho2 (164.4 kD) [Caenorhabditis elegans]
  misc_feature (1282)..(1509): Homolog of NCBI NO: 17552208 NR Description: Tho2 (164.4 kD) [Caenorhabditis elegans]
  misc_feature (1)..(1324): Homolog of NCBI NO: 39584988 NR Description: Hypothetical protein CBG09105 [Caenorhabditis
  misc_feature (375)..(853): Homolog of NCBI NO: 27802720 NR Description: SI:bZ1O18.2 (novel protein similar to human THO
  misc_feature (1)..(141): Homolog of NCBI NO: 27802720 NR Description: SI:bZ1O18.2 (novel protein similar to human THO
  misc_feature (215)..(334): Homolog of NCBI NO: 27802720 NR Description: SI:bZ1O18.2 (novel protein similar to human THO
  misc_feature (353)..(758): Homolog of NCBI NO: 40744755 NR Description: hypothetical protein AN2226.2 [Aspergillus
MVKIKAQDLKGKEVRLNTRLLYQQTKFNLLREESEGYAKLATLLCRGSASSSHNASAATMGIIKSLIGHFDLDPNRVFDIVLDCFELEQDYDTFLNLIPIFPKSHASQILGFKFQYYQRLEVNSPVPVGLYKLTALLVKEEYAHLLPKDEEVFEDYNVSSAKRFEEANKIGKINLAATGKDLMEDEKQGDVTVDLFAALDMESEAVTERLPELENNQTLGLLNGFLSVDDWYHANILFERLAPLNPVAHDQICSGLFRLIEKSITHSYRIARQTRFQSSSSASTVKLTPTANTTANRTYLDLPKEVFQMLVTVGPYLYRNTQLLQKICRVLRAYYLSALDLVRDGSNQEGSAYEVSRGHLKEVRLRVEEALGTCLLPSLQLVPANPAVGHEIWEVMSLLPYEARYRLYGEWEKDDEQNPLLLAARQVAKLDTRRILKRLAKENLKQLGRMVAKLAHANPMTVLRTIVNQIEAYRDMIAPVVDAFKYLTQLEYDILEYVVIERLAQSGRDKLKDDGINLSDWLQSLASFWGHLCKKYPSMELRGLFQYLVNQLKRGQGIELVLLQELVQQMANVQYTENLTEDQLDAMAGSETLRYHATSFGMMRNNKALIKSSNRLRDSLLPNDEPKLAIPLLLLIAQHRSLVVVNADAPYIKMVTEQFDRCHGILLQYVDFLSSAVSPTTAYARLVPSLDELVHTYHLEAEVAFLVFRPVMRLFKCRRNGDVSWPLDSGESMDADSEISESESSMILDVGTSEKAVTWSDVLDTVRTMLPSKAWNSLSPDLYATFWGLTLYDLHVPRNRYESEISKQHTALKTLEEVADNSSSAITKRKKEKERIQESLDRLTGELKKHEEHVASVRRRLSREKDTWLSSCPDTLKINMEFLQRCIFPRCTFSMADSVYCAMFVNMLHSLGTPFFNTVNHIDVLICKTLQPMICCCTEYEVGRLGRFLFETLKIAYHWKSKESVYEHECGNMPGFAVYYRYPNSQRVTFGQFVKYLAITCSASINGNKVLFLLCFMSVSSVDLKAKIKNDEREDLKVLATGVGAALSARKPHWVTDEEFSMGFLELKAPPVHTPKHASSQNGLLVGVSQGEPTGERATVNQQPESGGLGKDQMLKTKPLDGRTESIPSKSDQGHLKSKGGNPLDSQPSISKKSMEQKETDETPRISDENPVKPASKYSEAELKASSKRGASVNKSAKQDFGKDDGKSGKAIGRTSTADKDLNYLESRQSGLTKALSSTAANGSIATGSSKVKDDGAEALDAQKQSSRTVHSPRHEIVTSVRSSDRLQKRANAVEDSERISKRRKGDAEHKEHDSEPRSSDRDRSVEARLDLNKTVTDDQSTHRDQDRSKDKGYERQDRDHRERVDRSDKPRGDDVEKARDKSLERHGRERSVEKGLDKGTTRSYDRNKDERNKDDRSKLRHSEASLEKSHPDDHFHSQGLPPPPPLPPNIIPHSMAAKEDLERRAGGARHSQRLSPRHEEREKRRSEENLSVSVDDAKRRRDDDIRDRKRDDRETITVKGEEREREREREREREKSLPLKEDFEASKRRKLKREQQVPSAEPGEYSPMPHHSSLSTSMGPSSYEGRERKSSSMIQHGGYLEEPSIRLLGKEASSKMARRDPDPIAKSKSKNSNFLDIALESMTVNGKTTRGEQSGSGEIGSRE

SEQ ID NO: 80442 - protein, 1605 aa, Arabidopsis thaliana
  peptide (1)..(1605): Ceres Seq. ID no. 12655898
  misc_feature (1038)..(1500): Pfam Name: Caldesmon Pfam Description: Caldesmon
  misc_feature (1)..(473): Homolog of NCBI NO: 27311827 NR Description: F5A9.22 [Arabidopsis thaliana]
  misc_feature (1)..(925): Homolog of NCBI NO: 24581012 NR Description: CG31671-PA [Drosophila melanogaster]
  misc_feature (1)..(783): Homolog of NCBI NO: 17552208 NR Description: Tho2 (164.4 kD) [Caenorhabditis elegans]
  misc_feature (703)..(1303): Homolog of NCBI NO: 17552208 NR Description: Tho2 (164.4 kD) [Caenorhabditis elegans]
  misc_feature (1223)..(1450): Homolog of NCBI NO: 17552208 NR Description: Tho2 (164.4 kD) [Caenorhabditis elegans]
  misc_feature (1)..(1265): Homolog of NCBI NO: 39584988 NR Description: Hypothetical protein CBG09105 [Caenorhabditis
  misc_feature (316)..(794): Homolog of NCBI NO: 27802720 NR Description: SI:bZ1O18.2 (novel protein similar to human THO
  misc_feature (1)..(82): Homolog of NCBI NO: 27802720 NR Description: SI:bZ1O18.2 (novel protein similar to human THO
  misc_feature (156)..(275): Homolog of NCBI NO: 27802720 NR Description: SI:bZ1O18.2 (novel protein similar to human THO
  misc_feature (294)..(699): Homolog of NCBI NO: 40744755 NR Description: hypothetical protein AN2226.2 [Aspergillus
MGIIKSLIGHFDLDPNRVFDIVLDCFELEQDYDTFLNLIPIFPKSHASQILGFKFQYYQRLEVNSPVPVGLYKLTALLVKEEYAHLLPKDEEVFEDYNVSSAKRFEEANKIGKINLAATGKDLMEDEKQGDVTVDLFAALDMESEAVTERLPELENNQTLGLLNGFLSVDDWYHANILFERLAPLNPVAHDQICSGLFRLIEKSITHSYRIARQTRFQSSSSASTVKLTPTANTTANRTYLDLPKEVFQMLVTVGPYLYRNTQLLQKICRVLRAYYLSALDLVRDGSNQEGSAYEVSRGHLKEVRLRVEEALGTCLLPSLQLVPANPAVGHEIWEVMSLLPYEARYRLYGEWEKDDEQNPLLLAARQVAKLDTRRILKRLAKENLKQLGRMVAKLAHANPMTVLRTIVNQIEAYRDMIAPVVDAFKYLTQLEYDILEYVVIERLAQSGRDKLKDDGINLSDWLQSLASFWGHLCKKYPSMELRGLFQYLVNQLKRGQGIELVLLQELVQQMANVQYTENLTEDQLDAMAGSETLRYHATSFGMMRNNKALIKSSNRLRDSLLPNDEPKLAIPLLLLIAQHRSLVVVNADAPYIKMVTEQFDRCHGILLQYVDFLSSAVSPTTAYARLVPSLDELVHTYHLEAEVAFLVFRPVMRLFKCRRNGDVSWPLDSGESMDADSEISESESSMILDVGTSEKAVTWSDVLDTVRTMLPSKAWNSLSPDLYATFWGLTLYDLHVPRNRYESEISKQHTALKTLEEVADNSSSAITKRKKEKERIQESLDRLTGELKKHEEHVASVRRRLSREKDTWLSSCPDTLKINMEFLQRCIFPRCTFSMADSVYCAMFVNMLHSLGTPFFNTVNHIDVLICKTLQPMICCCTEYEVGRLGRFLFETLKIAYHWKSKESVYEHECGNMPGFAVYYRYPNSQRVTFGQFVKYLAITCSASINGNKVLFLLCFMSVSSVDLKAKIKNDEREDLKVLATGVGAALSARKPHWVTDEEFSMGFLELKAPPVHTPKHASSQNGLLVGVSQGEPTGERATVNQQPESGGLGKDQMLKTKPLDGRTESIPSKSDQGHLKSKGGNPLDSQPSISKKSMEQKETDETPRISDENPVKPASKYSEAELKASSKRGASVNKSAKQDFGKDDGKSGKAIGRTSTADKDLNYLESRQSGLTKALSSTAANGSIATGSSKVKDDGAEALDAQKQSSRTVHSPRHEIVTSVRSSDRLQKRANAVEDSERISKRRKGDAEHKEHDSEPRSSDRDRSVEARLDLNKTVTDDQSTHRDQDRSKDKGYERQDRDHRERVDRSDKPRGDDVEKARDKSLERHGRERSVEKGLDKGTTRSYDRNKDERNKDDRSKLRHSEASLEKSHPDDHFHSQGLPPPPPLPPNIIPHSMAAKEDLERRAGGARHSQRLSPRHEEREKRRSEENLSVSVDDAKRRRDDDIRDRKRDDRETITVKGEEREREREREREREKSLPLKEDFEASKRRKLKREQQVPSAEPGEYSPMPHHSSLSTSMGPSSYEGRERKSSSMIQHGGYLEEPSIRLLGKEASSKMARRDPDPIAKSKSKNSNFLDIALESMTVNGKTTRGEQSGSGEIGSRE

SEQ ID NO: 80443 - DNA, 2868 bp, Arabidopsis thaliana
  misc_feature (1)..(2868): Ceres Seq. ID no. 12655902
  misc_feature: MA Experiment ID: 20000307 Result: Down-regulated in Transcription
  misc_feature: MA Experiment 20000307 PARAMETER Experiment Name: At_Germinating_Seeds_Sub_P Parameter: Age (hr) Value: 24 vs. 0
  misc_feature: MA Experiment 20000307 PARAMETER Experiment Name: At_Germinating_Seeds_Sub_P Parameter: Organism Value: A. thaliana
  misc_feature: MA Experiment 20000307 PARAMETER Experiment Name: At_Germinating_Seeds_Sub_P Parameter: Plant Line Value: WS
  misc_feature: MA Experiment 20000307 PARAMETER Experiment Name: At_Germinating_Seeds_Sub_P Parameter: Tissue Value: Germinating Seeds
  misc_feature: MA Experiment ID: 20000355 Result: Down-regulated in Transcription
  misc_feature: MA Experiment 20000355 PARAMETER Experiment Name: At_Siliques_Sub_P Parameter: Age (day) Value: 21
  misc_feature: MA Experiment 20000355 PARAMETER Experiment Name: At_Siliques_Sub_P Parameter: Organism Value: A. thaliana
  misc_feature: MA Experiment 20000355 PARAMETER Experiment Name: At_Siliques_Sub_P Parameter: Plant Line Value: WS
  misc_feature: MA Experiment 20000355 PARAMETER Experiment Name: At_Siliques_Sub_P Parameter: Tissue Value: Less Than 5mm Siliques vs. Whole Plant
  misc_feature: MA Experiment ID: 20000440 Result: Down-regulated in Transcription
  misc_feature: MA Experiment 20000440 PARAMETER Experiment Name: At_Closed-Flower__Sub_P Parameter: Tissue Value: Closed Flower vs. Whole Plant
atgcgtctgcgtcaccaaggaggacaatacttggctcgcggtatggaacccgtgtactggtcaaacaaggtggattcaacccatgacttatatgacaactatactctcggatcctaccaaaataatagctacaatatattggcacacactggttttggctacgaccacgaattccaaatttatgaaattaactccaattcatggaggattattgatgccactttggacttcaaattagggtatattggtcgtggcgtgtctttgaagggaaagacttactggattgctagtggtgaagaagagaaacggcttggcaaattcttaatcagttttgattatacgacagaaagatttgaacgtctatgtcttccgaataagtatccttgttatgcaactctggctctatccgttgttagagaagagaaactttccatgttatcgcaacgcggaattaaatcaaaggcagaaatatgggtgacaaataagattggtgagacacaagtggtgtcgtggagcatggtcttagctttggatttgcagcctaaacgttgtattggggaaagcggaagtttcttggtcgacgagaagaagagagtggtcgtgtgttgtgataatattagagaccaaggaaaaaccacgtttgactcaaatctaccaaggtatcacaggcaaaagaaaaagggacgaatgatcatagtgtttgacgttgaatcaatgagactccccgtcaccgtcaaagccactaagccgtcgtttctcgtcatttggatccgatactcctccgccgcgtcgtcgccgacagtctccttgaatccaagtggacgattacagcaaactctcgcaggatctgtggaagtgaaaggaaaatctctgcactccggtaagttctcgacggtgaagctaaatccggagatcgccggagctggtaggttcttcgagtttcgatccagattcatccctgcgtcgattgaatttgctcaggaatcgcctctttgcacgacgctgttgaaagatgagctcaaaatccgaaccgttgagcatttgttatcagctcttgaggcgaagggagttgataattgcaggattcaaatcgagagcgaaagttccgatgatcgagaagtcgaggtccctatttttgatggatcagctaaagaatgggtcgatgcgatacaaggagttggcataaacgcggctcaaaaccatgatggtgaaagtgtagagaagatggtcgcacatgtgaacaagcctgtgtatgtttgcaagaacgatacttttgttgctgcatttccggctctagagactcggatcacttgtggtatcgacttcccacaggtgcctgctataggctgccaatggttttcttggagacctatccatgagtcttcttttgcaaaggatatcgcatcatcaagaaccttctgtgtctatgaagaggtggagcgtatgcgtgaagcagggctcattaaaggaggttctctggataacgccatagtttgtagcgctgagcatggatggatgaatcctcctctgcggtttgatgatgaagcatgtcgacataagattcttgacctaatcggtgacctctcccttgtttcacggggcggaaatggaggactccccgtggctcacatagtcgcatataagaatgaggaggaggaggtgcgatcttcaaccgaagagaacgagaatgtgcgatcttcaaccgaagagaacgagtatgtgcgatcttccaccgaagctggtaggggagaagatcctcacgaggattccgataacatctctgagagcggtgcgatccacttgcaaattatggaacgctttaaccaaagatcgggttctggcaaggaggaagaagaagacacgatggatctatctataaagcaggtagatttgcttaatcaagtcgagatatctagagtgtatcactgcgacggcttgttgttatgcgtggctaaggacaactcgagggtcgtggtttggaacccttatttggggcaaacaagatggatcagacccagaacagaatccaacataggagacagctatgctcttggatacgacatcaaccgtaaccacaaaatcttgaggatggtgcagacaagaaacgtttccgtttacaggtacgaaatctacgacttgcgctctaattcatggagggttctcgaggtcactcccaacggggaaatggaccctaatcatcccctctacggcgtttctgtgaagggaaatacctacttttttgcgcatgaggatagcagcagtggtgaaattgatgaagatggcgacataatcgatcttgaagatttcttactctgttttgattttacaacagagacatttggtctgcgtctgcctcttccgtttcactctactatcgatgcgactgtgaccctctcttgtgttagagaccagcagctcgcggtgctatatcataatgagggtcttcacagtgatgatcggtttaccacagttgagttttgggttactactagtattgagcccaactctgtgtcctggagcaagtttttgacagtggatatgagaccattggcactcactggtgttcggtttgacaatgatatgggtgccaccttcttcattgacgaggatgagaaagtcgctgtggttttcgatctagacggatacctaagcaccgagagcgctcgttaccacaccgcttttatcagtggaaaggatggattctttaaacctgtgactctaggagtagctcccaatgtcggggaaccttgtcccagaaccgggcatattccgactacatatcgtcccccgcttgtctgctcgtctacttaccttccgagtttagtgcaagtcaaccaacagcgcaaaaggaaagaaagacatgtttag

SEQ ID NO: 80444 - protein, 955 aa, Arabidopsis thaliana
  peptide (1)..(955): Ceres Seq. ID no. 12655903
  misc_feature (274)..(548): Pfam Name: UDP-3-O-acyl N-acetylglycosamine deacetylase Pfam Description: UDP-3-O-acyl N-acetylglycosamine deacetylase
  misc_feature (606)..(955): Homolog of NCBI NO: 23297235 NR Description: unknown protein [Arabidopsis thaliana]
  misc_feature (606)..(955): Homolog of NCBI NO: 19347782 NR Description: putative F5A9.18 protein [Arabidopsis thaliana]
  misc_feature (239)..(548): Homolog of NCBI NO: 26451306 NR Description: unknown protein [Arabidopsis thaliana]
  misc_feature (239)..(504): Homolog of NCBI NO: 20453133 NR Description: At1g25190/F4F7_4 [Arabidopsis thaliana]
  misc_feature (734)..(944): Homolog of NCBI NO: 15220234 NR Description: unknown protein; protein id: At1g10890.1
  misc_feature (625)..(698): Homolog of NCBI NO: 15220234 NR Description: unknown protein; protein id: At1g10890.1
  misc_feature (624)..(912): Homolog of NCBI NO: 15239318 NR Description: putative protein; protein id: At5g36200.1
  misc_feature (634)..(879): Homolog of NCBI NO: 9293877 NR Description: gb|AAC67359.1~gene_id:MCB17.16~similar to unknown
  misc_feature (634)..(879): Homolog of NCBI NO: 22331255 NR Description: similar to type 2 peroxiredoxin, putative;
  misc_feature (634)..(912): Homolog of NCBI NO: 15228908 NR Description: hypothetical protein; protein id: At3g22940.1 thaliana] >gi|11994724|dbj|BAB03040.1|
MRLRHQGGQYLARGMEPVYWSNKVDSTHDLYDNYTLGSYQNNSYNILAHTGFGYDHEFQIYEINSNSWRIIDATLDFKLGYIGRGVSLKGKTYWIASGEEEKRLGKFLISFDYTTERFERLCLPNKYPCYATLALSVVREEKLSMLSQRGIKSKAEIWVTNKIGETQVVSWSMVLALDLQPKRCIGESGSFLVDEKKRVVVCCDNIRDQGKTTFDSNLPRYHRQKKKGRMIIVFDVESMRLPVTVKATKPSFLVIWIRYSSAASSPTVSLNPSGRLQQTLAGSVEVKGKSLHSGKFSTVKLNPEIAGAGRFFEFRSRFIPASIEFAQESPLCTTLLKDELKIRTVEHLLSALEAKGVDNCRIQIESESSDDREVEVPIFDGSAKEWVDAIQGVGINAAQNHDGESVEKMVAHVNKPVYVCKNDTFVAAFPALETRITCGIDFPQVPAIGCQWFSWRPIHESSFAKDIASSRTFCVYEEVERMREAGLIKGGSLDNAIVCSAEHGWMNPPLRFDDEACRHKILDLIGDLSLVSRGGNGGLPVAHIVAYKNEEEEVRSSTEENENVRSSTEENEYVRSSTEAGRGEDPHEDSDNISESGAIHLQIMERFNQRSGSGKEEEEDTMDLSIKQVDLLNQVEISRVYHCDGLLLCVAKDNSRVVVWNPYLGQTRWIRPRTESNIGDSYALGYDINRNHKILRMVQTRNVSVYRYEIYDLRSNSWRVLEVTPNGEMDPNHPLYGVSVKGNTYFFAHEDSSSGEIDEDGDIIDLEDFLLCFDFTTETFGLRLPLPFHSTIDATVTLSCVRDQQLAVLYHNEGLHSDDRFTTVEFWVTTSIEPNSVSWSKFLTVDMRPLALTGVRFDNDMGATFFIDEDEKVAVVFDLDGYLSTESARYHTAFISGKDGFFKPVTLGVAPNVGEPCPRTGHIPTTYRPPLVCSSTYLPSLVQVNQQRKRKERHV

SEQ ID NO: 80445 - protein, 941 aa, Arabidopsis thaliana
  peptide (1)..(941): Ceres Seq. ID no. 12655904
  misc_feature (260)..(534): Pfam Name: UDP-3-O-acyl N-acetylglycosamine deacetylase Pfam Description: UDP-3-O-acyl N-acetylglycosamine deacetylase
  misc_feature (592)..(941): Homolog of NCBI NO: 23297235 NR Description: unknown protein [Arabidopsis thaliana]
  misc_feature (592)..(941): Homolog of NCBI NO: 19347782 NR Description: putative F5A9.18 protein [Arabidopsis thaliana]
  misc_feature (225)..(534): Homolog of NCBI NO: 26451306 NR Description: unknown protein [Arabidopsis thaliana]
  misc_feature (225)..(490): Homolog of NCBI NO: 20453133 NR Description: At1g25190/F4F7_4 [Arabidopsis thaliana]
  misc_feature (720)..(930): Homolog of NCBI NO: 15220234 NR Description: unknown protein; protein id: At1g10890.1
  misc_feature (611)..(684): Homolog of NCBI NO: 15220234 NR Description: unknown protein; protein id: At1g10890.1
  misc_feature (610)..(898): Homolog of NCBI NO: 15239318 NR Description: putative protein; protein id: At5g36200.1
  misc_feature (620)..(865): Homolog of NCBI NO: 9293877 NR Description: gb|AAC67359.1~gene_id:MCB17.16~similar to unknown
  misc_feature (620)..(865): Homolog of NCBI NO: 22331255 NR Description: similar to type 2 peroxiredoxin, putative;
  misc_feature (620)..(898): Homolog of NCBI NO: 15228908 NR Description: hypothetical protein; protein id: At3g22940.1 thaliana] >gi|11994724|dbj|BAB03040.1|
MEPVYWSNKVDSTHDLYDNYTLGSYQNNSYNILAHTGFGYDHEFQIYEINSNSWRIIDATLDFKLGYIGRGVSLKGKTYWIASGEEEKRLGKFLISFDYTTERFERLCLPNKYPCYATLALSVVREEKLSMLSQRGIKSKAEIWVTNKIGETQVVSWSMVLALDLQPKRCIGESGSFLVDEKKRVVVCCDNIRDQGKTTFDSNLPRYHRQKKKGRMIIVFDVESMRLPVTVKATKPSFLVIWIRYSSAASSPTVSLNPSGRLQQTLAGSVEVKGKSLHSGKFSTVKLNPEIAGAGRFFEFRSRFIPASIEFAQESPLCTTLLKDELKIRTVEHLLSALEAKGVDNCRIQIESESSDDREVEVPIFDGSAKEWVDAIQGVGINAAQNHDGESVEKMVAHVNKPVYVCKNDTFVAAFPALETRITCGIDFPQVPAIGCQWFSWRPIHESSFAKDIASSRTFCVYEEVERMREAGLIKGGSLDNAIVCSAEHGWMNPPLRFDDEACRHKILDLIGDLSLVSRGGNGGLPVAHIVAYKNEEEEVRSSTEENENVRSSTEENEYVRSSTEAGRGEDPHEDSDNISESGAIHLQIMERFNQRSGSGKEEEEDTMDLSIKQVDLLNQVEISRVYHCDGLLLCVAKDNSRVVVWNPYLGQTRWIRPRTESNIGDSYALGYDINRNHKILRMVQTRNVSVYRYEIYDLRSNSWRVLEVTPNGEMDPNHPLYGVSVKGNTYFFAHEDSSSGEIDEDGDIIDLEDFLLCFDFTTETFGLRLPLPFHSTIDATVTLSCVRDQQLAVLYHNEGLHSDDRFTTVEFWVTTSIEPNSVSWSKFLTVDMRPLALTGVRFDNDMGATFFIDEDEKVAVVFDLDGYLSTESARYHTAFISGKDGFFKPVTLGVAPNVGEPCPRTGHIPTTYRPPLVCSSTYLPSLVQVNQQRKRKERHV

SEQ ID NO: 80446 - protein, 811 aa, Arabidopsis thaliana
  peptide (1)..(811): Ceres Seq. ID no. 12655905
  misc_feature (130)..(404): Pfam Name: UDP-3-O-acyl N-acetylglycosamine deacetylase Pfam Description: UDP-3-O-acyl N-acetylglycosamine deacetylase
  misc_feature (462)..(811): Homolog of NCBI NO: 23297235 NR Description: unknown protein [Arabidopsis thaliana]
  misc_feature (462)..(811): Homolog of NCBI NO: 19347782 NR Description: putative F5A9.18 protein [Arabidopsis thaliana]
  misc_feature (95)..(404): Homolog of NCBI NO: 26451306 NR Description: unknown protein [Arabidopsis thaliana]
  misc_feature (95)..(360): Homolog of NCBI NO: 20453133 NR Description: At1g25190/F4F7_4 [Arabidopsis thaliana]
  misc_feature (590)..(800): Homolog of NCBI NO: 15220234 NR Description: unknown protein; protein id: At1g10890.1
  misc_feature (481)..(554): Homolog of NCBI NO: 15220234 NR Description: unknown protein; protein id: At1g10890.1
  misc_feature (480)..(768): Homolog of NCBI NO: 15239318 NR Description: putative protein; protein id: At5g36200.1
  misc_feature (490)..(735): Homolog of NCBI NO: 9293877 NR Description: gb|AAC67359.1~gene_id:MCB17.16~similar to unknown
  misc_feature (490)..(735): Homolog of NCBI NO: 22331255 NR Description: similar to type 2 peroxiredoxin, putative;
  misc_feature (490)..(768): Homolog of NCBI NO: 15228908 NR Description: hypothetical protein; protein id: At3g22940.1 thaliana] >gi|11994724|dbj|BAB03040.1|
MLSQRGIKSKAEIWVTNKIGETQVVSWSMVLALDLQPKRCIGESGSFLVDEKKRVVVCCDNIRDQGKTTFDSNLPRYHRQKKKGRMIIVFDVESMRLPVTVKATKPSFLVIWIRYSSAASSPTVSLNPSGRLQQTLAGSVEVKGKSLHSGKFSTVKLNPEIAGAGRFFEFRSRFIPASIEFAQESPLCTTLLKDELKIRTVEHLLSALEAKGVDNCRIQIESESSDDREVEVPIFDGSAKEWVDAIQGVGINAAQNHDGESVEKMVAHVNKPVYVCKNDTFVAAFPALETRITCGIDFPQVPAIGCQWFSWRPIHESSFAKDIASSRTFCVYEEVERMREAGLIKGGSLDNAIVCSAEHGWMNPPLRFDDEACRHKILDLIGDLSLVSRGGNGGLPVAHIVAYKNEEEEVRSSTEENENVRSSTEENEYVRSSTEAGRGEDPHEDSDNISESGAIHLQIMERFNQRSGSGKEEEEDTMDLSIKQVDLLNQVEISRVYHCDGLLLCVAKDNSRVVVWNPYLGQTRWIRPRTESNIGDSYALGYDINRNHKILRMVQTRNVSVYRYEIYDLRSNSWRVLEVTPNGEMDPNHPLYGVSVKGNTYFFAHEDSSSGEIDEDGDIIDLEDFLLCFDFTTETFGLRLPLPFHSTIDATVTLSCVRDQQLAVLYHNEGLHSDDRFTTVEFWVTTSIEPNSVSWSKFLTVDMRPLALTGVRFDNDMGATFFIDEDEKVAVVFDLDGYLSTESARYHTAFISGKDGFFKPVTLGVAPNVGEPCPRTGHIPTTYRPPLVCSSTYLPSLVQVNQQRKRKERHV

SEQ ID NO: 80447 - DNA, 831 bp, Arabidopsis thaliana
  misc_feature (1)..(831): Ceres Seq. ID no. 12655906
  misc_feature: MA Experiment ID: 108585 Result: Up-regulated in Transcription
  misc_feature: MA Experiment 108585 PARAMETER Experiment Name: At_5mM_NaNP_cDNA_P Parameter: Timepoint (hr) Value: 6
  misc_feature: MA Experiment 108585 PARAMETER Experiment Name: At_5mM_NaNP_cDNA_P Parameter: Tissue Value: Aerial
  misc_feature: MA Experiment 108585 PARAMETER Experiment Name: At_5mM_NaNP_cDNA_P Parameter: Treatment Value: null
  misc_feature: MA Experiment ID: 20000315 Result: Down-regulated in Transcription
  misc_feature: MA Experiment 20000315 PARAMETER Experiment Name: At_14day_Shoots-Roots_Sub_P Parameter: Age (day) Value: 14
  misc_feature: MA Experiment 20000315 PARAMETER Experiment Name: At_14day_Shoots-Roots_Sub_P Parameter: Organism Value: A. thaliana
  misc_feature: MA Experiment 20000315 PARAMETER Experiment Name: At_14day_Shoots-Roots_Sub_P Parameter: Plant Line Value: WS
  misc_feature: MA Experiment 20000315 PARAMETER Experiment Name: At_14day_Shoots-Roots_Sub_P Parameter: Tissue Value: Shoots vs. Whole Plant
  misc_feature: MA Experiment ID: 20000346 Result: Up-regulated in Transcription
  misc_feature: MA Experiment 20000346 PARAMETER Experiment Name: At_2mM_SA_Sub_P Parameter: Age (day) Value: 14
  misc_feature: MA Experiment 20000346 PARAMETER Experiment Name: At_2mM_SA_Sub_P Parameter: Organism Value: A. thaliana
  misc_feature: MA Experiment 20000346 PARAMETER Experiment Name: At_2mM_SA_Sub_P Parameter: Plant Line Value: WS
  misc_feature: MA Experiment 20000346 PARAMETER Experiment Name: At_2mM_SA_Sub_P Parameter: Timepoint (hr) Value: 1
  misc_feature: MA Experiment 20000346 PARAMETER Experiment Name: At_2mM_SA_Sub_P Parameter: Tissue Value: Aerial
  misc_feature: MA Experiment 20000346 PARAMETER Experiment Name: At_2mM_SA_Sub_P Parameter: Treatment Value: 2mM SA vs. No Treatment
  misc_feature: MA Experiment ID: 20000355 Result: Down-regulated in Transcription
  misc_feature: MA Experiment 20000355 PARAMETER Experiment Name: At_Siliques_Sub_P Parameter: Age (day) Value: 21
  misc_feature: MA Experiment 20000355 PARAMETER Experiment Name: At_Siliques_Sub_P Parameter: Organism Value: A. thaliana
  misc_feature: MA Experiment 20000355 PARAMETER Experiment Name: At_Siliques_Sub_P Parameter: Plant Line Value: WS
  misc_feature: MA Experiment 20000355 PARAMETER Experiment Name: At_Siliques_Sub_P Parameter: Tissue Value: Less Than 5mm Siliques vs. Whole Plant
atggcggcttctacattgtacaaatcctgtcttcttcaacccaagtctggctccaccactcgccgcctaaacccttctctcgttaaccctcttacgaatcccacaagagtttccgttttggggaagagtcgtagagatgtctttgcgaaagcttcgattgaaatggcggaatcgaattcgataccttccgttgttgtcaattcctctaagcagcatggtccaatcatcgtgattgataattacgacagcttcacatacaatctctgccagtatatgggagagctaggatgccattttgaagtttaccgcaatgatgaacttacagtagaagagctgaaaaaaaaaaatccaagaggggtgttgatttctccagggcctggtacccctcaagactctgggatttccttgcaaactgttttggaactcggaccacttgttcctttatttggagtatgtatgggtttgcagtgtataggagaagcatttggaggaaagattgtgcggtcaccatttggtgttatgcatgggaaaagctcaatggttcactatgatgagaaaggagaagaaggcttgttctctggattatcaaaccctttcattgtaggtagatatcacagtctcgtgatcgaaaaagatacatttcctagtgatgaactcgaggttacagcatggacagaagatggtctggtaatggctgcccgtcacagaaagtacaagcatatacagggagtccaatttcatccggagagtattataacaactgagggcaagacaattgtccgcaatttcatcaaaatagtagagaaaaaggagtccgagaagctgacatag

SEQ ID NO: 80448 - protein, 276 aa, Arabidopsis thaliana; identical to SEQ ID NO: 28763
  peptide (1)..(276): Ceres Seq. ID no. 12655907
  misc_feature (76)..(266): Pfam Name: Glutamine amidotransferase class-I Pfam Description: Glutamine amidotransferase class-I
  misc_feature (1)..(276): Homolog of NCBI NO: 15222532 NR Description: anthranilate synthase beta subunit; protein id: supported by cDNA: gi_20466735, supported by cDNA: gi_403433 thaliana] >gi|541849|pir||JQ2340 anthranilate synthase (EC
  misc_feature (1)..(275): Homolog of NCBI NO: 21594026 NR Description: anthranilate synthase beta chain [Arabidopsis
  misc_feature (1)..(275): Homolog of NCBI NO: 15242893 NR Description: anthranilate synthase beta chain; protein id: supported by cDNA: 6495. [Arabidopsis thaliana]
  misc_feature (44)..(276): Homolog of NCBI NO: 25403004 NR Description: probable anthranilate synthase beta subunit
  misc_feature (55)..(276): Homolog of NCBI NO: 15221840 NR Description: F5A9.7; protein id: At1g25083.1 [Arabidopsis >gi|18395568|ref|NP_564224.1| anthranilate synthase beta subunit; id: At1g24909.1 [Arabidopsis thaliana]
  misc_feature (55)..(276): Homolog of NCBI NO: 15221810 NR Description: F5A9.17; protein id: At1g24807.1 [Arabidopsis >gi|9945079|gb|AAG03116.1|AC004133_10 F5A9.17 [Arabidopsis
  misc_feature (44)..(272): Homolog of NCBI NO: 28301926 NR Description: putative anthranilate synthase beta subunit
  misc_feature (42)..(274): Homolog of NCBI NO: 21741992 NR Description: OSJNBa0060P14.13 [Oryza sativa (japonica
  misc_feature (75)..(265): Homolog of NCBI NO: 37520452 NR Description: anthranilate synthase component II [Gloeobacter >gi|35211446|dbj|BAC88824.1| anthranilate synthase component II
  misc_feature (75)..(264): Homolog of NCBI NO: 11467408 NR Description: anthranilate synthase component II [Cyanophora >gi|1351304|sp|P48261|TRPG_CYAPA Anthranilate synthase component

SEQ ID NO: 80449 - protein, 222 aa, Arabidopsis thaliana; identical to SEQ ID NO: 28764
  peptide (1)..(222): Ceres Seq. ID no. 12655908
  misc_feature (22)..(212): Pfam Name: Glutamine amidotransferase class-I Pfam Description: Glutamine amidotransferase class-I
  misc_feature (1)..(222): Homolog of NCBI NO: 15222532 NR Description: anthranilate synthase beta subunit; protein id: supported by cDNA: gi_20466735, supported by cDNA: gi_403433 thaliana] >gi|541849|pir||JQ2340 anthranilate synthase (EC
  misc_feature (1)..(221): Homolog of NCBI NO: 21594026 NR Description: anthranilate synthase beta chain [Arabidopsis
  misc_feature (1)..(221): Homolog of NCBI NO: 15242893 NR Description: anthranilate synthase beta chain; protein id: supported by cDNA: 6495. [Arabidopsis thaliana]
  misc_feature (1)..(222): Homolog of NCBI NO: 25403004 NR Description: probable anthranilate synthase beta subunit
  misc_feature (1)..(222): Homolog of NCBI NO: 15221840 NR Description: F5A9.7; protein id: At1g25083.1 [Arabidopsis >gi|18395568|ref|NP_564224.1| anthranilate synthase beta subunit; id: At1g24909.1 [Arabidopsis thaliana]
  misc_feature (1)..(222): Homolog of NCBI NO: 15221810 NR Description: F5A9.17; protein id: At1g24807.1 [Arabidopsis >gi|9945079|gb|AAG03116.1|AC004133_10 F5A9.17 [Arabidopsis
  misc_feature (1)..(218): Homolog of NCBI NO: 28301926 NR Description: putative anthranilate synthase beta subunit
  misc_feature (1)..(220): Homolog of NCBI NO: 21741992 NR Description: OSJNBa0060P14.13 [Oryza sativa (japonica
  misc_feature (21)..(211): Homolog of NCBI NO: 37520452 NR Description: anthranilate synthase component II [Gloeobacter >gi|35211446|dbj|BAC88824.1| anthranilate synthase component II
  misc_feature (21)..(210): Homolog of NCBI NO: 11467408 NR Description: anthranilate synthase component II [Cyanophora >gi|1351304|sp|P48261|TRPG_CYAPA Anthranilate synthase component

SEQ ID NO: 80450 - protein, 185 aa, Arabidopsis thaliana
  peptide (1)..(185): Ceres Seq. ID no. 12655909
  misc_feature (1)..(175): Pfam Name: Glutamine amidotransferase class-I Pfam Description: Glutamine amidotransferase class-I
  misc_feature (1)..(185): Homolog of NCBI NO: 15222532 NR Description: anthranilate synthase beta subunit; protein id: supported by cDNA: gi_20466735, supported by cDNA: gi_403433 thaliana] >gi|541849|pir||JQ2340 anthranilate synthase (EC
  misc_feature (1)..(184): Homolog of NCBI NO: 21594026 NR Description: anthranilate synthase beta chain [Arabidopsis
  misc_feature (1)..(184): Homolog of NCBI NO: 15242893 NR Description: anthranilate synthase beta chain; protein id: supported by cDNA: 6495. [Arabidopsis thaliana]
  misc_feature (1)..(185): Homolog of NCBI NO: 25403004 NR Description: probable anthranilate synthase beta subunit
  misc_feature (1)..(185): Homolog of NCBI NO: 15221840 NR Description: F5A9.7; protein id: At1g25083.1 [Arabidopsis >gi|18395568|ref|NP_564224.1| anthranilate synthase beta subunit; id: At1g24909.1 [Arabidopsis thaliana]
  misc_feature (1)..(185): Homolog of NCBI NO: 15221810 NR Description: F5A9.17; protein id: At1g24807.1 [Arabidopsis >gi|9945079|gb|AAG03116.1|AC004133_10 F5A9.17 [Arabidopsis
  misc_feature (1)..(181): Homolog of NCBI NO: 28301926 NR Description: putative anthranilate synthase beta subunit
  misc_feature (1)..(183): Homolog of NCBI NO: 21741992 NR Description: OSJNBa0060P14.13 [Oryza sativa (japonica
  misc_feature (1)..(174): Homolog of NCBI NO: 37520452 NR Description: anthranilate synthase component II [Gloeobacter >gi|35211446|dbj|BAC88824.1| anthranilate synthase component II
  misc_feature (1)..(173): Homolog of NCBI NO: 11467408 NR Description: anthranilate synthase component II [Cyanophora >gi|1351304|sp|P48261|TRPG_CYAPA Anthranilate synthase component
MGELGCHFEVYRNDELTVEELKKKNPRGVLISPGPGTPQDSGISLQTVLELGPLVPLFGVCMGLQCIGEAFGGKIVRSPFGVMHGKSSMVHYDEKGEEGLFSGLSNPFIVGRYHSLVIEKDTFPSDELEVTAWTEDGLVMAARHRKYKHIQGVQFHPESIITTEGKTIVRNFIKIVEKKESEKLT

SEQ ID NO: 80451 - DNA, 1992 bp, Arabidopsis thaliana
  misc_feature (1)..(1992): Ceres Seq. ID no. 12655922
  misc_feature: MA Experiment ID: 20000307 Result: Down-regulated in Transcription
  misc_feature: MA Experiment 20000307 PARAMETER Experiment Name: At_Germinating_Seeds_Sub_P Parameter: Age (hr) Value: 24 vs. 0
  misc_feature: MA Experiment 20000307 PARAMETER Experiment Name: At_Germinating_Seeds_Sub_P Parameter: Organism Value: A. thaliana
  misc_feature: MA Experiment 20000307 PARAMETER Experiment Name: At_Germinating_Seeds_Sub_P Parameter: Plant Line Value: WS
  misc_feature: MA Experiment 20000307 PARAMETER Experiment Name: At_Germinating_Seeds_Sub_P Parameter: Tissue Value: Germinating Seeds
  misc_feature: MA Experiment ID: 20000355 Result: Up-regulated in Transcription
  misc_feature: MA Experiment 20000355 PARAMETER Experiment Name: At_Siliques_Sub_P Parameter: Age (day) Value: 21
  misc_feature: MA Experiment 20000355 PARAMETER Experiment Name: At_Siliques_Sub_P Parameter: Organism Value: A. thaliana
  misc_feature: MA Experiment 20000355 PARAMETER Experiment Name: At_Siliques_Sub_P Parameter: Plant Line Value: WS
  misc_feature: MA Experiment 20000355 PARAMETER Experiment Name: At_Siliques_Sub_P Parameter: Tissue Value: Less Than 5mm Siliques vs. Whole Plant
atggtctctggctattgtgcttccggtgatatcaccctcgctcgaggggtttttgagaaagctcctgtgtgtatgcgtgatactgtaatgtacaatgcgatgatcactggcttttcacataacaatgatggttactctgctattaacctcttttgtaagatgaagcatgaaggattcaaacctgacaacttcactttcgcaagtgttctcgcgggtttagcgttagttgccgatgacgagaagcaatgtgtgcaatttcatgccgcagctctgaaatctggtgctggttatattacttcggtttctaacgctctggtgtctgtgtattcgaaatgtgcgtcttctccgtctctgctacattcagctagaaaagtgtttgatgagattcttgagaaagatgagaggtcgtggacgactatgatgacgggttatgtaaagaatggttattttgatttaggggaagagttgcttgaggggatggacgacaatatgaagctggttgcttataatgctatgatttctggttatgttaatcgtggtttttatcaggaggcattggagatggtaagaaggatggtttcatctggaattgagctcgatgagtttacatatcctagcgttattagggcgtgtgccacagctggattgcttcagttgggaaagcaagttcatgcttatgtattaagaagggaggatttctcgtttcattttgacaattcgttagtttcgttatactacaaatgcgagatgaaagagaagaatattctatcatggatgataatgatatccgggttagctgaaaatgggtttggagaagaaggtttgaagctgttttcttgtatgaagagagaaggtttcgagccttgtgattacgctttttccggggcaatcaaatcatgtgccgtgctgggagcatattgcaatgggcaacagtaccatgcacagttgcttaaaatagggtttgactctagcctctctgctggaaacgctctgattacaatgtatgcgaaatgcggggttgtggaggaagctcgacaggtgtttcgaactatgccttgtctggattcggtttcctggaatgcgttgattgctgcattgggacagcatggccatggtgctgaagcagtagatgtgtatgaggagatgctaaagaaagggataagaccggatcggattacgttgcttacagttttgacagcatgtagccacgcgggtttagtggaccagggacggaaatattttgattctatggagactgtttaccgtatacctccaggtgcagatcattacgcaaggctgatcgatttgctttgtcgttctgggaaattctctgatgcggaaagtgtaatcgaatcattacctttcaaacctactgcagaaatctgggaagctcttctttctggttgcagagtgcatggaaacatggaactagggatcatcgctgcagacaaactcttcggtctcataccagaacatgatgggacatacatgctcttatcaaacatgcacgcagctactggccagtgggaggaagtggcaagggtacgtaaactaatgcgggatcgaggtgtaaaaaaagaagtagcttgtagttggattgaaatggagacacaagtgcatacatttctagttgatgatacatcacatccagaagcagaagctgtttacatctatcttcaagacctgggtaaagagatgaggagactcgggtatgtaccagacacgagcttcgtgttgcacgacgtagagtctgatggtcacaaggaagatatgttgacaactcatagtgagaagattgcggttgcttttgggctaatgaaacttcctccgggaacaactattaggattttcaagaacttgaggacttgtggagattgccataacttcttcaggttcttgtcgtgggtggtgcagcgagacattatcttgagagacaggaagaggtttcatcatttccggaatggcgagtgttcttgtggtaacttctggtag

SEQ ID NO: 80452 - protein, 663 aa, Arabidopsis thaliana
  peptide (1)..(663): Ceres Seq. ID no. 12655923
  misc_feature (29)..(63): Pfam Name: PPR repeat Pfam Description: PPR repeat
  misc_feature (127)..(663): Homolog of NCBI NO: 15222566 NR Description: hypothetical protein; protein id: At1g25360.1
  misc_feature (119)..(663): Homolog of NCBI NO: 34393605 NR Description: pentatricopeptide (PPR) repeat-containing
  misc_feature (1)..(382): Homolog of NCBI NO: 15222566 NR Description: hypothetical protein; protein id: At1g25360.1
  misc_feature (243)..(663): Homolog of NCBI NO: 21741755 NR Description: OSJNBa0060B20.9 [Oryza sativa (japonica
  misc_feature (1)..(248): Homolog of NCBI NO: 21741755 NR Description: OSJNBa0060B20.9 [Oryza sativa (japonica
  misc_feature (131)..(663): Homolog of NCBI NO: 34915012 NR Description: P0458A05.10 [Oryza sativa (japonica
  misc_feature (1)..(151): Homolog of NCBI NO: 34915012 NR Description: P0458A05.10 [Oryza sativa (japonica
  misc_feature (130)..(663): Homolog of NCBI NO: 38606535 NR Description: OSJNBa0016O02.23 [Oryza sativa (japonica
  misc_feature (1)..(179): Homolog of NCBI NO: 38606535 NR Description: OSJNBa0016O02.23 [Oryza sativa (japonica
  misc_feature (156)..(663): Homolog of NCBI NO: 15232837 NR Description: hypothetical protein; protein id: At3g02010.1 thaliana] >gi|6091739|gb|AAF03451.1|AC010797_27 hypothetical [Arabidopsis thaliana] >gi|6513930|gb|AAF14834.1|AC011664_16
MVSGYCASGDITLARGVFEKAPVCMRDTVMYNAMITGFSHNNDGYSAINLFCKMKHEGFKPDNFTFASVLAGLALVADDEKQCVQFHAAALKSGAGYITSVSNALVSVYSKCASSPSLLHSARKVFDEILEKDERSWTTMMTGYVKNGYFDLGEELLEGMDDNMKLVAYNAMISGYVNRGFYQEALEMVRRMVSSGIELDEFTYPSVIRACATAGLLQLGKQVHAYVLRREDFSFHFDNSLVSLYYKCEMKEKNILSWMIMISGLAENGFGEEGLKLFSCMKREGFEPCDYAFSGAIKSCAVLGAYCNGQQYHAQLLKIGFDSSLSAGNALITMYAKCGVVEEARQVFRTMPCLDSVSWNALIAALGQHGHGAEAVDVYEEMLKKGIRPDRITLLTVLTACSHAGLVDQGRKYFDSMETVYRIPPGADHYARLIDLLCRSGKFSDAESVIESLPFKPTAEIWEALLSGCRVHGNMELGIIAADKLFGLIPEHDGTYMLLSNMHAATGQWEEVARVRKLMRDRGVKKEVACSWIEMETQVHTFLVDDTSHPEAEAVYIYLQDLGKEMRRLGYVPDTSFVLHDVESDGHKEDMLTTHSEKIAVAFGLMKLPPGTTIRIFKNLRTCGDCHNFFRFLSWVVQRDIILRDRKRFHHFRNGECSCGNFW

SEQ ID NO: 80453 - protein, 639 aa, Arabidopsis thaliana
  peptide (1)..(639): Ceres Seq. ID no. 12655924
  misc_feature (5)..(39): Pfam Name: PPR repeat Pfam Description: PPR repeat
  misc_feature (103)..(639): Homolog of NCBI NO: 15222566 NR Description: hypothetical protein; protein id: At1g25360.1
  misc_feature (95)..(639): Homolog of NCBI NO: 34393605 NR Description: pentatricopeptide (PPR) repeat-containing
  misc_feature (1)..(358): Homolog of NCBI NO: 15222566 NR Description: hypothetical protein; protein id: At1g25360.1
  misc_feature (219)..(639): Homolog of NCBI NO: 21741755 NR Description: OSJNBa0060B20.9 [Oryza sativa (japonica
  misc_feature (1)..(224): Homolog of NCBI NO: 21741755 NR Description: OSJNBa0060B20.9 [Oryza sativa (japonica
  misc_feature (107)..(639): Homolog of NCBI NO: 34915012 NR Description: P0458A05.10 [Oryza sativa (japonica
  misc_feature (1)..(127): Homolog of NCBI NO: 34915012 NR Description: P0458A05.10 [Oryza sativa (japonica
  misc_feature (106)..(639): Homolog of NCBI NO: 38606535 NR Description: OSJNBa0016O02.23 [Oryza sativa (japonica
  misc_feature (1)..(155): Homolog of NCBI NO: 38606535 NR Description: OSJNBa0016O02.23 [Oryza sativa (japonica
  misc_feature (132)..(639): Homolog of NCBI NO: 15232837 NR Description: hypothetical protein; protein id: At3g02010.1 thaliana] >gi|6091739|gb|AAF03451.1|AC010797_27 hypothetical [Arabidopsis thaliana] >gi|6513930|gb|AAF14834.1|AC011664_16
MRDTVMYNAMITGFSHNNDGYSAINLFCKMKHEGFKPDNFTFASVLAGLALVADDEKQCVQFHAAALKSGAGYITSVSNALVSVYSKCASSPSLLHSARKVFDEILEKDERSWTTMMTGYVKNGYFDLGEELLEGMDDNMKLVAYNAMISGYVNRGFYQEALEMVRRMVSSGIELDEFTYPSVIRACATAGLLQLGKQVHAYVLRREDFSFHFDNSLVSLYYKCEMKEKNILSWMIMISGLAENGFGEEGLKLFSCMKREGFEPCDYAFSGAIKSCAVLGAYCNGQQYHAQLLKIGFDSSLSAGNALITMYAKCGVVEEARQVFRTMPCLDSVSWNALIAALGQHGHGAEAVDVYEEMLKKGIRPDRITLLTVLTACSHAGLVDQGRKYFDSMETVYRIPPGADHYARLIDLLCRSGKFSDAESVIESLPFKPTAEIWEALLSGCRVHGNMELGIIAADKLFGLIPEHDGTYMLLSNMHAATGQWEEVARVRKLMRDRGVKKEVACSWIEMETQVHTFLVDDTSHPEAEAVYIYLQDLGKEMRRLGYVPDTSFVLHDVESDGHKEDMLTTHSEKIAVAFGLMKLPPGTTIRIFKNLRTCGDCHNFFRFLSWVVQRDIILRDRKRFHHFRNGECSCGNFW

SEQ ID NO: 80454 - protein, 634 aa, Arabidopsis thaliana
  peptide (1)..(634): Ceres Seq. ID no. 12655925
  misc_feature (1)..(34): Pfam Name: PPR repeat Pfam Description: PPR repeat
  misc_feature (98)..(634): Homolog of NCBI NO: 15222566 NR Description: hypothetical protein; protein id: At1g25360.1
  misc_feature (90)..(634): Homolog of NCBI NO: 34393605 NR Description: pentatricopeptide (PPR) repeat-containing
  misc_feature (1)..(353): Homolog of NCBI NO: 15222566 NR Description: hypothetical protein; protein id: At1g25360.1
  misc_feature (214)..(634): Homolog of NCBI NO: 21741755 NR Description: OSJNBa0060B20.9 [Oryza sativa (japonica
  misc_feature (1)..(219): Homolog of NCBI NO: 21741755 NR Description: OSJNBa0060B20.9 [Oryza sativa (japonica
  misc_feature (102)..(634): Homolog of NCBI NO: 34915012 NR Description: P0458A05.10 [Oryza sativa (japonica
  misc_feature (1)..(122): Homolog of NCBI NO: 34915012 NR Description: P0458A05.10 [Oryza sativa (japonica
  misc_feature (101)..(634): Homolog of NCBI NO: 38606535 NR Description: OSJNBa0016O02.23 [Oryza sativa (japonica
  misc_feature (1)..(150): Homolog of NCBI NO: 38606535 NR Description: OSJNBa0016O02.23 [Oryza sativa (japonica
  misc_feature (127)..(634): Homolog of NCBI NO: 15232837 NR Description: hypothetical protein; protein id: At3g02010.1 thaliana] >gi|6091739|gb|AAF03451.1|AC010797_27 hypothetical [Arabidopsis thaliana] >gi|6513930|gb|AAF14834.1|AC011664_16
MYNAMITGFSHNNDGYSAINLFCKMKHEGFKPDNFTFASVLAGLALVADDEKQCVQFHAAALKSGAGYITSVSNALVSVYSKCASSPSLLHSARKVFDEILEKDERSWTTMMTGYVKNGYFDLGEELLEGMDDNMKLVAYNAMISGYVNRGFYQEALEMVRRMVSSGIELDEFTYPSVIRACATAGLLQLGKQVHAYVLRREDFSFHFDNSLVSLYYKCEMKEKNILSWMIMISGLAENGFGEEGLKLFSCMKREGFEPCDYAFSGAIKSCAVLGAYCNGQQYHAQLLKIGFDSSLSAGNALITMYAKCGVVEEARQVFRTMPCLDSVSWNALIAALGQHGHGAEAVDVYEEMLKKGIRPDRITLLTVLTACSHAGLVDQGRKYFDSMETVYRIPPGADHYARLIDLLCRSGKFSDAESVIESLPFKPTAEIWEALLSGCRVHGNMELGIIAADKLFGLIPEHDGTYMLLSNMHAATGQWEEVARVRKLMRDRGVKKEVACSWIEMETQVHTFLVDDTSHPEAEAVYIYLQDLGKEMRRLGYVPDTSFVLHDVESDGHKEDMLTTHSEKIAVAFGLMKLPPGTTIRIFKNLRTCGDCHNFFRFLSWVVQRDIILRDRKRFHHFRNGECSCGNFW

SEQ ID NO: 80455 - DNA, 1167 bp, Arabidopsis thaliana
  misc_feature (1)..(1167): Ceres Seq. ID no. 12655960
  misc_feature: MA Experiment ID: 108462 Result: Down-regulated in Transcription
  misc_feature: MA Experiment 108462 PARAMETER Experiment Name: At_Germinating_Seeds_cDNA_P Parameter: Age (day) Value: 2 vs. 0
  misc_feature: MA Experiment 108462 PARAMETER Experiment Name: At_Germinating_Seeds_cDNA_P Parameter: Tissue Value: Germinating Seeds
  misc_feature: MA Experiment ID: 108463 Result: Down-regulated in Transcription
  misc_feature: MA Experiment 108463 PARAMETER Experiment Name: At_Germinating_Seeds_cDNA_P Parameter: Age (day) Value: 3 vs. 0
  misc_feature: MA Experiment 108463 PARAMETER Experiment Name: At_Germinating_Seeds_cDNA_P Parameter: Tissue Value: Germinating Seeds
  misc_feature: MA Experiment ID: 108464 Result: Down-regulated in Transcription
  misc_feature: MA Experiment 108464 PARAMETER Experiment Name: At_Germinating_Seeds_cDNA_P Parameter: Age (day) Value: 4 vs. 0
  misc_feature: MA Experiment 108464 PARAMETER Experiment Name: At_Germinating_Seeds_cDNA_P Parameter: Tissue Value: Germinating Seeds
  misc_feature: MA Experiment ID: 108573 Result: Up-regulated in Transcription
  misc_feature: MA Experiment 108573 PARAMETER Experiment Name: At_Drought_cDNA_P Parameter: Timepoint (hr) Value: 6
  misc_feature: MA Experiment 108573 PARAMETER Experiment Name: At_Drought_cDNA_P Parameter: Tissue Value: Aerial
  misc_feature: MA Experiment 108573 PARAMETER Experiment Name: At_Drought_cDNA_P Parameter: Treatment Value: Drought vs. No Drought
  misc_feature: MA Experiment ID: 108595 Result: Down-regulated in Transcription
  misc_feature: MA Experiment 108595 PARAMETER Experiment Name: At_Ler-pi_Ovule_cDNA_P Parameter: Plant Line Value: null
  misc_feature: MA Experiment ID: 108668 Result: Up-regulated in Transcription
  misc_feature: MA Experiment 108668 PARAMETER Experiment Name: At_2mM_SA_cDNA_P Parameter: Plant Line Value: WS
  misc_feature: MA Experiment 108668 PARAMETER Experiment Name: At_2mM_SA_cDNA_P Parameter: Timepoint (hr) Value: 6
  misc_feature: MA Experiment 108668 PARAMETER Experiment Name: At_2mM_SA_cDNA_P Parameter: Treatment Value: 2mM SA vs. No Treatment
  misc_feature: MA Experiment ID: 20000182 Result: Up-regulated in Transcription
  misc_feature: MA Experiment 20000182 PARAMETER Experiment Name: At_2mM_SA_P Parameter: Age (day) Value: 14
  misc_feature: MA Experiment 20000182 PARAMETER Experiment Name: At_2mM_SA_P Parameter: Organism Value: A. thaliana
  misc_feature: MA Experiment 20000182 PARAMETER Experiment Name: At_2mM_SA_P Parameter: Plant Line Value: WS
  misc_feature: MA Experiment 20000182 PARAMETER Experiment Name: At_2mM_SA_P Parameter: Timepoint (hr) Value: 6
  misc_feature: MA Experiment 20000182 PARAMETER Experiment Name: At_2mM_SA_P Parameter: Tissue Value: Aerial
  misc_feature: MA Experiment 20000182 PARAMETER Experiment Name: At_2mM_SA_P Parameter: Treatment Value: 2mM SA vs. No Treatment
  misc_feature: MA Experiment ID: 20000184 Result: Down-regulated in Transcription
  misc_feature: MA Experiment 20000184 PARAMETER Experiment Name: At_Shoots__P Parameter: Age (day) Value: 7
  misc_feature: MA Experiment 20000184 PARAMETER Experiment Name: At_Shoots__P Parameter: Tissue Value: Shoots vs. Whole Plant
  misc_feature: MA Experiment ID: 20000227 Result: Down-regulated in Transcription
  misc_feature: MA Experiment 20000227 PARAMETER Experiment Name: At_Root-Tips-vs-Tops_P Parameter: Tissue Value: Root Tips vs. Root Tops
  misc_feature: MA Experiment ID: 20000437 Result: Up-regulated in Transcription
  misc_feature: MA Experiment 20000437 PARAMETER Experiment Name: At_Drought_P Parameter: Age (day) Value: 8
  misc_feature: MA Experiment 20000437 PARAMETER Experiment Name: At_Drought_P Parameter: Organism Value: A. thaliana
  misc_feature: MA Experiment 20000437 PARAMETER Experiment Name: At_Drought_P Parameter: Plant Line Value: WS
  misc_feature: MA Experiment 20000437 PARAMETER Experiment Name: At_Drought_P Parameter: Timepoint (hr) Value: 24
  misc_feature: MA Experiment 20000437 PARAMETER Experiment Name: At_Drought_P Parameter: Tissue Value: Whole Plant
  misc_feature: MA Experiment 20000437 PARAMETER Experiment Name: At_Drought_P Parameter: Treatment Value: Drought vs. No Drought
  misc_feature: MA Experiment ID: 20000438 Result: Down-regulated in Transcription
  misc_feature: MA Experiment 20000438 PARAMETER Experiment Name: At_Shoots__P Parameter: Age (day) Value: 14
  misc_feature: MA Experiment 20000438 PARAMETER Experiment Name: At_Shoots__P Parameter: Tissue Value: Shoots vs. Whole Plant
  misc_feature: MA Experiment ID: 20000794 Result: Up-regulated in Transcription
  misc_feature: MA Experiment 20000794 PARAMETER Experiment Name: At_Petals_P Parameter: Age (day) Value: 23-25 days
  misc_feature: MA Experiment 20000794 PARAMETER Experiment Name: At_Petals_P Parameter: Plant Line Value: WS
  misc_feature: MA Experiment 20000794 PARAMETER Experiment Name: At_Petals_P Parameter: Tissue Value: Petals vs. Whole plant
  misc_feature: MA Experiment ID: 20001557 Result: Up-regulated in Transcription
  misc_feature: MA Experiment 20001557 PARAMETER Experiment Name: At_Drought_Soil_Dry_P Parameter: Age (day) Value: 27
  misc_feature: MA Experiment 20001557 PARAMETER Experiment Name: At_Drought_Soil_Dry_P Parameter: Organism Value: A. thaliana
  misc_feature: MA Experiment 20001557 PARAMETER Experiment Name: At_Drought_Soil_Dry_P Parameter: Plant Line Value: WS
  misc_feature: MA Experiment 20001557 PARAMETER Experiment Name: At_Drought_Soil_Dry_P Parameter: Post Timepoint (hr) Value: 3
  misc_feature: MA Experiment 20001557 PARAMETER Experiment Name: At_Drought_Soil_Dry_P Parameter: Post-Treatment Value: Re-Water vs. No Drought
  misc_feature: MA Experiment 20001557 PARAMETER Experiment Name: At_Drought_Soil_Dry_P Parameter: Timepoint (day) Value: 13
  misc_feature: MA Experiment 20001557 PARAMETER Experiment Name: At_Drought_Soil_Dry_P Parameter: Treatment Value: Drought vs. No Drought
attcatcttttagctcttcagcgaatgttcgtctcgtctatttgctctctctcgacgactgttaattaactccggcgattgatcactccgtcttctttgtaacacagccggagaaaaatcgaaagtttcgtttttttcttctccttcgtagctaattcgccgtcgattttataattcggcagccatgagctcggttttgcagggttttacgaagtcacttgctatgacctttgtatcggagattggtgacaagacgtttttcgctgcagcaattttggctatgcgttatcctaggagacttgtgttggctggttgtttatcggctctgattgttatgactatcctctctgctactcttggatgggctgctcctaatctgatctctcgcaaatggactcatcacataacaacattgttgttctttggttttgggctatggtctttgtgggacggtttcaaagaaggaggagggggttcggaagaattggctgaagtcgaagcagaactggatgctgatttgaaggctaatggtaaatctccaaaagacagtagtaagagagaagatgaaaacaaaaagcagaatagggcgttcctcacgcaatttttctctccaatttttctcaaggctttttcgattaatttctttggagaatggggtgacaagagtcagcttgctacaattggtttagctgcagatgaaaatccatttggggtggtccttggtggagttgtggcacagtttttgtgcaccactgctgctgtaattggaggaaagagcttagcgtctcaaatttccgaaagaatagtggctctttctggtggaatgcttttcatcatttttggcatccaatcgtatcttacttctgttgaggcttaatgctttcttatggtttgtagggagactgatgaagaggaagaacgttactatccatagtttattagacatttaattttgtttattagacatttacacaagtgattacaaaacaaatctgagagtttgattgtctacagtgaaaacattgaaatgtgctgaagcagccatctgacttcaataaagtttttttggtaatcagttttaatcctcttttgttttttggagtcatttggattttgaaatgttttgcaaggatttgactcaatgagatacaaaatgtggttttgttt

SEQ ID NO: 80456 - protein, 230 aa, Arabidopsis thaliana; identical to SEQ ID NO: 25522
  peptide (1)..(230): Ceres Seq. ID no. 12655961
  misc_feature (8)..(83): Pfam Name: Uncharacterized protein family UPF0016 Pfam Description: Uncharacterized protein family UPF0016
  misc_feature (1)..(230): Homolog of NCBI NO: 15222613 NR Description: transmembrane protein, putative; protein id: supported by cDNA: 40780. [Arabidopsis thaliana]
  misc_feature (1)..(230): Homolog of NCBI NO: 21593636 NR Description: transmembrane protein, putative [Arabidopsis
  misc_feature (1)..(230): Homolog of NCBI NO: 15221462 NR Description: transmembrane protein, putative; protein id: [Arabidopsis thaliana] >gi|25353311|pir||A96711 hypothetical
  misc_feature (1)..(224): Homolog of NCBI NO: 18421551 NR Description: transmembrane protein FT27/PFT27-like; protein At5g36290.1, supported by cDNA: 12993., supported by cDNA: [Arabidopsis thaliana] >gi|15450794|gb|AAK96668.1| transmembrane
  misc_feature (5)..(221): Homolog of NCBI NO: 21357589 NR Description: CG4196-PC [Drosophila melanogaster]
  misc_feature (1)..(230): Homolog of NCBI NO: 6755853 NR Description: TPA regulated locus [Mus musculus]
  misc_feature (1)..(230): Homolog of NCBI NO: 7684611 NR Description: TPARDL [Mus musculus]
  misc_feature (1)..(230): Homolog of NCBI NO: 7689027 NR Description: uncharacterized hypothalamus protein HTMP [Homo
  misc_feature (1)..(230): Homolog of NCBI NO: 32189371 NR Description: TPA regulated locus; uncharacterized hypothalamus HTMP [Homo sapiens] >gi|9963757|gb|AAG09678.1|AF183409_1 protein PT27 [Homo sapiens] >gi|18568117|gb|AAL75947.1|AF132746_1
  misc_feature (5)..(223): Homolog of NCBI NO: 20385488 NR Description: transmembrane protein HTP-1 [Danio rerio]

SEQ ID NO: 80457 - protein, 217 aa, Arabidopsis thaliana; identical to SEQ ID NO: 25523
  peptide (1)..(217): Ceres Seq. ID no. 12655962
  misc_feature (1)..(70): Pfam Name: Uncharacterized protein family UPF0016 Pfam Description: Uncharacterized protein family UPF0016
  misc_feature (1)..(217): Homolog of NCBI NO: 15222613 NR Description: transmembrane protein, putative; protein id: supported by cDNA: 40780. [Arabidopsis thaliana]
  misc_feature (1)..(217): Homolog of NCBI NO: 21593636 NR Description: transmembrane protein, putative [Arabidopsis
  misc_feature (1)..(217): Homolog of NCBI NO: 15221462 NR Description: transmembrane protein, putative; protein id: [Arabidopsis thaliana] >gi|25353311|pir||A96711 hypothetical
  misc_feature (1)..(211): Homolog of NCBI NO: 18421551 NR Description: transmembrane protein FT27/PFT27-like; protein At5g36290.1, supported by cDNA: 12993., supported by cDNA: [Arabidopsis thaliana] >gi|15450794|gb|AAK96668.1| transmembrane
  misc_feature (1)..(208): Homolog of NCBI NO: 21357589 NR Description: CG4196-PC [Drosophila melanogaster]
  misc_feature (1)..(217): Homolog of NCBI NO: 6755853 NR Description: TPA regulated locus [Mus musculus]
  misc_feature (1)..(217): Homolog of NCBI NO: 7684611 NR Description: TPARDL [Mus musculus]
  misc_feature (1)..(217): Homolog of NCBI NO: 7689027 NR Description: uncharacterized hypothalamus protein HTMP [Homo
  misc_feature (1)..(217): Homolog of NCBI NO: 32189371 NR Description: TPA regulated locus; uncharacterized hypothalamus HTMP [Homo sapiens] >gi|9963757|gb|AAG09678.1|AF183409_1 protein PT27 [Homo sapiens] >gi|18568117|gb|AAL75947.1|AF132746_1
  misc_feature (1)..(210): Homolog of NCBI NO: 20385488 NR Description: transmembrane protein HTP-1 [Danio rerio]

SEQ ID NO: 80458 - protein, 198 aa, Arabidopsis thaliana; identical to SEQ ID NO: 25524
  peptide (1)..(198): Ceres Seq. ID no. 12655963
  misc_feature (1)..(51): Pfam Name: Uncharacterized protein family UPF0016 Pfam Description: Uncharacterized protein family UPF0016
  misc_feature (1)..(198): Homolog of NCBI NO: 15222613 NR Description: transmembrane protein, putative; protein id: supported by cDNA: 40780. [Arabidopsis thaliana]
  misc_feature (1)..(198): Homolog of NCBI NO: 21593636 NR Description: transmembrane protein, putative [Arabidopsis
  misc_feature (1)..(198): Homolog of NCBI NO: 15221462 NR Description: transmembrane protein, putative; protein id: [Arabidopsis thaliana] >gi|25353311|pir||A96711 hypothetical
  misc_feature (1)..(192): Homolog of NCBI NO: 18421551 NR Description: transmembrane protein FT27/PFT27-like; protein At5g36290.1, supported by cDNA: 12993., supported by cDNA: [Arabidopsis thaliana] >gi|15450794|gb|AAK96668.1| transmembrane
  misc_feature (1)..(189): Homolog of NCBI NO: 21357589 NR Description: CG4196-PC [Drosophila melanogaster]
  misc_feature (1)..(198): Homolog of NCBI NO: 6755853 NR Description: TPA regulated locus [Mus musculus]
  misc_feature (1)..(198): Homolog of NCBI NO: 7684611 NR Description: TPARDL [Mus musculus]
  misc_feature (1)..(198): Homolog of NCBI NO: 7689027 NR Description: uncharacterized hypothalamus protein HTMP [Homo
  misc_feature (1)..(198): Homolog of NCBI NO: 32189371 NR Description: TPA regulated locus; uncharacterized hypothalamus HTMP [Homo sapiens] >gi|9963757|gb|AAG09678.1|AF183409_1 protein PT27 [Homo sapiens] >gi|18568117|gb|AAL75947.1|AF132746_1
  misc_feature (1)..(191): Homolog of NCBI NO: 20385488 NR Description: transmembrane protein HTP-1 [Danio rerio]

SEQ ID NO: 80459 - DNA, 939 bp, Arabidopsis thaliana
  misc_feature (1)..(939): Ceres Seq. ID no. 12655980
  misc_feature: MA Experiment ID: 20000182 Result: Up-regulated in Transcription
  misc_feature: MA Experiment 20000182 PARAMETER Experiment Name: At_2mM_SA_P Parameter: Age (day) Value: 14
  misc_feature: MA Experiment 20000182 PARAMETER Experiment Name: At_2mM_SA_P Parameter: Organism Value: A. thaliana
  misc_feature: MA Experiment 20000182 PARAMETER Experiment Name: At_2mM_SA_P Parameter: Plant Line Value: WS
  misc_feature: MA Experiment 20000182 PARAMETER Experiment Name: At_2mM_SA_P Parameter: Timepoint (hr) Value: 6
  misc_feature: MA Experiment 20000182 PARAMETER Experiment Name: At_2mM_SA_P Parameter: Tissue Value: Aerial
  misc_feature: MA Experiment 20000182 PARAMETER Experiment Name: At_2mM_SA_P Parameter: Treatment Value: 2mM SA vs. No Treatment
  misc_feature: MA Experiment ID: 20000184 Result: Up-regulated in Transcription
  misc_feature: MA Experiment 20000184 PARAMETER Experiment Name: At_Shoots__P Parameter: Age (day) Value: 7
  misc_feature: MA Experiment 20000184 PARAMETER Experiment Name: At_Shoots__P Parameter: Tissue Value: Shoots vs. Whole Plant
  misc_feature: MA Experiment ID: 20000527 Result: Down-regulated in Transcription
  misc_feature: MA Experiment 20000527 PARAMETER Experiment Name: At_10percent_PEG_P Parameter: Age (day) Value: 20
  misc_feature: MA Experiment 20000527 PARAMETER Experiment Name: At_10percent_PEG_P Parameter: Organism Value: A. thaliana
  misc_feature: MA Experiment 20000527 PARAMETER Experiment Name: At_10percent_PEG_P Parameter: Plant Line Value: WS
  misc_feature: MA Experiment 20000527 PARAMETER Experiment Name: At_10percent_PEG_P Parameter: Timepoint (day) Value: 20
  misc_feature: MA Experiment 20000527 PARAMETER Experiment Name: At_10percent_PEG_P Parameter: Tissue Value: Whole Plant
  misc_feature: MA Experiment 20000527 PARAMETER Experiment Name: At_10percent_PEG_P Parameter: Treatment Value: 10percent PEG vs. No Treatment
  misc_feature: MA Experiment ID: 20001554 Result: Down-regulated in Transcription
  misc_feature: MA Experiment 20001554 PARAMETER Experiment Name: At_Drought_Soil_Dry_P Parameter: Age (day) Value: 21
  misc_feature: MA Experiment 20001554 PARAMETER Experiment Name: At_Drought_Soil_Dry_P Parameter: Organism Value: A. thaliana
  misc_feature: MA Experiment 20001554 PARAMETER Experiment Name: At_Drought_Soil_Dry_P Parameter: Plant Line Value: WS
  misc_feature: MA Experiment 20001554 PARAMETER Experiment Name: At_Drought_Soil_Dry_P Parameter: Post Timepoint (hr) Value: None
  misc_feature: MA Experiment 20001554 PARAMETER Experiment Name: At_Drought_Soil_Dry_P Parameter: Post-Treatment Value: None
  misc_feature: MA Experiment 20001554 PARAMETER Experiment Name: At_Drought_Soil_Dry_P Parameter: Timepoint (day) Value: 7
  misc_feature: MA Experiment 20001554 PARAMETER Experiment Name: At_Drought_Soil_Dry_P Parameter: Treatment Value: Drought vs. No Drought
  misc_feature: MA Experiment ID: 20001555 Result: Down-regulated in Transcription
  misc_feature: MA Experiment 20001555 PARAMETER Experiment Name: At_Drought_Soil_Dry_P Parameter: Age (day) Value: 24
  misc_feature: MA Experiment 20001555 PARAMETER Experiment Name: At_Drought_Soil_Dry_P Parameter: Organism Value: A. thaliana
  misc_feature: MA Experiment 20001555 PARAMETER Experiment Name: At_Drought_Soil_Dry_P Parameter: Plant Line Value: WS
  misc_feature: MA Experiment 20001555 PARAMETER Experiment Name: At_Drought_Soil_Dry_P Parameter: Post Timepoint (hr) Value: None
  misc_feature: MA Experiment 20001555 PARAMETER Experiment Name: At_Drought_Soil_Dry_P Parameter: Post-Treatment Value: None
  misc_feature: MA Experiment 20001555 PARAMETER Experiment Name: At_Drought_Soil_Dry_P Parameter: Timepoint (day) Value: 10
  misc_feature: MA Experiment 20001555 PARAMETER Experiment Name: At_Drought_Soil_Dry_P Parameter: Treatment Value: Drought vs. No Drought
  misc_feature: MA Experiment ID: 20001556 Result: Down-regulated in Transcription
  misc_feature: MA Experiment 20001556 PARAMETER Experiment Name: At_Drought_Soil_Dry_P Parameter: Age (day) Value: 26
  misc_feature: MA Experiment 20001556 PARAMETER Experiment Name: At_Drought_Soil_Dry_P Parameter: Organism Value: A. thaliana
  misc_feature: MA Experiment 20001556 PARAMETER Experiment Name: At_Drought_Soil_Dry_P Parameter: Plant Line Value: WS
  misc_feature: MA Experiment 20001556 PARAMETER Experiment Name: At_Drought_Soil_Dry_P Parameter: Post Timepoint (hr) Value: None
  misc_feature: MA Experiment 20001556 PARAMETER Experiment Name: At_Drought_Soil_Dry_P Parameter: Post-Treatment Value: None
  misc_feature: MA Experiment 20001556 PARAMETER Experiment Name: At_Drought_Soil_Dry_P Parameter: Timepoint (day) Value: 12
  misc_feature: MA Experiment 20001556 PARAMETER Experiment Name: At_Drought_Soil_Dry_P Parameter: Treatment Value: Drought vs. No Drought
  misc_feature: MA Experiment ID: 20001557 Result: Down-regulated in Transcription
  misc_feature: MA Experiment 20001557 PARAMETER Experiment Name: At_Drought_Soil_Dry_P Parameter: Age (day) Value: 27
  misc_feature: MA Experiment 20001557 PARAMETER Experiment Name: At_Drought_Soil_Dry_P Parameter: Organism Value: A. thaliana
  misc_feature: MA Experiment 20001557 PARAMETER Experiment Name: At_Drought_Soil_Dry_P Parameter: Plant Line Value: WS
  misc_feature: MA Experiment 20001557 PARAMETER Experiment Name: At_Drought_Soil_Dry_P Parameter: Post Timepoint (hr) Value: 3
  misc_feature: MA Experiment 20001557 PARAMETER Experiment Name: At_Drought_Soil_Dry_P Parameter: Post-Treatment Value: Re-Water vs. No Drought
  misc_feature: MA Experiment 20001557 PARAMETER Experiment Name: At_Drought_Soil_Dry_P Parameter: Timepoint (day) Value: 13
  misc_feature: MA Experiment 20001557 PARAMETER Experiment Name: At_Drought_Soil_Dry_P Parameter: Treatment Value: Drought vs. No Drought
  misc_feature: MA Experiment ID: 20001558 Result: Down-regulated in Transcription
  misc_feature: MA Experiment 20001558 PARAMETER Experiment Name: At_Drought_Soil_Dry_P Parameter: Age (day) Value: 27
  misc_feature: MA Experiment 20001558 PARAMETER Experiment Name: At_Drought_Soil_Dry_P Parameter: Organism Value: A. thaliana
  misc_feature: MA Experiment 20001558 PARAMETER Experiment Name: At_Drought_Soil_Dry_P Parameter: Plant Line Value: WS
  misc_feature: MA Experiment 20001558 PARAMETER Experiment Name: At_Drought_Soil_Dry_P Parameter: Post Timepoint (hr) Value: 6
  misc_feature: MA Experiment 20001558 PARAMETER Experiment Name: At_Drought_Soil_Dry_P Parameter: Post-Treatment Value: Re-Water vs. No Drought
  misc_feature: MA Experiment 20001558 PARAMETER Experiment Name: At_Drought_Soil_Dry_P Parameter: Timepoint (day) Value: 13
  misc_feature: MA Experiment 20001558 PARAMETER Experiment Name: At_Drought_Soil_Dry_P Parameter: Treatment Value: Drought vs. No Drought
  misc_feature: MA Experiment ID: 20001560 Result: Down-regulated in Transcription
  misc_feature: MA Experiment 20001560 PARAMETER Experiment Name: At_Drought_Soil_Dry_P Parameter: Age (day) Value: 28
  misc_feature: MA Experiment 20001560 PARAMETER Experiment Name: At_Drought_Soil_Dry_P Parameter: Organism Value: A. thaliana
  misc_feature: MA Experiment 20001560 PARAMETER Experiment Name: At_Drought_Soil_Dry_P Parameter: Plant Line Value: WS
  misc_feature: MA Experiment 20001560 PARAMETER Experiment Name: At_Drought_Soil_Dry_P Parameter: Post Timepoint (hr) Value: None
  misc_feature: MA Experiment 20001560 PARAMETER Experiment Name: At_Drought_Soil_Dry_P Parameter: Post-Treatment Value: None
  misc_feature: MA Experiment 20001560 PARAMETER Experiment Name: At_Drought_Soil_Dry_P Parameter: Timepoint (day) Value: 14
  misc_feature: MA Experiment 20001560 PARAMETER Experiment Name: At_Drought_Soil_Dry_P Parameter: Treatment Value: Drought vs. No Drought
  misc_feature: MA Experiment ID: 20001904 Result: Down-regulated in Transcription
  misc_feature: MA Experiment 20001904 PARAMETER Experiment Name: At_Drought_Reproduction_P Parameter: Age (day) Value: 37
  misc_feature: MA Experiment 20001904 PARAMETER Experiment Name: At_Drought_Reproduction_P Parameter: Organism Value: A. thaliana
  misc_feature: MA Experiment 20001904 PARAMETER Experiment Name: At_Drought_Reproduction_P Parameter: Plant Line Value: WS
  misc_feature: MA Experiment 20001904 PARAMETER Experiment Name: At_Drought_Reproduction_P Parameter: Timepoint (day) Value: 7
  misc_feature: MA Experiment 20001904 PARAMETER Experiment Name: At_Drought_Reproduction_P Parameter: Tissue Value: Rosettes
  misc_feature: MA Experiment 20001904 PARAMETER Experiment Name: At_Drought_Reproduction_P Parameter: Treatment Value: Drought vs. No Drought
atggatctgaaactcttgagtcggccggattgggatcaagaatcttacccagattcttctgatttcttggtcctcatcttctttgctccattcttcctttttcttcgcttaatcctcgacagatgcatattcgagagggtcgctagaagactggtagttcctaaaggactatgtgctgattcaaacgagagaagaaagaaggtagtgaaattcaaagaatccgcttggaaatgtttgtgctctttctcggtggaagcttttgctctctacgttacttataaggagccatggtttaaagacaccagatccttctggttaggaccaggagaccaggtatggcctgaccaaaagataaagttgaaaatgaagggaatgtatatgtttgttggcgggttaaatgtatatgccttttttgctttgttcttttgggaaacaagacgatctgatttcaaagtcatgttagttcatcacattgtaacttcattcctcatcatcttgtcttacgttttcagatttgctcgtataggttctgtaatattagctcttcacgaaatcagcgacgtgtttctagagataggcaagatgtgcaaatacagcggcgccgaaactatgactagcgtctcgtttgtcctatttttcttgtcgtggaccactttgcgactcatctattaccctttctggatcctatggagcaccagctacgaatcaataaaagtgaaaacggagtactgggacaagaagcatctgatggaaaccggaccaccccttatacttttctactatgtcttcaacacacttctttattgcttacagattctgcacatctactggtggatcttgatatatcgtgtgctcataagccaaatacgtgccaaaggcaaagtcgctaaagacattcgttctgattctgaaggtgaagatgatgaacaccaggattga

SEQ ID NO: 80460 - protein, 312 aa, Arabidopsis thaliana
  peptide (1)..(312): Ceres Seq. ID no. 12655981
  misc_feature (89)..(308): Pfam Name: Longevity-assurance protein (LAG1) Pfam Description: Longevity-assurance protein (LAG1)
  misc_feature (10)..(312): Homolog of NCBI NO: 25518747 NR Description: hypothetical protein F13B4.7 - Arabidopsis >gi|9802756|gb|AAF99825.1|AC027134_7 Highly similar to fungal
  misc_feature (10)..(312): Homolog of NCBI NO: 16974114 NR Description: putative resistance protein [Lycopersicon
  misc_feature (10)..(312): Homolog of NCBI NO: 18404559 NR Description: expressed protein; protein id: At3g25540.1, by cDNA: gi_13430479, supported by cDNA: gi_7658238 [Arabidopsis >gi|7658239|gb|AAF66102.1|AF198179_1 LAG1 homolog 1 [Arabidopsis
  misc_feature (10)..(312): Homolog of NCBI NO: 7688742 NR Description: ASC1 [Lycopersicon esculentum] alternaria stem canker resistance protein [Lycopersicon
  misc_feature (10)..(234): Homolog of NCBI NO: 30683361 NR Description: longevity assurance protein -related [Arabidopsis
  misc_feature (22)..(308): Homolog of NCBI NO: 15230323 NR Description: longevity factor-like protein; protein id: supported by cDNA: 123372., supported by cDNA: gi_7658240 thaliana] >gi|9294628|dbj|BAB02967.1| contains similarity to
  misc_feature (22)..(308): Homolog of NCBI NO: 7658241 NR Description: LAG1 homolog 2 [Arabidopsis thaliana]
  misc_feature (17)..(307): Homolog of NCBI NO: 34901974 NR Description: unknown protein [Oryza sativa (japonica
  misc_feature (62)..(312): Homolog of NCBI NO: 27769146 NR Description: Similar to RIKEN cDNA 0610013I17 gene [Xenopus
  misc_feature (77)..(311): Homolog of NCBI NO: 39588817 NR Description: Hypothetical protein CBG15635 [Caenorhabditis
MDLKLLSRPDWDQESYPDSSDFLVLIFFAPFFLFLRLILDRCIFERVARRLVVPKGLCADSNERRKKVVKFKESAWKCLCSFSVEAFALYVTYKEPWFKDTRSFWLGPGDQVWPDQKIKLKMKGMYMFVGGLNVYAFFALFFWETRRSDFKVMLVHHIVTSFLIILSYVFRFARIGSVILALHEISDVFLEIGKMCKYSGAETMTSVSFVLFFLSWTTLRLIYYPFWILWSTSYESIKVKTEYWDKKHLMETGPPLILFYYVFNTLLYCLQILHIYWWILIYRVLISQIRAKGKVAKDIRSDSEGEDDEHQD

SEQ ID NO: 80461 - protein, 191 aa, Arabidopsis thaliana
  peptide (1)..(191): Ceres Seq. ID no. 12655982
  misc_feature (1)..(187): Pfam Name: Longevity-assurance protein (LAG1) Pfam Description: Longevity-assurance protein (LAG1)
  misc_feature (1)..(191): Homolog of NCBI NO: 25518747 NR Description: hypothetical protein F13B4.7 - Arabidopsis >gi|9802756|gb|AAF99825.1|AC027134_7 Highly similar to fungal
  misc_feature (1)..(191): Homolog of NCBI NO: 16974114 NR Description: putative resistance protein [Lycopersicon
  misc_feature (1)..(191): Homolog of NCBI NO: 18404559 NR Description: expressed protein; protein id: At3g25540.1, by cDNA: gi_13430479, supported by cDNA: gi_7658238 [Arabidopsis >gi|7658239|gb|AAF66102.1|AF198179_1 LAG1 homolog 1 [Arabidopsis
  misc_feature (1)..(191): Homolog of NCBI NO: 7688742 NR Description: ASC1 [Lycopersicon esculentum] alternaria stem canker resistance protein [Lycopersicon
  misc_feature (1)..(113): Homolog of NCBI NO: 30683361 NR Description: longevity assurance protein -related [Arabidopsis
  misc_feature (1)..(187): Homolog of NCBI NO: 15230323 NR Description: longevity factor-like protein; protein id: supported by cDNA: 123372., supported by cDNA: gi_7658240 thaliana] >gi|9294628|dbj|BAB02967.1| contains similarity to
  misc_feature (1)..(187): Homolog of NCBI NO: 7658241 NR Description: LAG1 homolog 2 [Arabidopsis thaliana]
  misc_feature (1)..(186): Homolog of NCBI NO: 34901974 NR Description: unknown protein [Oryza sativa (japonica
  misc_feature (1)..(191): Homolog of NCBI NO: 27769146 NR Description: Similar to RIKEN cDNA 0610013I17 gene [Xenopus
  misc_feature (1)..(190): Homolog of NCBI NO: 39588817 NR Description: Hypothetical protein CBG15635 [Caenorhabditis
MKGMYMFVGGLNVYAFFALFFWETRRSDFKVMLVHHIVTSFLIILSYVFRFARIGSVILALHEISDVFLEIGKMCKYSGAETMTSVSFVLFFLSWTTLRLIYYPFWILWSTSYESIKVKTEYWDKKHLMETGPPLILFYYVFNTLLYCLQILHIYWWILIYRVLISQIRAKGKVAKDIRSDSEGEDDEHQD

SEQ ID NO: 80462 - protein, 188 aa, Arabidopsis thaliana
  peptide (1)..(188): Ceres Seq. ID no. 12655983
  misc_feature (1)..(184): Pfam Name: Longevity-assurance protein (LAG1) Pfam Description: Longevity-assurance protein (LAG1)
  misc_feature (1)..(188): Homolog of NCBI NO: 25518747 NR Description: hypothetical protein F13B4.7 - Arabidopsis >gi|9802756|gb|AAF99825.1|AC027134_7 Highly similar to fungal
  misc_feature (1)..(188): Homolog of NCBI NO: 16974114 NR Description: putative resistance protein [Lycopersicon
  misc_feature (1)..(188): Homolog of NCBI NO: 18404559 NR Description: expressed protein; protein id: At3g25540.1, by cDNA: gi_13430479, supported by cDNA: gi_7658238 [Arabidopsis >gi|7658239|gb|AAF66102.1|AF198179_1 LAG1 homolog 1 [Arabidopsis
  misc_feature (1)..(188): Homolog of NCBI NO: 7688742 NR Description: ASC1 [Lycopersicon esculentum] alternaria stem canker resistance protein [Lycopersicon
  misc_feature (1)..(110): Homolog of NCBI NO: 30683361 NR Description: longevity assurance protein -related [Arabidopsis
  misc_feature (1)..(184): Homolog of NCBI NO: 15230323 NR Description: longevity factor-like protein; protein id: supported by cDNA: 123372., supported by cDNA: gi_7658240 thaliana] >gi|9294628|dbj|BAB02967.1| contains similarity to
  misc_feature (1)..(184): Homolog of NCBI NO: 7658241 NR Description: LAG1 homolog 2 [Arabidopsis thaliana]
  misc_feature (1)..(183): Homolog of NCBI NO: 34901974 NR Description: unknown protein [Oryza sativa (japonica
  misc_feature (1)..(188): Homolog of NCBI NO: 27769146 NR Description: Similar to RIKEN cDNA 0610013I17 gene [Xenopus
  misc_feature (1)..(187): Homolog of NCBI NO: 39588817 NR Description: Hypothetical protein CBG15635 [Caenorhabditis
MYMFVGGLNVYAFFALFFWETRRSDFKVMLVHHIVTSFLIILSYVFRFARIGSVILALHEISDVFLEIGKMCKYSGAETMTSVSFVLFFLSWTTLRLIYYPFWILWSTSYESIKVKTEYWDKKHLMETGPPLILFYYVFNTLLYCLQILHIYWWILIYRVLISQIRAKGKVAKDIRSDSEGEDDEHQD

SEQ ID NO: 80463 - DNA, 1033 bp, Arabidopsis thaliana
  misc_feature (1)..(1033): Ceres Seq. ID no. 12656000
  misc_feature: MA Experiment ID: 108576 Result: Up-regulated in Transcription
  misc_feature: MA Experiment 108576 PARAMETER Experiment Name: At_42deg_Heat_cDNA_P Parameter: Temperature (deg C) Value: 42 vs. 22
  misc_feature: MA Experiment 108576 PARAMETER Experiment Name: At_42deg_Heat_cDNA_P Parameter: Timepoint (hr) Value: 1
  misc_feature: MA Experiment 108576 PARAMETER Experiment Name: At_42deg_Heat_cDNA_P Parameter: Tissue Value: Aerial
  misc_feature: MA Experiment ID: 20000111 Result: Up-regulated in Transcription
  misc_feature: MA Experiment 20000111 PARAMETER Experiment Name: At_42deg_Heat_cDNA_P Parameter: Temperature (deg C) Value: 42 vs. 22
  misc_feature: MA Experiment 20000111 PARAMETER Experiment Name: At_42deg_Heat_cDNA_P Parameter: Timepoint (hr) Value: 6
  misc_feature: MA Experiment 20000111 PARAMETER Experiment Name: At_42deg_Heat_cDNA_P Parameter: Tissue Value: Aerial
acattaccatcattagaaaactttcctaattagatcaagatcgtcgttatctctcttgttttttcttcatataatttagttattttaagagaaatgggaaggggtagggttgaattgaagaggatagagaacaagatcaatagacaagtgacattctcgaaaagaagaactggtcttttgaagaaagctcaggagatctctgttctttgtgatgccgaggtttcccttattgtcttctcccataagggcaaattgttcgagtactcctctgaatcttgcatggagaaggtactagaacgctacgagaggtattcttacgccgagagacagctgattgcacctgactctcacgttaatgcacagacgaactggtcaatggagtatagcaggcttaaggccaagattgagcttttggagagaaaccaaaggcattatctgggagaagagttggaaccaatgagcctcaaggatctccaaaatctggagcagcagcttgagactgctcttaagcacattcgctccagaaaaaatcaactcatgaatgagtccctcaaccacctccaaagaaaggagaaggagatacaggaggaaaacagcatgcttaccaaacagataaaggagagggaaaacatcctaaggacaaaacaaacccaatgtgagcagctgaaccgcagcgtcgacgatgtaccacagccacaaccatttcaacacccccatctttacatgatcgctcatcagacttctcctttcctaaatatgggtggtttgtaccaagaagaagaccaaacggcgatgaggaggaacaatctggatctgactcttgaacccatttacaattaccttggctgttacgccgcttgaatagactacatcgatctatatcaatctctttaaaataatataagatcgatcctctactcatgatctatattaaacaccggttaattaatatatttttggtatgtccttatatcatatcaacatgatcaagcctttttccaattcaatatatcttgtatttcggggagcaatg

SEQ ID NO: 80464 - protein, 255 aa, Arabidopsis thaliana
  peptide (1)..(255): Ceres Seq. ID no. 12656001
  misc_feature (75)..(176): Pfam Name: K-box region Pfam Description: K-box region
  misc_feature (1)..(255): Homolog of NCBI NO: 18395839 NR Description: floral regulatory gene CAULIFLOWER; protein id:
  misc_feature (1)..(255): Homolog of NCBI NO: 642589 NR Description: amino acid feature: K-box, bp 283..480; amino
  misc_feature (1)..(255): Homolog of NCBI NO: 30580167 NR Description: Transcription factor CAULIFLOWER (Agamous-like
  misc_feature (1)..(255): Homolog of NCBI NO: 6469345 NR Description: DNA-binding protein [Brassica rapa subsp.
  misc_feature (1)..(255): Homolog of NCBI NO: 7446539 NR Description: MADS box protein homolog CAL - wild cabbage
  misc_feature (1)..(255): Homolog of NCBI NO: 1561780 NR Description: homeotic protein boi2AP1 [Brassica oleracea]
  misc_feature (1)..(255): Homolog of NCBI NO: 3913047 NR Description: Floral homeotic protein APETALA1 (MADS C)
  misc_feature (1)..(255): Homolog of NCBI NO: 887392 NR Description: BOAP1 [Brassica oleracea]
  misc_feature (1)..(255): Homolog of NCBI NO: 15222220 NR Description: floral homeotic gene APETALA1; protein id: supported by cDNA: 39890. [Arabidopsis thaliana]
  misc_feature (1)..(255): Homolog of NCBI NO: 1561778 NR Description: homeotic protein boi1AP1 [Brassica oleracea]
MGRGRVELKRIENKINRQVTFSKRRTGLLKKAQEISVLCDAEVSLIVFSHKGKLFEYSSESCMEKVLERYERYSYAERQLIAPDSHVNAQTNWSMEYSRLKAKIELLERNQRHYLGEELEPMSLKDLQNLEQQLETALKHIRSRKNQLMNESLNHLQRKEKEIQEENSMLTKQIKERENILRTKQTQCEQLNRSVDDVPQPQPFQHPHLYMIAHQTSPFLNMGGLYQEEDQTAMRRNNLDLTLEPIYNYLGCYAA

SEQ ID NO: 80465 - protein, 193 aa, Arabidopsis thaliana
  peptide (1)..(193): Ceres Seq. ID no. 12656002
  misc_feature (13)..(114): Pfam Name: K-box region Pfam Description: K-box region
  misc_feature (1)..(193): Homolog of NCBI NO: 18395839 NR Description: floral regulatory gene CAULIFLOWER; protein id:
  misc_feature (1)..(193): Homolog of NCBI NO: 642589 NR Description: amino acid feature: K-box, bp 283..480; amino
  misc_feature (1)..(193): Homolog of NCBI NO: 30580167 NR Description: Transcription factor CAULIFLOWER (Agamous-like
  misc_feature (1)..(193): Homolog of NCBI NO: 6469345 NR Description: DNA-binding protein [Brassica rapa subsp.
  misc_feature (1)..(193): Homolog of NCBI NO: 7446539 NR Description: MADS box protein homolog CAL - wild cabbage
  misc_feature (1)..(193): Homolog of NCBI NO: 1561780 NR Description: homeotic protein boi2AP1 [Brassica oleracea]
  misc_feature (1)..(193): Homolog of NCBI NO: 3913047 NR Description: Floral homeotic protein APETALA1 (MADS C)
  misc_feature (1)..(193): Homolog of NCBI NO: 887392 NR Description: BOAP1 [Brassica oleracea]
  misc_feature (1)..(193): Homolog of NCBI NO: 15222220 NR Description: floral homeotic gene APETALA1; protein id: supported by cDNA: 39890. [Arabidopsis thaliana]
  misc_feature (1)..(193): Homolog of NCBI NO: 1561778 NR Description: homeotic protein boi1AP1 [Brassica oleracea]
MEKVLERYERYSYAERQLIAPDSHVNAQTNWSMEYSRLKAKIELLERNQRHYLGEELEPMSLKDLQNLEQQLETALKHIRSRKNQLMNESLNHLQRKEKEIQEENSMLTKQIKERENILRTKQTQCEQLNRSVDDVPQPQPFQHPHLYMIAHQTSPFLNMGGLYQEEDQTAMRRNNLDLTLEPIYNYLGCYAA

SEQ ID NO: 80466 - protein, 161 aa, Arabidopsis thaliana
  peptide (1)..(161): Ceres Seq. ID no. 12656003
  misc_feature (1)..(82): Pfam Name: K-box region Pfam Description: K-box region
  misc_feature (1)..(161): Homolog of NCBI NO: 18395839 NR Description: floral regulatory gene CAULIFLOWER; protein id:
  misc_feature (1)..(161): Homolog of NCBI NO: 642589 NR Description: amino acid feature: K-box, bp 283..480; amino
  misc_feature (1)..(161): Homolog of NCBI NO: 30580167 NR Description: Transcription factor CAULIFLOWER (Agamous-like
  misc_feature (1)..(161): Homolog of NCBI NO: 6469345 NR Description: DNA-binding protein [Brassica rapa subsp.
  misc_feature (1)..(161): Homolog of NCBI NO: 7446539 NR Description: MADS box protein homolog CAL - wild cabbage
  misc_feature (1)..(161): Homolog of NCBI NO: 1561780 NR Description: homeotic protein boi2AP1 [Brassica oleracea]
  misc_feature (1)..(161): Homolog of NCBI NO: 3913047 NR Description: Floral homeotic protein APETALA1 (MADS C)
  misc_feature (1)..(161): Homolog of NCBI NO: 887392 NR Description: BOAP1 [Brassica oleracea]
  misc_feature (1)..(161): Homolog of NCBI NO: 15222220 NR Description: floral homeotic gene APETALA1; protein id: supported by cDNA: 39890. [Arabidopsis thaliana]
  misc_feature (1)..(161): Homolog of NCBI NO: 1561778 NR Description: homeotic protein boi1AP1 [Brassica oleracea]
MEYSRLKAKIELLERNQRHYLGEELEPMSLKDLQNLEQQLETALKHIRSRKNQLMNESLNHLQRKEKEIQEENSMLTKQIKERENILRTKQTQCEQLNRSVDDVPQPQPFQHPHLYMIAHQTSPFLNMGGLYQEEDQTAMRRNNLDLTLEPIYNYLGCYAA

SEQ ID NO: 80467 - DNA, 594 bp, Arabidopsis thaliana
  misc_feature (1)..(594): Ceres Seq. ID no. 12656012
  misc_feature: MA Experiment ID: 20000185 Result: Up-regulated in Transcription
  misc_feature: MA Experiment 20000185 PARAMETER Experiment Name: At_Roots__P Parameter: Age (day) Value: 7 vs. 21
  misc_feature: MA Experiment 20000185 PARAMETER Experiment Name: At_Roots__P Parameter: Organism Value: A. thaliana
  misc_feature: MA Experiment 20000185 PARAMETER Experiment Name: At_Roots__P Parameter: Tissue Value: Roots vs. Whole Plant
  misc_feature: MA Experiment ID: 20000436 Result: Up-regulated in Transcription
  misc_feature: MA Experiment 20000436 PARAMETER Experiment Name: At_Drought_P Parameter: Age (day) Value: 7
  misc_feature: MA Experiment 20000436 PARAMETER Experiment Name: At_Drought_P Parameter: Organism Value: A. thaliana
  misc_feature: MA Experiment 20000436 PARAMETER Experiment Name: At_Drought_P Parameter: Plant Line Value: WS
  misc_feature: MA Experiment 20000436 PARAMETER Experiment Name: At_Drought_P Parameter: Timepoint (hr) Value: 12
  misc_feature: MA Experiment 20000436 PARAMETER Experiment Name: At_Drought_P Parameter: Tissue Value: Whole Plant
  misc_feature: MA Experiment 20000436 PARAMETER Experiment Name: At_Drought_P Parameter: Treatment Value: Drought vs. No Drought
  misc_feature: MA Experiment ID: 20000437 Result: Up-regulated in Transcription
  misc_feature: MA Experiment 20000437 PARAMETER Experiment Name: At_Drought_P Parameter: Age (day) Value: 8
  misc_feature: MA Experiment 20000437 PARAMETER Experiment Name: At_Drought_P Parameter: Organism Value: A. thaliana
  misc_feature: MA Experiment 20000437 PARAMETER Experiment Name: At_Drought_P Parameter: Plant Line Value: WS
  misc_feature: MA Experiment 20000437 PARAMETER Experiment Name: At_Drought_P Parameter: Timepoint (hr) Value: 24
  misc_feature: MA Experiment 20000437 PARAMETER Experiment Name: At_Drought_P Parameter: Tissue Value: Whole Plant
  misc_feature: MA Experiment 20000437 PARAMETER Experiment Name: At_Drought_P Parameter: Treatment Value: Drought vs. No Drought
  misc_feature: MA Experiment ID: 20000439 Result: Up-regulated in Transcription
  misc_feature: MA Experiment 20000439 PARAMETER Experiment Name: At_Roots__P Parameter: Age (day) Value: 14 vs. 21
  misc_feature: MA Experiment 20000439 PARAMETER Experiment Name: At_Roots__P Parameter: Organism Value: A. thaliana
  misc_feature: MA Experiment 20000439 PARAMETER Experiment Name: At_Roots__P Parameter: Tissue Value: Roots vs. Whole Plant
atggcggttttgcttcctctgtttcttctctctttcatgtttacctattcaaacgcggcggtttgtgtgtgcaaggacgctaacgagctggatcttcagaaggtgatagacttcgcatgtggaggaggtgctgactgtgcacagattcagacgaccggagcttgttatcaaccaaacaccctcaagaaccactgtgacgttgccgttaacagctactatcaaaagaaagcttccaccggtgccacatgtgacttcaacggcgccgccgtcatctccacttcccctccttcgactacgtcaagctgtttatctagttctagttccaacggaacccccactgccggatatccatccaccggaaattcaaccacagcaagtccaggcaccacaaatccatccacaggcaattcaacaaacagcacactacccactaatgataagccgacttcatctacgataacgtttcctgacagtactactatgggaccatctagcagcacgagtggtgatcccaacggtggagaagagctatccgtcagaaccacgacgatcatcttactgactaccatcgctgccgtggcattgagggtttag

SEQ ID NO: 80468 - protein, 197 aa, Arabidopsis thaliana
  peptide (1)..(197): Ceres Seq. ID no. 12656013
  misc_feature (92)..(195): Pfam Name: Mucin-like glycoprotein Pfam Description: Mucin-like glycoprotein
  misc_feature (1)..(197): Homolog of NCBI NO: 15222715 NR Description: glycosyl hydrolase family 17; protein id: [Arabidopsis thaliana] >gi|25518437|pir||C86391 hypothetical
  misc_feature (1)..(190): Homolog of NCBI NO: 18409239 NR Description: unknown protein; protein id: At1g69295.1, by cDNA: 16467., supported by cDNA: gi_13877780, supported by gi_15724275, supported by cDNA: gi_15912196, supported by cDNA:
  misc_feature (1)..(190): Homolog of NCBI NO: 21553768 NR Description: unknown [Arabidopsis thaliana]
  misc_feature (1)..(190): Homolog of NCBI NO: 25404810 NR Description: unknown protein, 45065-49536 [imported] -
  misc_feature (1)..(155): Homolog of NCBI NO: 18394637 NR Description: glycosyl hydrolase family 17; protein id: supported by cDNA: 32195. [Arabidopsis thaliana]
  misc_feature (1)..(187): Homolog of NCBI NO: 30683485 NR Description: expressed protein [Arabidopsis thaliana] unknown protein [Arabidopsis thaliana]
  misc_feature (2)..(191): Homolog of NCBI NO: 22775658 NR Description: contains ESTs
  misc_feature (1)..(133): Homolog of NCBI NO: 22325443 NR Description: similar to glycosyl hydrolase family 17; protein
  misc_feature (1)..(160): Homolog of NCBI NO: 21592859 NR Description: unknown [Arabidopsis thaliana]
  misc_feature (1)..(152): Homolog of NCBI NO: 15241485 NR Description: glycosyl hydrolase family 17; protein id: supported by cDNA: 33347. [Arabidopsis thaliana]
MAVLLPLFLLSFMFTYSNAAVCVCKDANELDLQKVIDFACGGGADCAQIQTTGACYQPNTLKNHCDVAVNSYYQKKASTGATCDFNGAAVISTSPPSTTSSCLSSSSSNGTPTAGYPSTGNSTTASPGTTNPSTGNSTNSTLPTNDKPTSSTITFPDSTTMGPSSSTSGDPNGGEELSVRTTTIILLTTIAAVALRV

SEQ ID NO: 80469 - protein, 185 aa, Arabidopsis thaliana
  peptide (1)..(185): Ceres Seq. ID no. 12656014
  misc_feature (80)..(183): Pfam Name: Mucin-like glycoprotein Pfam Description: Mucin-like glycoprotein
  misc_feature (1)..(185): Homolog of NCBI NO: 15222715 NR Description: glycosyl hydrolase family 17; protein id: [Arabidopsis thaliana] >gi|25518437|pir||C86391 hypothetical
  misc_feature (1)..(178): Homolog of NCBI NO: 18409239 NR Description: unknown protein; protein id: At1g69295.1, by cDNA: 16467., supported by cDNA: gi_13877780, supported by gi_15724275, supported by cDNA: gi_15912196, supported by cDNA:
  misc_feature (1)..(178): Homolog of NCBI NO: 21553768 NR Description: unknown [Arabidopsis thaliana]
  misc_feature (1)..(178): Homolog of NCBI NO: 25404810 NR Description: unknown protein, 45065-49536 [imported] -
  misc_feature (1)..(143): Homolog of NCBI NO: 18394637 NR Description: glycosyl hydrolase family 17; protein id: supported by cDNA: 32195. [Arabidopsis thaliana]
  misc_feature (1)..(175): Homolog of NCBI NO: 30683485 NR Description: expressed protein [Arabidopsis thaliana] unknown protein [Arabidopsis thaliana]
  misc_feature (1)..(179): Homolog of NCBI NO: 22775658 NR Description: contains ESTs
  misc_feature (1)..(121): Homolog of NCBI NO: 22325443 NR Description: similar to glycosyl hydrolase family 17; protein
  misc_feature (1)..(148): Homolog of NCBI NO: 21592859 NR Description: unknown [Arabidopsis thaliana]
  misc_feature (1)..(140): Homolog of NCBI NO: 15241485 NR Description: glycosyl hydrolase family 17; protein id: supported by cDNA: 33347. [Arabidopsis thaliana]
MFTYSNAAVCVCKDANELDLQKVIDFACGGGADCAQIQTTGACYQPNTLKNHCDVAVNSYYQKKASTGATCDFNGAAVISTSPPSTTSSCLSSSSSNGTPTAGYPSTGNSTTASPGTTNPSTGNSTNSTLPTNDKPTSSTITFPDSTTMGPSSSTSGDPNGGEELSVRTTTIILLTTIAAVALRV

SEQ ID NO: 80470 - DNA, 873 bp, Arabidopsis thaliana
  misc_feature (1)..(873): Ceres Seq. ID no. 12656047
  misc_feature: MA Experiment ID: 20000315 Result: Down-regulated in Transcription
  misc_feature: MA Experiment 20000315 PARAMETER Experiment Name: At_14day_Shoots-Roots_Sub_P Parameter: Age (day) Value: 14
  misc_feature: MA Experiment 20000315 PARAMETER Experiment Name: At_14day_Shoots-Roots_Sub_P Parameter: Organism Value: A. thaliana
  misc_feature: MA Experiment 20000315 PARAMETER Experiment Name: At_14day_Shoots-Roots_Sub_P Parameter: Plant Line Value: WS
  misc_feature: MA Experiment 20000315 PARAMETER Experiment Name: At_14day_Shoots-Roots_Sub_P Parameter: Tissue Value: Shoots vs. Whole Plant
  misc_feature: MA Experiment ID: 20000328 Result: Down-regulated in Transcription
  misc_feature: MA Experiment 20000328 PARAMETER Experiment Name: At_42deg_Heat_Sub_P Parameter: Age (day) Value: 14
  misc_feature: MA Experiment 20000328 PARAMETER Experiment Name: At_42deg_Heat_Sub_P Parameter: Organism Value: A. thaliana
  misc_feature: MA Experiment 20000328 PARAMETER Experiment Name: At_42deg_Heat_Sub_P Parameter: Plant Line Value: WS
  misc_feature: MA Experiment 20000328 PARAMETER Experiment Name: At_42deg_Heat_Sub_P Parameter: Temperature (deg C) Value: 42 vs. 22
  misc_feature: MA Experiment 20000328 PARAMETER Experiment Name: At_42deg_Heat_Sub_P Parameter: Timepoint (hr) Value: 6
  misc_feature: MA Experiment 20000328 PARAMETER Experiment Name: At_42deg_Heat_Sub_P Parameter: Tissue Value: Aerial
  misc_feature: MA Experiment ID: 20000329 Result: Down-regulated in Transcription
  misc_feature: MA Experiment 20000329 PARAMETER Experiment Name: At_4deg_Cold_Sub_P Parameter: Age (day) Value: 14
  misc_feature: MA Experiment 20000329 PARAMETER Experiment Name: At_4deg_Cold_Sub_P Parameter: Organism Value: A. thaliana
  misc_feature: MA Experiment 20000329 PARAMETER Experiment Name: At_4deg_Cold_Sub_P Parameter: Plant Line Value: WS
  misc_feature: MA Experiment 20000329 PARAMETER Experiment Name: At_4deg_Cold_Sub_P Parameter: Temperature (deg C) Value: 4 vs. 22
  misc_feature: MA Experiment 20000329 PARAMETER Experiment Name: At_4deg_Cold_Sub_P Parameter: Timepoint (hr) Value: 6
  misc_feature: MA Experiment 20000329 PARAMETER Experiment Name: At_4deg_Cold_Sub_P Parameter: Tissue Value: Aerial
atggaggagggacgtcaaaaagacttgcaattgttggaggagattatcgacaaaggtttgaaacagaagcttgtacatgcaactgcttcacgctctgacttgcggaaaaacctagaaactctggagaagaatggtgtaaatagtctcaaaacaagggtcaaccttggttcagaagtttacatgcaagctgaagtgccagatactcggcacatattcatggatgtaggcctcggcttttatgtggagttcacacggcaagaagctcttgactatatagcacaaagggaggaaagaactcaaaaacaactagaagagtatactggtgttattacgcagatcaaagggcgcatcaaactgcttgtgatggatccaacacagaacacaagtgcagggattggtgggagcaatggtacaatcagatatcaaaccaatgatgggacttcaactgtgaccgttgctgatgattcaaaggagaatctttcccaagtcataaactctattgagaaaactttaggagtccttcatcagttacaccttaccgtcacttctttcacacccgcgtctcaactccatctcctccagcgccttaactctcttgtgatggagctagataacatgactaagttgtctgagaaatgcaacattcaaatccccatggaggttcttaacttgattgatgatgggaagaacccggatgagtttacgaaagatgttcttaatagctgcatagctagaaatcaagttactaagggcaagactgatgcttttaaggatttgagaaaacatattctggaggagcttgaacagaatttccctgatgaagtcgatatgtatagagaaatccgtgctagttctgctgctgtaagttgttaa

SEQ ID NO: 80471 - protein, 290 aa, Arabidopsis thaliana
  peptide (1)..(290): Ceres Seq. ID no. 12656048
  misc_feature (20)..(119): Pfam Name: Prefoldin subunit Pfam Description: Prefoldin subunit
  misc_feature (116)..(290): Homolog of NCBI NO: 25403266 NR Description: protein T24P13.4 [imported] - Arabidopsis >gi|9295719|gb|AAF87025.1|AC006535_3 T24P13.4 [Arabidopsis
  misc_feature (1)..(119): Homolog of NCBI NO: 25403266 NR Description: protein T24P13.4 [imported] - Arabidopsis >gi|9295719|gb|AAF87025.1|AC006535_3 T24P13.4 [Arabidopsis
  misc_feature (122)..(287): Homolog of NCBI NO: 18396004 NR Description: Expressed protein; protein id: At1g26665.1, by cDNA: gi_13926326, supported by cDNA: gi_16323257 [Arabidopsis >gi|13926327|gb|AAK49628.1|AF372912_1 At1g26660/T24P13_4
  misc_feature (122)..(287): Homolog of NCBI NO: 15238215 NR Description: putative protein; protein id: At5g41910.1 thaliana] >gi|9757936|dbj|BAB08424.1| gene_id:MJC20.1~similar to protein~sp|P45966 [Arabidopsis thaliana]
  misc_feature (1)..(119): Homolog of NCBI NO: 22329800 NR Description: unknown protein; protein id: At1g26660.1, by cDNA: gi_17381131, supported by cDNA: gi_20465552 [Arabidopsis >gi|17381132|gb|AAL36378.1| unknown protein [Arabidopsis
  misc_feature (5)..(120): Homolog of NCBI NO: 27817927 NR Description: P0453E05.1 [Oryza sativa (japonica
  misc_feature (134)..(282): Homolog of NCBI NO: 34873422 NR Description: similar to DNA segment, Chr 13, Wayne State
  misc_feature (158)..(282): Homolog of NCBI NO: 20070410 NR Description: DNA segment, Chr 13, Wayne State University 50, [Mus musculus] >gi|27681537|ref|XP_214417.1| similar to DNA Chr 13, Wayne State University 50, expressed [Mus musculus]
  misc_feature (158)..(282): Homolog of NCBI NO: 29145113 NR Description: similar to DNA segment, Chr 13, Wayne State
  misc_feature (158)..(282): Homolog of NCBI NO: 13097162 NR Description: Similar to CG5057 gene product [Homo sapiens]
MEEGRQKDLQLLEEIIDKGLKQKLVHATASRSDLRKNLETLEKNGVNSLKTRVNLGSEVYMQAEVPDTRHIFMDVGLGFYVEFTRQEALDYIAQREERTQKQLEEYTGVITQIKGRIKLLVMDPTQNTSAGIGGSNGTIRYQTNDGTSTVTVADDSKENLSQVINSIEKTLGVLHQLHLTVTSFTPASQLHLLQRLNSLVMELDNMTKLSEKCNIQIPMEVLNLIDDGKNPDEFTKDVLNSCIARNQVTKGKTDAFKDLRKHILEELEQNFPDEVDMYREIRASSAAVSC

SEQ ID NO: 80472 - protein, 230 aa, Arabidopsis thaliana
  peptide (1)..(230): Ceres Seq. ID no. 12656049
  misc_feature (1)..(59): Pfam Name: Prefoldin subunit Pfam Description: Prefoldin subunit
  misc_feature (56)..(230): Homolog of NCBI NO: 25403266 NR Description: protein T24P13.4 [imported] - Arabidopsis >gi|9295719|gb|AAF87025.1|AC006535_3 T24P13.4 [Arabidopsis
  misc_feature (1)..(59): Homolog of NCBI NO: 25403266 NR Description: protein T24P13.4 [imported] - Arabidopsis >gi|9295719|gb|AAF87025.1|AC006535_3 T24P13.4 [Arabidopsis
  misc_feature (62)..(227): Homolog of NCBI NO: 18396004 NR Description: Expressed protein; protein id: At1g26665.1, by cDNA: gi_13926326, supported by cDNA: gi_16323257 [Arabidopsis >gi|13926327|gb|AAK49628.1|AF372912_1 At1g26660/T24P13_4
  misc_feature (62)..(227): Homolog of NCBI NO: 15238215 NR Description: putative protein; protein id: At5g41910.1 thaliana] >gi|9757936|dbj|BAB08424.1| gene_id:MJC20.1~similar to protein~sp|P45966 [Arabidopsis thaliana]
  misc_feature (1)..(59): Homolog of NCBI NO: 22329800 NR Description: unknown protein; protein id: At1g26660.1, by cDNA: gi_17381131, supported by cDNA: gi_20465552 [Arabidopsis >gi|17381132|gb|AAL36378.1| unknown protein [Arabidopsis
  misc_feature (1)..(60): Homolog of NCBI NO: 27817927 NR Description: P0453E05.1 [Oryza sativa (japonica
  misc_feature (74)..(222): Homolog of NCBI NO: 34873422 NR Description: similar to DNA segment, Chr 13, Wayne State
  misc_feature (98)..(222): Homolog of NCBI NO: 20070410 NR Description: DNA segment, Chr 13, Wayne State University 50, [Mus musculus] >gi|27681537|ref|XP_214417.1| similar to DNA Chr 13, Wayne State University 50, expressed [Mus musculus]
  misc_feature (98)..(222): Homolog of NCBI NO: 29145113 NR Description: similar to DNA segment, Chr 13, Wayne State
  misc_feature (98)..(222): Homolog of NCBI NO: 13097162 NR Description: Similar to CG5057 gene product [Homo sapiens]
MQAEVPDTRHIFMDVGLGFYVEFTRQEALDYIAQREERTQKQLEEYTGVITQIKGRIKLLVMDPTQNTSAGIGGSNGTIRYQTNDGTSTVTVADDSKENLSQVINSIEKTLGVLHQLHLTVTSFTPASQLHLLQRLNSLVMELDNMTKLSEKCNIQIPMEVLNLIDDGKNPDEFTKDVLNSCIARNQVTKGKTDAFKDLRKHILEELEQNFPDEVDMYREIRASSAAVSC

SEQ ID NO: 80473 - protein, 218 aa, Arabidopsis thaliana
  peptide (1)..(218): Ceres Seq. ID no. 12656050
  misc_feature (44)..(218): Homolog of NCBI NO: 25403266 NR Description: protein T24P13.4 [imported] - Arabidopsis >gi|9295719|gb|AAF87025.1|AC006535_3 T24P13.4 [Arabidopsis
  misc_feature (1)..(47): Homolog of NCBI NO: 25403266 NR Description: protein T24P13.4 [imported] - Arabidopsis >gi|9295719|gb|AAF87025.1|AC006535_3 T24P13.4 [Arabidopsis
  misc_feature (50)..(215): Homolog of NCBI NO: 18396004 NR Description: Expressed protein; protein id: At1g26665.1, by cDNA: gi_13926326, supported by cDNA: gi_16323257 [Arabidopsis >gi|13926327|gb|AAK49628.1|AF372912_1 At1g26660/T24P13_4
  misc_feature (50)..(215): Homolog of NCBI NO: 15238215 NR Description: putative protein; protein id: At5g41910.1 thaliana] >gi|9757936|dbj|BAB08424.1| gene_id:MJC20.1~similar to protein~sp|P45966 [Arabidopsis thaliana]
  misc_feature (1)..(47): Homolog of NCBI NO: 22329800 NR Description: unknown protein; protein id: At1g26660.1, by cDNA: gi_17381131, supported by cDNA: gi_20465552 [Arabidopsis >gi|17381132|gb|AAL36378.1| unknown protein [Arabidopsis
  misc_feature (1)..(48): Homolog of NCBI NO: 27817927 NR Description: P0453E05.1 [Oryza sativa (japonica
  misc_feature (62)..(210): Homolog of NCBI NO: 34873422 NR Description: similar to DNA segment, Chr 13, Wayne State
  misc_feature (86)..(210): Homolog of NCBI NO: 20070410 NR Description: DNA segment, Chr 13, Wayne State University 50, [Mus musculus] >gi|27681537|ref|XP_214417.1| similar to DNA Chr 13, Wayne State University 50, expressed [Mus musculus]
  misc_feature (86)..(210): Homolog of NCBI NO: 29145113 NR Description: similar to DNA segment, Chr 13, Wayne State
  misc_feature (86)..(210): Homolog of NCBI NO: 13097162 NR Description: Similar to CG5057 gene product [Homo sapiens]
MDVGLGFYVEFTRQEALDYIAQREERTQKQLEEYTGVITQIKGRIKLLVMDPTQNTSAGIGGSNGTIRYQTNDGTSTVTVADDSKENLSQVINSIEKTLGVLHQLHLTVTSFTPASQLHLLQRLNSLVMELDNMTKLSEKCNIQIPMEVLNLIDDGKNPDEFTKDVLNSCIARNQVTKGKTDAFKDLRKHILEELEQNFPDEVDMYREIRASSAAVSC

SEQ ID NO: 80474 - DNA, 1080 bp, Arabidopsis thaliana
  misc_feature (1)..(1080): Ceres Seq. ID no. 12656092
  misc_feature: MA Experiment ID: 20000440 Result: Up-regulated in Transcription
  misc_feature: MA Experiment 20000440 PARAMETER Experiment Name: At_Closed-Flower__Sub_P Parameter: Tissue Value: Closed Flower vs. Whole Plant
atgtttataacggaaaaacaagtgtggatggatgagatcgtcgcaagaagagcttcttcttcttgggacttccctttcaacgacattaatattcatcagcatcatcatcgtcactgcaacacaagtcatgagtttgaaatcttgaagagtcctcttggagatgtagcggttcacgaagaagagagtaataataataaccctaatttcagtaacagcgagagtggtaagaaggagacaacagatagtggtcagtcttggtcctcgtcgtcttcaaaaccatcggtcttggggagaggacattggagaccagctgaagatgttaaactcaaagagcttgtctccatttacggcccacaaaactggaacctcatagctgaaaagcttcaaggaagatctgggaagagctgtagactacgatggtttaaccaattggacccgaggataaaccgaagagctttcacagaagaagaagaggagaggctgatgcaagcacataggctttatggtaacaaatgggcaatgattgcgaggcttttccctggtagaactgataattcagtgaagaaccattggcatgttgtcatggctcgtaagtatagagaacactcttctgcttaccgtaggagaaagcttatgagtaataatccacttaaacctcacctcaccaataatcatcatcctaaccctaaccctaattaccactcttttatctccactaatcattacttcgctcagcctttccccgagtttaatttgactcatcacctggttaataatgcccctatcacgagtgaccataaccagcttgtgttgcctttccattgctttcaaggttatgagaacaatgaacctccgatggttgtgagtatgtttggcaaccaaatgatggtcggcgataacgttggtgccacgtcagacgcgttatgcaatattccgcacattgaccctagtaaccaagagaaaccggagccaaatgatgcaatgcattggatcggaatggacgcggtagatgaggaggtgttcgaaaaggctaagcagcaaccacattttttcgattttcttggcttggggacggcgtga

SEQ ID NO: 80475 - protein, 359 aa, Arabidopsis thaliana
  peptide (1)..(359): Ceres Seq. ID no. 12656093
  misc_feature (98)..(144): Pfam Name: Myb-like DNA-binding domain Pfam Description: Myb-like DNA-binding domain
  misc_feature (1)..(359): Homolog of NCBI NO: 25403271 NR Description: protein T24P13.16 [imported] - Arabidopsis >gi|9295726|gb|AAF87032.1|AC006535_10 T24P13.16 [Arabidopsis
  misc_feature (1)..(278): Homolog of NCBI NO: 18396049 NR Description: myb-related protein, putative; protein id: supported by cDNA: gi_13430157 [Arabidopsis thaliana]
  misc_feature (33)..(265): Homolog of NCBI NO: 15222362 NR Description: MYB-family transcription factor, putative; id: At1g69560.1, supported by cDNA: gi_7644365 [Arabidopsis
  misc_feature (78)..(251): Homolog of NCBI NO: 34903242 NR Description: unnamed protein product [Oryza sativa (japonica group)] >gi|6539552|dbj|BAA88169.1| unnamed protein product
  misc_feature (69)..(209): Homolog of NCBI NO: 7939552 NR Description: MYB transcription factor-like protein
  misc_feature (69)..(209): Homolog of NCBI NO: 18406019 NR Description: expressed protein; protein id: At3g29020.1, by cDNA: gi_9864076 [Arabidopsis thaliana]
  misc_feature (72)..(216): Homolog of NCBI NO: 6979341 NR Description: myb-like protein [Oryza sativa]
  misc_feature (34)..(201): Homolog of NCBI NO: 15238028 NR Description: MYB56 R2R3-MYB factor family member; protein id:
  misc_feature (89)..(201): Homolog of NCBI NO: 9759057 NR Description: Myb-like transcription factor-like protein
  misc_feature (98)..(209): Homolog of NCBI NO: 21321780 NR Description: putative Myb/Myb-related protein [Oryza sativa
MFITEKQVWMDEIVARRASSSWDFPFNDINIHQHHHRHCNTSHEFEILKSPLGDVAVHEEESNNNNPNFSNSESGKKETTDSGQSWSSSSSKPSVLGRGHWRPAEDVKLKELVSIYGPQNWNLIAEKLQGRSGKSCRLRWFNQLDPRINRRAFTEEEEERLMQAHRLYGNKWAMIARLFPGRTDNSVKNHWHVVMARKYREHSSAYRRRKLMSNNPLKPHLTNNHHPNPNPNYHSFISTNHYFAQPFPEFNLTHHLVNNAPITSDHNQLVLPFHCFQGYENNEPPMVVSMFGNQMMVGDNVGATSDALCNIPHIDPSNQEKPEPNDAMHWIGMDAVDEEVFEKAKQQPHFFDFLGLGTA

SEQ ID NO: 80476 - protein, 350 aa, Arabidopsis thaliana
  peptide (1)..(350): Ceres Seq. ID no. 12656094
  misc_feature (89)..(135): Pfam Name: Myb-like DNA-binding domain Pfam Description: Myb-like DNA-binding domain
  misc_feature (1)..(350): Homolog of NCBI NO: 25403271 NR Description: protein T24P13.16 [imported] - Arabidopsis >gi|9295726|gb|AAF87032.1|AC006535_10 T24P13.16 [Arabidopsis
  misc_feature (1)..(269): Homolog of NCBI NO: 18396049 NR Description: myb-related protein, putative; protein id: supported by cDNA: gi_13430157 [Arabidopsis thaliana]
  misc_feature (24)..(256): Homolog of NCBI NO: 15222362 NR Description: MYB-family transcription factor, putative; id: At1g69560.1, supported by cDNA: gi_7644365 [Arabidopsis
  misc_feature (69)..(242): Homolog of NCBI NO: 34903242 NR Description: unnamed protein product [Oryza sativa (japonica group)] >gi|6539552|dbj|BAA88169.1| unnamed protein product
  misc_feature (60)..(200): Homolog of NCBI NO: 7939552 NR Description: MYB transcription factor-like protein
  misc_feature (60)..(200): Homolog of NCBI NO: 18406019 NR Description: expressed protein; protein id: At3g29020.1, by cDNA: gi_9864076 [Arabidopsis thaliana]
  misc_feature (63)..(207): Homolog of NCBI NO: 6979341 NR Description: myb-like protein [Oryza sativa]
  misc_feature (25)..(192): Homolog of NCBI NO: 15238028 NR Description: MYB56 R2R3-MYB factor family member; protein id:
  misc_feature (80)..(192): Homolog of NCBI NO: 9759057 NR Description: Myb-like transcription factor-like protein
  misc_feature (89)..(200): Homolog of NCBI NO: 21321780 NR Description: putative Myb/Myb-related protein [Oryza sativa
MDEIVARRASSSWDFPFNDINIHQHHHRHCNTSHEFEILKSPLGDVAVHEEESNNNNPNFSNSESGKKETTDSGQSWSSSSSKPSVLGRGHWRPAEDVKLKELVSIYGPQNWNLIAEKLQGRSGKSCRLRWFNQLDPRINRRAFTEEEEERLMQAHRLYGNKWAMIARLFPGRTDNSVKNHWHVVMARKYREHSSAYRRRKLMSNNPLKPHLTNNHHPNPNPNYHSFISTNHYFAQPFPEFNLTHHLVNNAPITSDHNQLVLPFHCFQGYENNEPPMVVSMFGNQMMVGDNVGATSDALCNIPHIDPSNQEKPEPNDAMHWIGMDAVDEEVFEKAKQQPHFFDFLGLGTA

SEQ ID NO: 80477 - protein, 198 aa, Arabidopsis thaliana
  peptide (1)..(198): Ceres Seq. ID no. 12656095
  misc_feature (1)..(198): Homolog of NCBI NO: 25403271 NR Description: protein T24P13.16 [imported] - Arabidopsis >gi|9295726|gb|AAF87032.1|AC006535_10 T24P13.16 [Arabidopsis
  misc_feature (1)..(117): Homolog of NCBI NO: 18396049 NR Description: myb-related protein, putative; protein id: supported by cDNA: gi_13430157 [Arabidopsis thaliana]
  misc_feature (1)..(104): Homolog of NCBI NO: 15222362 NR Description: MYB-family transcription factor, putative; id: At1g69560.1, supported by cDNA: gi_7644365 [Arabidopsis
  misc_feature (1)..(90): Homolog of NCBI NO: 34903242 NR Description: unnamed protein product [Oryza sativa (japonica group)] >gi|6539552|dbj|BAA88169.1| unnamed protein product
  misc_feature (1)..(48): Homolog of NCBI NO: 7939552 NR Description: MYB transcription factor-like protein
  misc_feature (1)..(48): Homolog of NCBI NO: 18406019 NR Description: expressed protein; protein id: At3g29020.1, by cDNA: gi_9864076 [Arabidopsis thaliana]
  misc_feature (1)..(55): Homolog of NCBI NO: 6979341 NR Description: myb-like protein [Oryza sativa]
  misc_feature (1)..(40): Homolog of NCBI NO: 15238028 NR Description: MYB56 R2R3-MYB factor family member; protein id:
  misc_feature (1)..(40): Homolog of NCBI NO: 9759057 NR Description: Myb-like transcription factor-like protein
  misc_feature (1)..(48): Homolog of NCBI NO: 21321780 NR Description: putative Myb/Myb-related protein [Oryza sativa
MQAHRLYGNKWAMIARLFPGRTDNSVKNHWHVVMARKYREHSSAYRRRKLMSNNPLKPHLTNNHHPNPNPNYHSFISTNHYFAQPFPEFNLTHHLVNNAPITSDHNQLVLPFHCFQGYENNEPPMVVSMFGNQMMVGDNVGATSDALCNIPHIDPSNQEKPEPNDAMHWIGMDAVDEEVFEKAKQQPHFFDFLGLGTA

SEQ ID NO: 80478 - DNA, 1761 bp, Arabidopsis thaliana
  misc_feature (1)..(1761): Ceres Seq. ID no. 12656114
atgacagtagaagaggtaggagatgattatacaaaagatggaacagttgatcttcgaggaaatcgcgtccgaagatcccaaacaggccgttggaaagcttgttccttcgtcgttgtgtacgaggtgtttgaaagaatggcgtattatggaatatcaagcaacctagttatctacatgactaccaaattgcaccaaggcacggtcaagtcgtcgaacaatgtgaccaactgggttgggactagttggctcactccaatcttgggtgcttatgttgctgatgctcatttcggtcgctacatcactttcgtcatctcttccgctatctatttattgggaatggcattactgacactatcagtatcgctaccgggacttaaaccaccgaaatgttcgacggctaatgttgaaaactgtgaaaaagcttcggttatacagttagcggtattctttggagcgttatacacattagcaatcggtacaggcggtacaaaaccgaacatttctacaataggtgctgatcaattcgatgaatttgacccaaaggacaagattcataaacattcattcttcaattggtggatgtttagtatcttctttggtactttctttgctacaactgttcttgtctatgttcaagataatgttggttgggccataggttatgggctttcaactttgggacttgctttctccattttcatattcttgttgggaactcggttataccgacataaactcccaatgggaagcccattcaccaagatggctagagtcatcgtggcttcacttcgcaaagcccgcgagccgatgtcgagtgattcgacgcgcttctatgagcttccacctatggaatatgctagcaaaagggctttcccaatccattctacttcaagtctaagattcttaaatcgagcttcactcaaaaccggatcaacccataaatggaggctctgtactatcacagaagtggaagaaacaaaacagatgctaaaaatgttacctgtcctcttcgtaacattcgtcccaagcatgatgcttgctcaaataatgactctgttcatcaaacaaggaacgaccctcgaccgtcgtctcacaaacaacttcagcatcccacccgcaagtctcctaggcttcacaacattctcaatgctcgtctctatagtcatatacgaccgtgtctttgttaagttcatgagaaaactaaccggaaatccaagaggtatcacattgcttcagcgaatgggaatcggtatgatccttcacatcctaatcatgatcatcgcgtccataaccgaacggtataggctcaaggtcgctgctgaacacgggctaacccaccagaccgctgtaccaattcctttgagcattttcacattgcttccacagtatgtactaatgggtttggcagatgctttcatagaaatagcaaagctggagtttttctacgatcaagcaccagagagtatgaaaagcctcgggacatcatatacgagcacaagtatggcagtcgggtatttcatgagcagcattttgctttcgtcagtgtctcagataacaaagaagcagggaagaggatggattcaaaacaacttgaatgagtctaggctggataactattacatgttcttcgcggtacttaatttgcttaacttcatcctcttcttggttgtaattagattttatgagtacagagctgatgttacgcaatcagcaaacgtagaacagaaagaaccaaatatggtagataactacaatgagtaa

SEQ ID NO: 80479 - protein, 586 aa, Arabidopsis thaliana
  peptide (1)..(586): Ceres Seq. ID no. 12656115
  misc_feature (99)..(501): Pfam Name: POT family Pfam Description: POT family
  misc_feature (1)..(586): Homolog of NCBI NO: 15237369 NR Description: peptide transporter; protein id: At5g46040.1 thaliana] >gi|9757724|dbj|BAB08249.1| peptide transporter
  misc_feature (1)..(577): Homolog of NCBI NO: 17381202 NR Description: putative peptide transporter protein [Arabidopsis
  misc_feature (1)..(577): Homolog of NCBI NO: 15237370 NR Description: peptide transporter; protein id: At5g46050.1, by cDNA: gi_17381201 [Arabidopsis thaliana] peptide transporter [Arabidopsis thaliana]
  misc_feature (3)..(573): Homolog of NCBI NO: 37535270 NR Description: putative peptide transport protein [Oryza sativa
MTVEEVGDDYTKDGTVDLRGNRVRRSQTGRWKACSFVVVYEVFERMAYYGISSNLVIYMTTKLHQGTVKSSNNVTNWVGTSWLTPILGAYVADAHFGRYITFVISSAIYLLGMALLTLSVSLPGLKPPKCSTANVENCEKASVIQLAVFFGALYTLAIGTGGTKPNISTIGADQFDEFDPKDKIHKHSFFNWWMFSIFFGTFFATTVLVYVQDNVGWAIGYGLSTLGLAFSIFIFLLGTRLYRHKLPMGSPFTKMARVIVASLRKAREPMSSDSTRFYELPPMEYASKRAFPIHSTSSLRFLNRASLKTGSTHKWRLCTITEVEETKQMLKMLPVLFVTFVPSMMLAQIMTLFIKQGTTLDRRLTNNFSIPPASLLGFTTFSMLVSIVIYDRVFVKFMRKLTGNPRGITLLQRMGIGMILHILIMIIASITERYRLKVAAEHGLTHQTAVPIPLSIFTLLPQYVLMGLADAFIEIAKLEFFYDQAPESMKSLGTSYTSTSMAVGYFMSSILLSSVSQITKKQGRGWIQNNLNESRLDNYYMFFAVLNLLNFILFLVVIRFYEYRADVTQSANVEQKEPNMVDNYNE

SEQ ID NO: 80480 - protein, 541 aa, Arabidopsis thaliana
  peptide (1)..(541): Ceres Seq. ID no. 12656116
  misc_feature (54)..(456): Pfam Name: POT family Pfam Description: POT family
  misc_feature (1)..(541): Homolog of NCBI NO: 15237369 NR Description: peptide transporter; protein id: At5g46040.1 thaliana] >gi|9757724|dbj|BAB08249.1| peptide transporter
  misc_feature (1)..(532): Homolog of NCBI NO: 17381202 NR Description: putative peptide transporter protein [Arabidopsis
  misc_feature (1)..(532): Homolog of NCBI NO: 15237370 NR Description: peptide transporter; protein id: At5g46050.1, by cDNA: gi_17381201 [Arabidopsis thaliana] peptide transporter [Arabidopsis thaliana]
  misc_feature (1)..(528): Homolog of NCBI NO: 37535270 NR Description: putative peptide transport protein [Oryza sativa
MAYYGISSNLVIYMTTKLHQGTVKSSNNVTNWVGTSWLTPILGAYVADAHFGRYITFVISSAIYLLGMALLTLSVSLPGLKPPKCSTANVENCEKASVIQLAVFFGALYTLAIGTGGTKPNISTIGADQFDEFDPKDKIHKHSFFNWWMFSIFFGTFFATTVLVYVQDNVGWAIGYGLSTLGLAFSIFIFLLGTRLYRHKLPMGSPFTKMARVIVASLRKAREPMSSDSTRFYELPPMEYASKRAFPIHSTSSLRFLNRASLKTGSTHKWRLCTITEVEETKQMLKMLPVLFVTFVPSMMLAQIMTLFIKQGTTLDRRLTNNFSIPPASLLGFTTFSMLVSIVIYDRVFVKFMRKLTGNPRGITLLQRMGIGMILHILIMIIASITERYRLKVAAEHGLTHQTAVPIPLSIFTLLPQYVLMGLADAFIEIAKLEFFYDQAPESMKSLGTSYTSTSMAVGYFMSSILLSSVSQITKKQGRGWIQNNLNESRLDNYYMFFAVLNLLNFILFLVVIRFYEYRADVTQSANVEQKEPNMVDNYNE

SEQ ID NO: 80481 - protein, 528 aa, Arabidopsis thaliana
  peptide (1)..(528): Ceres Seq. ID no. 12656117
  misc_feature (41)..(443): Pfam Name: POT family Pfam Description: POT family
  misc_feature (1)..(528): Homolog of NCBI NO: 15237369 NR Description: peptide transporter; protein id: At5g46040.1 thaliana] >gi|9757724|dbj|BAB08249.1| peptide transporter
  misc_feature (1)..(519): Homolog of NCBI NO: 17381202 NR Description: putative peptide transporter protein [Arabidopsis
  misc_feature (1)..(519): Homolog of NCBI NO: 15237370 NR Description: peptide transporter; protein id: At5g46050.1, by cDNA: gi_17381201 [Arabidopsis thaliana] peptide transporter [Arabidopsis thaliana]
  misc_feature (1)..(515): Homolog of NCBI NO: 37535270 NR Description: putative peptide transport protein [Oryza sativa
MTTKLHQGTVKSSNNVTNWVGTSWLTPILGAYVADAHFGRYITFVISSAIYLLGMALLTLSVSLPGLKPPKCSTANVENCEKASVIQLAVFFGALYTLAIGTGGTKPNISTIGADQFDEFDPKDKIHKHSFFNWWMFSIFFGTFFATTVLVYVQDNVGWAIGYGLSTLGLAFSIFIFLLGTRLYRHKLPMGSPFTKMARVIVASLRKAREPMSSDSTRFYELPPMEYASKRAFPIHSTSSLRFLNRASLKTGSTHKWRLCTITEVEETKQMLKMLPVLFVTFVPSMMLAQIMTLFIKQGTTLDRRLTNNFSIPPASLLGFTTFSMLVSIVIYDRVFVKFMRKLTGNPRGITLLQRMGIGMILHILIMIIASITERYRLKVAAEHGLTHQTAVPIPLSIFTLLPQYVLMGLADAFIEIAKLEFFYDQAPESMKSLGTSYTSTSMAVGYFMSSILLSSVSQITKKQGRGWIQNNLNESRLDNYYMFFAVLNLLNFILFLVVIRFYEYRADVTQSANVEQKEPNMVDNYNE

SEQ ID NO: 80482 - DNA, 1851 bp, Arabidopsis thaliana
  misc_feature (1)..(1851): Ceres Seq. ID no. 12656118
  misc_feature: MA Experiment ID: 20000179 Result: Down-regulated in Transcription
  misc_feature: MA Experiment 20000179 PARAMETER Experiment Name: At_Germinating_Seeds_P Parameter: Age (hr) Value: 6 vs. 0
  misc_feature: MA Experiment 20000179 PARAMETER Experiment Name: At_Germinating_Seeds_P Parameter: Tissue Value: Germinating Seeds
  misc_feature: MA Experiment ID: 20000182 Result: Up-regulated in Transcription
  misc_feature: MA Experiment 20000182 PARAMETER Experiment Name: At_2mM_SA_P Parameter: Age (day) Value: 14
  misc_feature: MA Experiment 20000182 PARAMETER Experiment Name: At_2mM_SA_P Parameter: Organism Value: A. thaliana
  misc_feature: MA Experiment 20000182 PARAMETER Experiment Name: At_2mM_SA_P Parameter: Plant Line Value: WS
  misc_feature: MA Experiment 20000182 PARAMETER Experiment Name: At_2mM_SA_P Parameter: Timepoint (hr) Value: 6
  misc_feature: MA Experiment 20000182 PARAMETER Experiment Name: At_2mM_SA_P Parameter: Tissue Value: Aerial
  misc_feature: MA Experiment 20000182 PARAMETER Experiment Name: At_2mM_SA_P Parameter: Treatment Value: 2mM SA vs. No Treatment
  misc_feature: MA Experiment ID: 20000234 Result: Down-regulated in Transcription
  misc_feature: MA Experiment 20000234 PARAMETER Experiment Name: At_Siliques_P Parameter: Age (day) Value: 21
  misc_feature: MA Experiment 20000234 PARAMETER Experiment Name: At_Siliques_P Parameter: Organism Value: A. thaliana
  misc_feature: MA Experiment 20000234 PARAMETER Experiment Name: At_Siliques_P Parameter: Plant Line Value: WS
  misc_feature: MA Experiment 20000234 PARAMETER Experiment Name: At_Siliques_P Parameter: Tissue Value: Less Than 5mm Siliques vs. Whole Plant
  misc_feature: MA Experiment ID: 20000235 Result: Down-regulated in Transcription
  misc_feature: MA Experiment 20000235 PARAMETER Experiment Name: At_Siliques_P Parameter: Age (day) Value: 21
  misc_feature: MA Experiment 20000235 PARAMETER Experiment Name: At_Siliques_P Parameter: Organism Value: A. thaliana
  misc_feature: MA Experiment 20000235 PARAMETER Experiment Name: At_Siliques_P Parameter: Plant Line Value: WS
  misc_feature: MA Experiment 20000235 PARAMETER Experiment Name: At_Siliques_P Parameter: Tissue Value: 5-10mm Siliques vs. Whole Plant
  misc_feature: MA Experiment ID: 20000438 Result: Down-regulated in Transcription
  misc_feature: MA Experiment 20000438 PARAMETER Experiment Name: At_Shoots__P Parameter: Age (day) Value: 14
  misc_feature: MA Experiment 20000438 PARAMETER Experiment Name: At_Shoots__P Parameter: Tissue Value: Shoots vs. Whole Plant
  misc_feature: MA Experiment ID: 20000439 Result: Down-regulated in Transcription
  misc_feature: MA Experiment 20000439 PARAMETER Experiment Name: At_Roots__P Parameter: Age (day) Value: 14 vs. 21
  misc_feature: MA Experiment 20000439 PARAMETER Experiment Name: At_Roots__P Parameter: Organism Value: A. thaliana
  misc_feature: MA Experiment 20000439 PARAMETER Experiment Name: At_Roots__P Parameter: Tissue Value: Roots vs. Whole Plant
  misc_feature: MA Experiment ID: 20000573 Result: Up-regulated in Transcription
  misc_feature: MA Experiment 20000573 PARAMETER Experiment Name: At_100uM_ABA_Mutants__P Parameter: Organism Value: A. thaliana
  misc_feature: MA Experiment 20000573 PARAMETER Experiment Name: At_100uM_ABA_Mutants__P Parameter: Plant Line Value: CS22 vs. Ler wt
  misc_feature: MA Experiment 20000573 PARAMETER Experiment Name: At_100uM_ABA_Mutants__P Parameter: Timepoint (hr) Value: N/A
  misc_feature: MA Experiment 20000573 PARAMETER Experiment Name: At_100uM_ABA_Mutants__P Parameter: Tissue Value: Whole Plant
  misc_feature: MA Experiment 20000573 PARAMETER Experiment Name: At_100uM_ABA_Mutants__P Parameter: Treatment Value: None
  misc_feature: MA Experiment ID: 20000709 Result: Down-regulated in Transcription
  misc_feature: MA Experiment 20000709 PARAMETER Experiment Name: At_15mM_NH4NO3_L-to-H_P Parameter: Age (hr) Value: 14
  misc_feature: MA Experiment 20000709 PARAMETER Experiment Name: At_15mM_NH4NO3_L-to-H_P Parameter: Organism Value: A. thaliana
  misc_feature: MA Experiment 20000709 PARAMETER Experiment Name: At_15mM_NH4NO3_L-to-H_P Parameter: Plant Line Value: WS
  misc_feature: MA Experiment 20000709 PARAMETER Experiment Name: At_15mM_NH4NO3_L-to-H_P Parameter: Timepoint (hr) Value: 4
  misc_feature: MA Experiment 20000709 PARAMETER Experiment Name: At_15mM_NH4NO3_L-to-H_P Parameter: Tissue Value: Aerial
  misc_feature: MA Experiment 20000709 PARAMETER Experiment Name: At_15mM_NH4NO3_L-to-H_P Parameter: Treatment Value: 15mM NH4NO3 vs. 30mM Mannitol
  misc_feature: MA Experiment ID: 20001248 Result: Up-regulated in Transcription
  misc_feature: MA Experiment 20001248 PARAMETER Experiment Name: At_Far-red-induction_P Parameter: Age (day) Value: 7
  misc_feature: MA Experiment 20001248 PARAMETER Experiment Name: At_Far-red-induction_P Parameter: Light Value: Far-red vs. White
  misc_feature: MA Experiment 20001248 PARAMETER Experiment Name: At_Far-red-induction_P Parameter: Organism Value: A. thaliana
  misc_feature: MA Experiment 20001248 PARAMETER Experiment Name: At_Far-red-induction_P Parameter: Plant Line Value: Columbia
  misc_feature: MA Experiment 20001248 PARAMETER Experiment Name: At_Far-red-induction_P Parameter: Timepoint (hr) Value: 4
  misc_feature: MA Experiment 20001248 PARAMETER Experiment Name: At_Far-red-induction_P Parameter: Tissue Value: Whole Plant
  misc_feature: MA Experiment ID: 20001555 Result: Down-regulated in Transcription
  misc_feature: MA Experiment 20001555 PARAMETER Experiment Name: At_Drought_Soil_Dry_P Parameter: Age (day) Value: 24
  misc_feature: MA Experiment 20001555 PARAMETER Experiment Name: At_Drought_Soil_Dry_P Parameter: Organism Value: A. thaliana
  misc_feature: MA Experiment 20001555 PARAMETER Experiment Name: At_Drought_Soil_Dry_P Parameter: Plant Line Value: WS
  misc_feature: MA Experiment 20001555 PARAMETER Experiment Name: At_Drought_Soil_Dry_P Parameter: Post Timepoint (hr) Value: None
  misc_feature: MA Experiment 20001555 PARAMETER Experiment Name: At_Drought_Soil_Dry_P Parameter: Post-Treatment Value: None
  misc_feature: MA Experiment 20001555 PARAMETER Experiment Name: At_Drought_Soil_Dry_P Parameter: Timepoint (day) Value: 10
  misc_feature: MA Experiment 20001555 PARAMETER Experiment Name: At_Drought_Soil_Dry_P Parameter: Treatment Value: Drought vs. No Drought
  misc_feature: MA Experiment ID: 20001556 Result: Down-regulated in Transcription
  misc_feature: MA Experiment 20001556 PARAMETER Experiment Name: At_Drought_Soil_Dry_P Parameter: Age (day) Value: 26
  misc_feature: MA Experiment 20001556 PARAMETER Experiment Name: At_Drought_Soil_Dry_P Parameter: Organism Value: A. thaliana
  misc_feature: MA Experiment 20001556 PARAMETER Experiment Name: At_Drought_Soil_Dry_P Parameter: Plant Line Value: WS
  misc_feature: MA Experiment 20001556 PARAMETER Experiment Name: At_Drought_Soil_Dry_P Parameter: Post Timepoint (hr) Value: None
  misc_feature: MA Experiment 20001556 PARAMETER Experiment Name: At_Drought_Soil_Dry_P Parameter: Post-Treatment Value: None
  misc_feature: MA Experiment 20001556 PARAMETER Experiment Name: At_Drought_Soil_Dry_P Parameter: Timepoint (day) Value: 12
  misc_feature: MA Experiment 20001556 PARAMETER Experiment Name: At_Drought_Soil_Dry_P Parameter: Treatment Value: Drought vs. No Drought
  misc_feature: MA Experiment ID: 20001559 Result: Down-regulated in Transcription
  misc_feature: MA Experiment 20001559 PARAMETER Experiment Name: At_Drought_Soil_Dry_P Parameter: Age (day) Value: 28
  misc_feature: MA Experiment 20001559 PARAMETER Experiment Name: At_Drought_Soil_Dry_P Parameter: Organism Value: A. thaliana
  misc_feature: MA Experiment 20001559 PARAMETER Experiment Name: At_Drought_Soil_Dry_P Parameter: Plant Line Value: WS
  misc_feature: MA Experiment 20001559 PARAMETER Experiment Name: At_Drought_Soil_Dry_P Parameter: Post Timepoint (hr) Value: 29
  misc_feature: MA Experiment 20001559 PARAMETER Experiment Name: At_Drought_Soil_Dry_P Parameter: Post-Treatment Value: Re-Water vs. No Drought
  misc_feature: MA Experiment 20001559 PARAMETER Experiment Name: At_Drought_Soil_Dry_P Parameter: Timepoint (day) Value: 14
  misc_feature: MA Experiment 20001559 PARAMETER Experiment Name: At_Drought_Soil_Dry_P Parameter: Treatment Value: Drought vs. No Drought
  misc_feature: MA Experiment ID: 20001560 Result: Down-regulated in Transcription
  misc_feature: MA Experiment 20001560 PARAMETER Experiment Name: At_Drought_Soil_Dry_P Parameter: Age (day) Value: 28
  misc_feature: MA Experiment 20001560 PARAMETER Experiment Name: At_Drought_Soil_Dry_P Parameter: Organism Value: A. thaliana
  misc_feature: MA Experiment 20001560 PARAMETER Experiment Name: At_Drought_Soil_Dry_P Parameter: Plant Line Value: WS
  misc_feature: MA Experiment 20001560 PARAMETER Experiment Name: At_Drought_Soil_Dry_P Parameter: Post Timepoint (hr) Value: None
  misc_feature: MA Experiment 20001560 PARAMETER Experiment Name: At_Drought_Soil_Dry_P Parameter: Post-Treatment Value: None
  misc_feature: MA Experiment 20001560 PARAMETER Experiment Name: At_Drought_Soil_Dry_P Parameter: Timepoint (day) Value: 14
  misc_feature: MA Experiment 20001560 PARAMETER Experiment Name: At_Drought_Soil_Dry_P Parameter: Treatment Value: Drought vs. No Drought
  misc_feature: MA Experiment ID: 20001904 Result: Down-regulated in Transcription
  misc_feature: MA Experiment 20001904 PARAMETER Experiment Name: At_Drought_Reproduction_P Parameter: Age (day) Value: 37
  misc_feature: MA Experiment 20001904 PARAMETER Experiment Name: At_Drought_Reproduction_P Parameter: Organism Value: A. thaliana
  misc_feature: MA Experiment 20001904 PARAMETER Experiment Name: At_Drought_Reproduction_P Parameter: Plant Line Value: WS
  misc_feature: MA Experiment 20001904 PARAMETER Experiment Name: At_Drought_Reproduction_P Parameter: Timepoint (day) Value: 7
  misc_feature: MA Experiment 20001904 PARAMETER Experiment Name: At_Drought_Reproduction_P Parameter: Tissue Value: Rosettes
  misc_feature: MA Experiment 20001904 PARAMETER Experiment Name: At_Drought_Reproduction_P Parameter: Treatment Value: Drought vs. No Drought
  misc_feature: MA Experiment ID: 20001905 Result: Down-regulated in Transcription
  misc_feature: MA Experiment 20001905 PARAMETER Experiment Name: At_Drought_Reproduction_P Parameter: Age (day) Value: 40
  misc_feature: MA Experiment 20001905 PARAMETER Experiment Name: At_Drought_Reproduction_P Parameter: Organism Value: A. thaliana
  misc_feature: MA Experiment 20001905 PARAMETER Experiment Name: At_Drought_Reproduction_P Parameter: Plant Line Value: WS
  misc_feature: MA Experiment 20001905 PARAMETER Experiment Name: At_Drought_Reproduction_P Parameter: Timepoint (day) Value: 10
  misc_feature: MA Experiment 20001905 PARAMETER Experiment Name: At_Drought_Reproduction_P Parameter: Tissue Value: Rosettes
  misc_feature: MA Experiment 20001905 PARAMETER Experiment Name: At_Drought_Reproduction_P Parameter: Treatment Value: Drought vs. No Drought
gacattaaaaaaaaaacagaaactaccaaacaaattagagagagaaaagaaagaaagaaagaaggtagagaggaaatgacagtagaagaggtaggagacgattacacaaaagatggaacagttgatcttcaaggcaatcctgttcgaagatccattagaggtcgttggaaagcttgctctttcgttgttgtgtacgaggtgtttgaacggatggcttattacgggatatcaagcaacctgtttatttacatgacaaccaaattgcaccaaggaacggtcaagtcgtcgaacaatgtgaccaattgggttgggactagttggctcactccaatcttgggtgcttacgttggagacgctcttctcggtcgctacatcactttcgtcatctcttgtgctatctatttctcggggatgatggtgttaacattatcagtaactataccgggaattaagccaccagaatgttccacgactaatgtggaaaattgcgaaaaagcttcggttttacaattagcagttttctttggagcgttatacacattagcaatcggtacaggcggtacgaaaccgaacatatcaacaataggagctgatcaattcgatgtattcgacccaaaggagaagactcaaaaactatcattcttcaactggtggatgtttagtatcttctttggtactctcttcgccaacactgttcttgtctatgttcaagataatgttggctggaccttgggttatggacttccaacattaggtttggctatttccattaccattttcttgttgggcactccgttttaccgccataaacttcccactggaagcccattcaccaagatggctcgagtcatcgtggcttcatttcgcaaagccaatgcaccaatgacgcatgacatcacgagcttccatgagctgccttctcttgaatatgagcggaaaggcgcctttccgatccaccctactccaagtttacgattcttagacagagcttcactcaaaacaggaacaaatcataaatggaatctttgtactaccacagaagttgaagaaacaaaacaaatgctgagaatgttaccagtcttgttcataactttcgtcccaagtatgatgcttgcacaaatcaacacattgtttgtgaaacaaggaaccactctagaccgaaaggttaccggatctttcagcatcccaccagcgagtctctccggatttgtcacactctcaatgcttatttccatagtcttgtatgaccgagttttcgtcaagataacccgaaaattcactggtaatccaagaggcattactttgcttcaacgaatgggaattggtcttatctttcatatcctcatcatgatcgtcgcatctgtcactgaaaggtatagactcaaagtcgctgctgatcatggtctcatccaccaaaccggagtaaaactaccattaaccatctttgctttgcttccacaattcgtcctaatgggtatggctgattcgttcttagaagttgcaaagcttgagtttttctacgatcaagctcccgagagcatgaaaagcctcgggacatcatattcgacaacgagtttggcgattgggaatttcatgagcagtttcttgttatctacggtatctgagataacaaagaaacgaggaagaggatggattttgaacaaccttaatgagtctaggttggattactattacctgttctttgcggtacttaatctggttaacttcgttttgttcttggtcgtggttaagttttatgtttatagagctgaggttactgattcggttgatgtgaaagaggtggaaatgaaagagactgaataacaaataatgaataatatagatttctct

SEQ ID NO: 80483 - protein, 607 aa, Arabidopsis thaliana
  peptide (1)..(607): Ceres Seq. ID no. 12656119
  misc_feature (124)..(526): Pfam Name: POT family Pfam Description: POT family
  misc_feature (26)..(607): Homolog of NCBI NO: 15237370 NR Description: peptide transporter; protein id: At5g46050.1, by cDNA: gi_17381201 [Arabidopsis thaliana] peptide transporter [Arabidopsis thaliana]
  misc_feature (26)..(607): Homolog of NCBI NO: 17381202 NR Description: putative peptide transporter protein [Arabidopsis
  misc_feature (26)..(602): Homolog of NCBI NO: 15237369 NR Description: peptide transporter; protein id: At5g46040.1 thaliana] >gi|9757724|dbj|BAB08249.1| peptide transporter
  misc_feature (28)..(598): Homolog of NCBI NO: 37535270 NR Description: putative peptide transport protein [Oryza sativa
DIKKKTETTKQIRERKERKKEGREEMTVEEVGDDYTKDGTVDLQGNPVRRSIRGRWKACSFVVVYEVFERMAYYGISSNLFIYMTTKLHQGTVKSSNNVTNWVGTSWLTPILGAYVGDALLGRYITFVISCAIYFSGMMVLTLSVTIPGIKPPECSTTNVENCEKASVLQLAVFFGALYTLAIGTGGTKPNISTIGADQFDVFDPKEKTQKLSFFNWWMFSIFFGTLFANTVLVYVQDNVGWTLGYGLPTLGLAISITIFLLGTPFYRHKLPTGSPFTKMARVIVASFRKANAPMTHDITSFHELPSLEYERKGAFPIHPTPSLRFLDRASLKTGTNHKWNLCTTTEVEETKQMLRMLPVLFITFVPSMMLAQINTLFVKQGTTLDRKVTGSFSIPPASLSGFVTLSMLISIVLYDRVFVKITRKFTGNPRGITLLQRMGIGLIFHILIMIVASVTERYRLKVAADHGLIHQTGVKLPLTIFALLPQFVLMGMADSFLEVAKLEFFYDQAPESMKSLGTSYSTTSLAIGNFMSSFLLSTVSEITKKRGRGWILNNLNESRLDYYYLFFAVLNLVNFVLFLVVVKFYVYRAEVTDSVDVKEVEMKETE

SEQ ID NO: 80484 - protein, 582 aa, Arabidopsis thaliana
  peptide (1)..(582): Ceres Seq. ID no. 12656120
  misc_feature (99)..(501): Pfam Name: POT family Pfam Description: POT family
  misc_feature (1)..(582): Homolog of NCBI NO: 15237370 NR Description: peptide transporter; protein id: At5g46050.1, by cDNA: gi_17381201 [Arabidopsis thaliana] peptide transporter [Arabidopsis thaliana]
  misc_feature (1)..(582): Homolog of NCBI NO: 17381202 NR Description: putative peptide transporter protein [Arabidopsis
  misc_feature (1)..(577): Homolog of NCBI NO: 15237369 NR Description: peptide transporter; protein id: At5g46040.1 thaliana] >gi|9757724|dbj|BAB08249.1| peptide transporter
  misc_feature (3)..(573): Homolog of NCBI NO: 37535270 NR Description: putative peptide transport protein [Oryza sativa
MTVEEVGDDYTKDGTVDLQGNPVRRSIRGRWKACSFVVVYEVFERMAYYGISSNLFIYMTTKLHQGTVKSSNNVTNWVGTSWLTPILGAYVGDALLGRYITFVISCAIYFSGMMVLTLSVTIPGIKPPECSTTNVENCEKASVLQLAVFFGALYTLAIGTGGTKPNISTIGADQFDVFDPKEKTQKLSFFNWWMFSIFFGTLFANTVLVYVQDNVGWTLGYGLPTLGLAISITIFLLGTPFYRHKLPTGSPFTKMARVIVASFRKANAPMTHDITSFHELPSLEYERKGAFPIHPTPSLRFLDRASLKTGTNHKWNLCTTTEVEETKQMLRMLPVLFITFVPSMMLAQINTLFVKQGTTLDRKVTGSFSIPPASLSGFVTLSMLISIVLYDRVFVKITRKFTGNPRGITLLQRMGIGLIFHILIMIVASVTERYRLKVAADHGLIHQTGVKLPLTIFALLPQFVLMGMADSFLEVAKLEFFYDQAPESMKSLGTSYSTTSLAIGNFMSSFLLSTVSEITKKRGRGWILNNLNESRLDYYYLFFAVLNLVNFVLFLVVVKFYVYRAEVTDSVDVKEVEMKETE

SEQ ID NO: 80485 - protein, 537 aa, Arabidopsis thaliana
  peptide (1)..(537): Ceres Seq. ID no. 12656121
  misc_feature (54)..(456): Pfam Name: POT family Pfam Description: POT family
  misc_feature (1)..(537): Homolog of NCBI NO: 15237370 NR Description: peptide transporter; protein id: At5g46050.1, by cDNA: gi_17381201 [Arabidopsis thaliana] peptide transporter [Arabidopsis thaliana]
  misc_feature (1)..(537): Homolog of NCBI NO: 17381202 NR Description: putative peptide transporter protein [Arabidopsis
  misc_feature (1)..(532): Homolog of NCBI NO: 15237369 NR Description: peptide transporter; protein id: At5g46040.1 thaliana] >gi|9757724|dbj|BAB08249.1| peptide transporter
  misc_feature (1)..(528): Homolog of NCBI NO: 37535270 NR Description: putative peptide transport protein [Oryza sativa
MAYYGISSNLFIYMTTKLHQGTVKSSNNVTNWVGTSWLTPILGAYVGDALLGRYITFVISCAIYFSGMMVLTLSVTIPGIKPPECSTTNVENCEKASVLQLAVFFGALYTLAIGTGGTKPNISTIGADQFDVFDPKEKTQKLSFFNWWMFSIFFGTLFANTVLVYVQDNVGWTLGYGLPTLGLAISITIFLLGTPFYRHKLPTGSPFTKMARVIVASFRKANAPMTHDITSFHELPSLEYERKGAFPIHPTPSLRFLDRASLKTGTNHKWNLCTTTEVEETKQMLRMLPVLFITFVPSMMLAQINTLFVKQGTTLDRKVTGSFSIPPASLSGFVTLSMLISIVLYDRVFVKITRKFTGNPRGITLLQRMGIGLIFHILIMIVASVTERYRLKVAADHGLIHQTGVKLPLTIFALLPQFVLMGMADSFLEVAKLEFFYDQAPESMKSLGTSYSTTSLAIGNFMSSFLLSTVSEITKKRGRGWILNNLNESRLDYYYLFFAVLNLVNFVLFLVVVKFYVYRAEVTDSVDVKEVEMKETE

SEQ ID NO: 80486 - DNA, 1419 bp, Arabidopsis thaliana
  misc_feature (1)..(1419): Ceres Seq. ID no. 12656132
  misc_feature: MA Experiment ID: 20000355 Result: Down-regulated in Transcription
  misc_feature: MA Experiment 20000355 PARAMETER Experiment Name: At_Siliques_Sub_P Parameter: Age (day) Value: 21
  misc_feature: MA Experiment 20000355 PARAMETER Experiment Name: At_Siliques_Sub_P Parameter: Organism Value: A. thaliana
  misc_feature: MA Experiment 20000355 PARAMETER Experiment Name: At_Siliques_Sub_P Parameter: Plant Line Value: WS
  misc_feature: MA Experiment 20000355 PARAMETER Experiment Name: At_Siliques_Sub_P Parameter: Tissue Value: Less Than 5mm Siliques vs. Whole Plant
atgggtagcaaagtgatgatgttcaagtggtcaaagaacatcacgccttcacaggttatcaaactgatgcgagctgaaaaagatgtggagaagtctatggcagtttttgattccgcaacggcggaatacgcaaatgggtacgtacatgatcagagttcttttggttatatggtcttgaggttggtctctgctaataagttcaaagcagctgaagatctgattgttagaatgaagattgagaattgtgttgttagtgaagatatattgctttcgatatgtcgagggtatggtcgggttcataggccgtttgattctttaagggtttttcacaaaatgaaggattttgattgtgatcctagccagaaggcttatgtcactgttcttgccattctcgtggaagagaatcagttaaatttggcatttaagttttacaagaatatgagagagattggtttgcctcctactgtggcatctctcaatgttttgattaaagctctttgcagaaatgacggaactgtggatgctggtcttaagatttttcttgaaatgcctaagagagggtgtgatccggattcttacacatatggaaccttgattagtggtttgtgtaggttcggaaggatagatgaggcgaagaagttgtttacagagatggttgagaaagactgtgcaccaactgttgttacctatacttctctgattaacggtttgtgtggatcgaaaaatgttgatgaagctatgagatatctagaagagatgaaaagtaaaggcattgagccgaatgttttcacgtacagttctttgatggacggtctttgcaaagatgggcgttctttgcaagccatggaactatttgagatgatgatggctagaggctgcaggccaaacatggtaacgtataccactttgatcactggtctctgtaaggagcagaagattcaagaagccgttgaacttcttgatagaatgaatcttcagggtttgaaacctgatgctggattatatgggaaagtaatcagtgggttctgtgctattagtaagtttcgtgaagctgccaatttccttgacgagatgattcttggaggaattactccaaatcgtttaacctggaacatccatgttaagacaagtaatgaagtagtccgaggtctttgtgcaaactatccaagtcgtgcatttactctatatcttagcatgaggagtagaggaatctcggttgaggttgaaacactagaatctttggtgaagtgtttgtgcaaaaagggtgaattccagaaagctgttcaattagtcgatgaaatagtgactgatgggtgtattccaagtaaaggaacatggaagctacttataggtcacacattggataaaacgattgtaggagaggcttcagatactcttctcagagatttggatatctaa

SEQ ID NO: 80487 - protein, 472 aa, Arabidopsis thaliana
  peptide (1)..(472): Ceres Seq. ID no. 12656133
  misc_feature (87)..(121): Pfam Name: PPR repeat Pfam Description: PPR repeat
  misc_feature (1)..(472): Homolog of NCBI NO: 15237375 NR Description: salt-inducible protein-like; protein id:
  misc_feature (9)..(472): Homolog of NCBI NO: 34911020 NR Description: OJ1125_C04.15 [Oryza sativa (japonica
  misc_feature (6)..(450): Homolog of NCBI NO: 15235288 NR Description: membrane-associated salt-inducible-like protein; id: At4g20090.1 [Arabidopsis thaliana] >gi|7485730|pir||T04893
  misc_feature (19)..(450): Homolog of NCBI NO: 15229026 NR Description: putative protein; protein id: At3g48810.1
  misc_feature (46)..(472): Homolog of NCBI NO: 15231863 NR Description: putative protein; protein id: At3g53700.1, by cDNA: gi_15982930 [Arabidopsis thaliana]
  misc_feature (14)..(468): Homolog of NCBI NO: 15221300 NR Description: hypothetical protein; protein id: At1g74580.1
  misc_feature (45)..(470): Homolog of NCBI NO: 15218325 NR Description: hypothetical protein; protein id: At1g09900.1
  misc_feature (50)..(470): Homolog of NCBI NO: 34896658 NR Description: putative membrane-associated salt-inducible
  misc_feature (10)..(466): Homolog of NCBI NO: 15237345 NR Description: salt-inducible protein-like; protein id:
  misc_feature (29)..(468): Homolog of NCBI NO: 15242446 NR Description: putative protein; protein id: At5g39710.1
MGSKVMMFKWSKNITPSQVIKLMRAEKDVEKSMAVFDSATAEYANGYVHDQSSFGYMVLRLVSANKFKAAEDLIVRMKIENCVVSEDILLSICRGYGRVHRPFDSLRVFHKMKDFDCDPSQKAYVTVLAILVEENQLNLAFKFYKNMREIGLPPTVASLNVLIKALCRNDGTVDAGLKIFLEMPKRGCDPDSYTYGTLISGLCRFGRIDEAKKLFTEMVEKDCAPTVVTYTSLINGLCGSKNVDEAMRYLEEMKSKGIEPNVFTYSSLMDGLCKDGRSLQAMELFEMMMARGCRPNMVTYTTLITGLCKEQKIQEAVELLDRMNLQGLKPDAGLYGKVISGFCAISKFREAANFLDEMILGGITPNRLTWNIHVKTSNEVVRGLCANYPSRAFTLYLSMRSRGISVEVETLESLVKCLCKKGEFQKAVQLVDEIVTDGCIPSKGTWKLLIGHTLDKTIVGEASDTLLRDLDI

SEQ ID NO: 80488 - protein, 467 aa, Arabidopsis thaliana
  peptide (1)..(467): Ceres Seq. ID no. 12656134
  misc_feature (82)..(116): Pfam Name: PPR repeat Pfam Description: PPR repeat
  misc_feature (1)..(467): Homolog of NCBI NO: 15237375 NR Description: salt-inducible protein-like; protein id:
  misc_feature (4)..(467): Homolog of NCBI NO: 34911020 NR Description: OJ1125_C04.15 [Oryza sativa (japonica
  misc_feature (1)..(445): Homolog of NCBI NO: 15235288 NR Description: membrane-associated salt-inducible-like protein; id: At4g20090.1 [Arabidopsis thaliana] >gi|7485730|pir||T04893
  misc_feature (14)..(445): Homolog of NCBI NO: 15229026 NR Description: putative protein; protein id: At3g48810.1
  misc_feature (41)..(467): Homolog of NCBI NO: 15231863 NR Description: putative protein; protein id: At3g53700.1, by cDNA: gi_15982930 [Arabidopsis thaliana]
  misc_feature (9)..(463): Homolog of NCBI NO: 15221300 NR Description: hypothetical protein; protein id: At1g74580.1
  misc_feature (40)..(465): Homolog of NCBI NO: 15218325 NR Description: hypothetical protein; protein id: At1g09900.1
  misc_feature (45)..(465): Homolog of NCBI NO: 34896658 NR Description: putative membrane-associated salt-inducible
  misc_feature (5)..(461): Homolog of NCBI NO: 15237345 NR Description: salt-inducible protein-like; protein id:
  misc_feature (24)..(463): Homolog of NCBI NO: 15242446 NR Description: putative protein; protein id: At5g39710.1
MMFKWSKNITPSQVIKLMRAEKDVEKSMAVFDSATAEYANGYVHDQSSFGYMVLRLVSANKFKAAEDLIVRMKIENCVVSEDILLSICRGYGRVHRPFDSLRVFHKMKDFDCDPSQKAYVTVLAILVEENQLNLAFKFYKNMREIGLPPTVASLNVLIKALCRNDGTVDAGLKIFLEMPKRGCDPDSYTYGTLISGLCRFGRIDEAKKLFTEMVEKDCAPTVVTYTSLINGLCGSKNVDEAMRYLEEMKSKGIEPNVFTYSSLMDGLCKDGRSLQAMELFEMMMARGCRPNMVTYTTLITGLCKEQKIQEAVELLDRMNLQGLKPDAGLYGKVISGFCAISKFREAANFLDEMILGGITPNRLTWNIHVKTSNEVVRGLCANYPSRAFTLYLSMRSRGISVEVETLESLVKCLCKKGEFQKAVQLVDEIVTDGCIPSKGTWKLLIGHTLDKTIVGEASDTLLRDLDI

SEQ ID NO: 80489 - protein, 466 aa, Arabidopsis thaliana
  peptide (1)..(466): Ceres Seq. ID no. 12656135
  misc_feature (81)..(115): Pfam Name: PPR repeat Pfam Description: PPR repeat
  misc_feature (1)..(466): Homolog of NCBI NO: 15237375 NR Description: salt-inducible protein-like; protein id:
  misc_feature (3)..(466): Homolog of NCBI NO: 34911020 NR Description: OJ1125_C04.15 [Oryza sativa (japonica
  misc_feature (1)..(444): Homolog of NCBI NO: 15235288 NR Description: membrane-associated salt-inducible-like protein; id: At4g20090.1 [Arabidopsis thaliana] >gi|7485730|pir||T04893
  misc_feature (13)..(444): Homolog of NCBI NO: 15229026 NR Description: putative protein; protein id: At3g48810.1
  misc_feature (40)..(466): Homolog of NCBI NO: 15231863 NR Description: putative protein; protein id: At3g53700.1, by cDNA: gi_15982930 [Arabidopsis thaliana]
  misc_feature (8)..(462): Homolog of NCBI NO: 15221300 NR Description: hypothetical protein; protein id: At1g74580.1
  misc_feature (39)..(464): Homolog of NCBI NO: 15218325 NR Description: hypothetical protein; protein id: At1g09900.1
  misc_feature (44)..(464): Homolog of NCBI NO: 34896658 NR Description: putative membrane-associated salt-inducible
  misc_feature (4)..(460): Homolog of NCBI NO: 15237345 NR Description: salt-inducible protein-like; protein id:
  misc_feature (23)..(462): Homolog of NCBI NO: 15242446 NR Description: putative protein; protein id: At5g39710.1
MFKWSKNITPSQVIKLMRAEKDVEKSMAVFDSATAEYANGYVHDQSSFGYMVLRLVSANKFKAAEDLIVRMKIENCVVSEDILLSICRGYGRVHRPFDSLRVFHKMKDFDCDPSQKAYVTVLAILVEENQLNLAFKFYKNMREIGLPPTVASLNVLIKALCRNDGTVDAGLKIFLEMPKRGCDPDSYTYGTLISGLCRFGRIDEAKKLFTEMVEKDCAPTVVTYTSLINGLCGSKNVDEAMRYLEEMKSKGIEPNVFTYSSLMDGLCKDGRSLQAMELFEMMMARGCRPNMVTYTTLITGLCKEQKIQEAVELLDRMNLQGLKPDAGLYGKVISGFCAISKFREAANFLDEMILGGITPNRLTWNIHVKTSNEVVRGLCANYPSRAFTLYLSMRSRGISVEVETLESLVKCLCKKGEFQKAVQLVDEIVTDGCIPSKGTWKLLIGHTLDKTIVGEASDTLLRDLDI

SEQ ID NO: 80490 - DNA, 1558 bp, Arabidopsis thaliana
  misc_feature (1)..(1558): Ceres Seq. ID no. 12656148
  misc_feature: MA Experiment ID: 20000173 Result: Up-regulated in Transcription
  misc_feature: MA Experiment 20000173 PARAMETER Experiment Name: At_42deg_Heat_P Parameter: Age (day) Value: 14
  misc_feature: MA Experiment 20000173 PARAMETER Experiment Name: At_42deg_Heat_P Parameter: Organism Value: A. thaliana
  misc_feature: MA Experiment 20000173 PARAMETER Experiment Name: At_42deg_Heat_P Parameter: Plant Line Value: WS
  misc_feature: MA Experiment 20000173 PARAMETER Experiment Name: At_42deg_Heat_P Parameter: Temperature (deg C) Value: 42 vs. 22
  misc_feature: MA Experiment 20000173 PARAMETER Experiment Name: At_42deg_Heat_P Parameter: Timepoint (hr) Value: 6
  misc_feature: MA Experiment 20000173 PARAMETER Experiment Name: At_42deg_Heat_P Parameter: Tissue Value: Aerial
  misc_feature: MA Experiment ID: 20000182 Result: Up-regulated in Transcription
  misc_feature: MA Experiment 20000182 PARAMETER Experiment Name: At_2mM_SA_P Parameter: Age (day) Value: 14
  misc_feature: MA Experiment 20000182 PARAMETER Experiment Name: At_2mM_SA_P Parameter: Organism Value: A. thaliana
  misc_feature: MA Experiment 20000182 PARAMETER Experiment Name: At_2mM_SA_P Parameter: Plant Line Value: WS
  misc_feature: MA Experiment 20000182 PARAMETER Experiment Name: At_2mM_SA_P Parameter: Timepoint (hr) Value: 6
  misc_feature: MA Experiment 20000182 PARAMETER Experiment Name: At_2mM_SA_P Parameter: Tissue Value: Aerial
  misc_feature: MA Experiment 20000182 PARAMETER Experiment Name: At_2mM_SA_P Parameter: Treatment Value: 2mM SA vs. No Treatment
  misc_feature: MA Experiment ID: 20000184 Result: Down-regulated in Transcription
  misc_feature: MA Experiment 20000184 PARAMETER Experiment Name: At_Shoots__P Parameter: Age (day) Value: 7
  misc_feature: MA Experiment 20000184 PARAMETER Experiment Name: At_Shoots__P Parameter: Tissue Value: Shoots vs. Whole Plant
  misc_feature: MA Experiment ID: 20000234 Result: Down-regulated in Transcription
  misc_feature: MA Experiment 20000234 PARAMETER Experiment Name: At_Siliques_P Parameter: Age (day) Value: 21
  misc_feature: MA Experiment 20000234 PARAMETER Experiment Name: At_Siliques_P Parameter: Organism Value: A. thaliana
  misc_feature: MA Experiment 20000234 PARAMETER Experiment Name: At_Siliques_P Parameter: Plant Line Value: WS
  misc_feature: MA Experiment 20000234 PARAMETER Experiment Name: At_Siliques_P Parameter: Tissue Value: Less Than 5mm Siliques vs. Whole Plant
  misc_feature: MA Experiment ID: 20000264 Result: Down-regulated in Transcription
  misc_feature: MA Experiment 20000264 PARAMETER Experiment Name: At_Open_Flower_P Parameter: Age (day) Value: 21
  misc_feature: MA Experiment 20000264 PARAMETER Experiment Name: At_Open_Flower_P Parameter: Plant Line Value: WS
  misc_feature: MA Experiment 20000264 PARAMETER Experiment Name: At_Open_Flower_P Parameter: Tissue Value: Open Flower vs. Whole Plant
  misc_feature: MA Experiment ID: 20000265 Result: Down-regulated in Transcription
  misc_feature: MA Experiment 20000265 PARAMETER Experiment Name: At_Open_Flower_P Parameter: Age (day) Value: 21
  misc_feature: MA Experiment 20000265 PARAMETER Experiment Name: At_Open_Flower_P Parameter: Plant Line Value: WS
  misc_feature: MA Experiment 20000265 PARAMETER Experiment Name: At_Open_Flower_P Parameter: Tissue Value: Closed Flower vs. Whole Plant
  misc_feature: MA Experiment ID: 20000286 Result: Down-regulated in Transcription
  misc_feature: MA Experiment 20000286 PARAMETER Experiment Name: At_Open_Flower_P Parameter: Age (day) Value: 21
  misc_feature: MA Experiment 20000286 PARAMETER Experiment Name: At_Open_Flower_P Parameter: Plant Line Value: WS
  misc_feature: MA Experiment 20000286 PARAMETER Experiment Name: At_Open_Flower_P Parameter: Tissue Value: Half Open vs. Whole Plant
  misc_feature: MA Experiment ID: 20001558 Result: Down-regulated in Transcription
  misc_feature: MA Experiment 20001558 PARAMETER Experiment Name: At_Drought_Soil_Dry_P Parameter: Age (day) Value: 27
  misc_feature: MA Experiment 20001558 PARAMETER Experiment Name: At_Drought_Soil_Dry_P Parameter: Organism Value: A. thaliana
  misc_feature: MA Experiment 20001558 PARAMETER Experiment Name: At_Drought_Soil_Dry_P Parameter: Plant Line Value: WS
  misc_feature: MA Experiment 20001558 PARAMETER Experiment Name: At_Drought_Soil_Dry_P Parameter: Post Timepoint (hr) Value: 6
  misc_feature: MA Experiment 20001558 PARAMETER Experiment Name: At_Drought_Soil_Dry_P Parameter: Post-Treatment Value: Re-Water vs. No Drought
  misc_feature: MA Experiment 20001558 PARAMETER Experiment Name: At_Drought_Soil_Dry_P Parameter: Timepoint (day) Value: 13
  misc_feature: MA Experiment 20001558 PARAMETER Experiment Name: At_Drought_Soil_Dry_P Parameter: Treatment Value: Drought vs. No Drought
aagaggaagagagactcaaaacggcaattagcgaaagtgggcgggaggattcttttccggcgactcttttatgtcttctcttcctcttcgctccggtgagaagatggaatcgccttccatctccgacgccgttccacttcacgcaccagaagacgcgaccgcggatttttcccaaccgcaatcgccgttacatgaagttgattcgtttccagttactgaatcctccgatgatgttgttgttaacgtctcggagataccgaatttatctccgtctgatgatgattttgaccacgagcgaaatagcggcgaggatcgcgatcaggatcacggcgagaatccggttgagaccgatggtgttgttgttccaatcgatgagttgaatcagaagatcattagacaggttgaatactactttagtgacgagaatttgcctactgacaaatttcttctgaatgcaatgaagagaaacaaaaaaggctttgttcctatttctaccattgctacgttccacaaaatgaagaagcttactcgagatcatgctttgatagtatcagccttaaaggagtcatcgtttcttgttgttagcgctgatgagaagaaggtgaagcggctgagtcctcttcctgagatcagagatccaaagattttcactgttttggtagaaaatttgccagaggatcattcaaatgagaatattcgagagatatttggtaaagctggaagtattaaaagtgtatccatatgtgatccaaatgctgttgaagaatcagagaagggtgggaagaaggaaaatttcatcagaaccagattacatgcctttgtggagtatgaaacggtggaggcagctgaaaaagcggcagctacattgaataatgagcaagactggagaaatgggttgcgagttaagcttcttgaacaagcagcaggaaagtttgcacagagaagaccagctcggagggaagtcgataaagaaaaggacactacaggcagagttcatgatcaaactggaggagagaaaaacaaaaagacgcgtgaacatcaaaatcaccgtctccatcattctgataatcctgctgatgatgacggtggcaatcatcagaaggataaaaatggaaacaaaggcagagttgtaggacaaggaagacgacagaatcatcaaggcggcaacggcattggacatggaacagcttcatcatcttctcatcctaattatcatcctgttgaggtctcaaagcgtccacctggcccgagaatgcctgatgggacgagagggttcacaatggggcgtggtaaagcgattcctcctcccacatctactcaaaccagtcatgaagtttgatcggttccgcatcttcggttgtatcattgtgtggttttatttcacattaaaaaatgtgaaacttgtatgtaattagaattgagatgttgttttggatttgggtttccttttggcatattcaagtcctccaaatcttcactttggtaattagttttgtgttgtaagttttggtgaatgaaaaaatgatccttttgataaacttataaaataacacttatc

SEQ ID NO: 80491 - protein, 422 aa, Arabidopsis thaliana
  peptide (1)..(422): Ceres Seq. ID no. 12656149
  misc_feature (195)..(280): Pfam Name: RNA recognition motif. (a.k.a. RRM, RBD, or RNP domain) Pfam Description: RNA recognition motif. (a.k.a. RRM, RBD, or RNP
  misc_feature (1)..(422): Homolog of NCBI NO: 30694922 NR Description: RNA recognition motif (RRM)-containing protein thaliana] >gi|15215748|gb|AAK91419.1| AT5g46250/MPL12_3 thaliana] >gi|23308375|gb|AAN18157.1| At5g46250/MPL12_3
  misc_feature (1)..(422): Homolog of NCBI NO: 30694926 NR Description: RNA recognition motif (RRM)-containing protein
  misc_feature (12)..(422): Homolog of NCBI NO: 10177706 NR Description: contains similarity to RNA-binding
  misc_feature (95)..(409): Homolog of NCBI NO: 34909652 NR Description: RNA-binding protein-like [Oryza sativa (japonica
  misc_feature (101)..(408): Homolog of NCBI NO: 15230287 NR Description: RNA-binding protein, putative; protein id:
  misc_feature (102)..(410): Homolog of NCBI NO: 34394175 NR Description: putative RNA-binding protein homolog [Oryza
  misc_feature (63)..(378): Homolog of NCBI NO: 18406414 NR Description: VirF-interacting protein FIP1; protein id: supported by cDNA: gi_12744918, supported by cDNA: gi_14030638,
  misc_feature (101)..(299): Homolog of NCBI NO: 6449448 NR Description: RNA-binding protein homolog [Brassica napus]
  misc_feature (99)..(293): Homolog of NCBI NO: 34896588 NR Description: putative RNA-binding protein [Oryza sativa]
  misc_feature (132)..(412): Homolog of NCBI NO: 15724224 NR Description: At2g43970/F6E13.10 [Arabidopsis thaliana]
MSSLPLRSGEKMESPSISDAVPLHAPEDATADFSQPQSPLHEVDSFPVTESSDDVVVNVSEIPNLSPSDDDFDHERNSGEDRDQDHGENPVETDGVVVPIDELNQKIIRQVEYYFSDENLPTDKFLLNAMKRNKKGFVPISTIATFHKMKKLTRDHALIVSALKESSFLVVSADEKKVKRLSPLPEIRDPKIFTVLVENLPEDHSNENIREIFGKAGSIKSVSICDPNAVEESEKGGKKENFIRTRLHAFVEYETVEAAEKAAATLNNEQDWRNGLRVKLLEQAAGKFAQRRPARREVDKEKDTTGRVHDQTGGEKNKKTREHQNHRLHHSDNPADDDGGNHQKDKNGNKGRVVGQGRRQNHQGGNGIGHGTASSSSHPNYHPVEVSKRPPGPRMPDGTRGFTMGRGKAIPPPTSTQTSHEV

SEQ ID NO: 80492 - protein, 411 aa, Arabidopsis thaliana
  peptide (1)..(411): Ceres Seq. ID no. 12656150
  misc_feature (184)..(269): Pfam Name: RNA recognition motif. (a.k.a. RRM, RBD, or RNP domain) Pfam Description: RNA recognition motif. (a.k.a. RRM, RBD, or RNP
  misc_feature (1)..(411): Homolog of NCBI NO: 30694922 NR Description: RNA recognition motif (RRM)-containing protein thaliana] >gi|15215748|gb|AAK91419.1| AT5g46250/MPL12_3 thaliana] >gi|23308375|gb|AAN18157.1| At5g46250/MPL12_3
  misc_feature (1)..(411): Homolog of NCBI NO: 30694926 NR Description: RNA recognition motif (RRM)-containing protein
  misc_feature (1)..(411): Homolog of NCBI NO: 10177706 NR Description: contains similarity to RNA-binding
  misc_feature (84)..(398): Homolog of NCBI NO: 34909652 NR Description: RNA-binding protein-like [Oryza sativa (japonica
  misc_feature (90)..(397): Homolog of NCBI NO: 15230287 NR Description: RNA-binding protein, putative; protein id:
  misc_feature (91)..(399): Homolog of NCBI NO: 34394175 NR Description: putative RNA-binding protein homolog [Oryza
  misc_feature (52)..(367): Homolog of NCBI NO: 18406414 NR Description: VirF-interacting protein FIP1; protein id: supported by cDNA: gi_12744918, supported by cDNA: gi_14030638,
  misc_feature (90)..(288): Homolog of NCBI NO: 6449448 NR Description: RNA-binding protein homolog [Brassica napus]
  misc_feature (88)..(282): Homolog of NCBI NO: 34896588 NR Description: putative RNA-binding protein [Oryza sativa]
  misc_feature (121)..(401): Homolog of NCBI NO: 15724224 NR Description: At2g43970/F6E13.10 [Arabidopsis thaliana]
MESPSISDAVPLHAPEDATADFSQPQSPLHEVDSFPVTESSDDVVVNVSEIPNLSPSDDDFDHERNSGEDRDQDHGENPVETDGVVVPIDELNQKIIRQVEYYFSDENLPTDKFLLNAMKRNKKGFVPISTIATFHKMKKLTRDHALIVSALKESSFLVVSADEKKVKRLSPLPEIRDPKIFTVLVENLPEDHSNENIREIFGKAGSIKSVSICDPNAVEESEKGGKKENFIRTRLHAFVEYETVEAAEKAAATLNNEQDWRNGLRVKLLEQAAGKFAQRRPARREVDKEKDTTGRVHDQTGGEKNKKTREHQNHRLHHSDNPADDDGGNHQKDKNGNKGRVVGQGRRQNHQGGNGIGHGTASSSSHPNYHPVEVSKRPPGPRMPDGTRGFTMGRGKAIPPPTSTQTSHEV

SEQ ID NO: 80493 - protein, 293 aa, Arabidopsis thaliana
  peptide (1)..(293): Ceres Seq. ID no. 12656151
  misc_feature (66)..(151): Pfam Name: RNA recognition motif. (a.k.a. RRM, RBD, or RNP domain) Pfam Description: RNA recognition motif. (a.k.a. RRM, RBD, or RNP
  misc_feature (1)..(293): Homolog of NCBI NO: 30694922 NR Description: RNA recognition motif (RRM)-containing protein thaliana] >gi|15215748|gb|AAK91419.1| AT5g46250/MPL12_3 thaliana] >gi|23308375|gb|AAN18157.1| At5g46250/MPL12_3
  misc_feature (1)..(293): Homolog of NCBI NO: 30694926 NR Description: RNA recognition motif (RRM)-containing protein
  misc_feature (1)..(293): Homolog of NCBI NO: 10177706 NR Description: contains similarity to RNA-binding
  misc_feature (1)..(280): Homolog of NCBI NO: 34909652 NR Description: RNA-binding protein-like [Oryza sativa (japonica
  misc_feature (1)..(279): Homolog of NCBI NO: 15230287 NR Description: RNA-binding protein, putative; protein id:
  misc_feature (1)..(281): Homolog of NCBI NO: 34394175 NR Description: putative RNA-binding protein homolog [Oryza
  misc_feature (1)..(249): Homolog of NCBI NO: 18406414 NR Description: VirF-interacting protein FIP1; protein id: supported by cDNA: gi_12744918, supported by cDNA: gi_14030638,
  misc_feature (1)..(170): Homolog of NCBI NO: 6449448 NR Description: RNA-binding protein homolog [Brassica napus]
  misc_feature (1)..(164): Homolog of NCBI NO: 34896588 NR Description: putative RNA-binding protein [Oryza sativa]
  misc_feature (3)..(283): Homolog of NCBI NO: 15724224 NR Description: At2g43970/F6E13.10 [Arabidopsis thaliana]
MKRNKKGFVPISTIATFHKMKKLTRDHALIVSALKESSFLVVSADEKKVKRLSPLPEIRDPKIFTVLVENLPEDHSNENIREIFGKAGSIKSVSICDPNAVEESEKGGKKENFIRTRLHAFVEYETVEAAEKAAATLNNEQDWRNGLRVKLLEQAAGKFAQRRPARREVDKEKDTTGRVHDQTGGEKNKKTREHQNHRLHHSDNPADDDGGNHQKDKNGNKGRVVGQGRRQNHQGGNGIGHGTASSSSHPNYHPVEVSKRPPGPRMPDGTRGFTMGRGKAIPPPTSTQTSHEV

SEQ ID NO: 80494 - DNA, 1303 bp, Arabidopsis thaliana
  misc_feature (1)..(1303): Ceres Seq. ID no. 12656167
  misc_feature: MA Experiment ID: 20000169 Result: Up-regulated in Transcription
  misc_feature: MA Experiment 20000169 PARAMETER Experiment Name: At_100uM_ABA_P Parameter: Age (day) Value: 14
  misc_feature: MA Experiment 20000169 PARAMETER Experiment Name: At_100uM_ABA_P Parameter: Organism Value: A. thaliana
  misc_feature: MA Experiment 20000169 PARAMETER Experiment Name: At_100uM_ABA_P Parameter: Plant Line Value: WS
  misc_feature: MA Experiment 20000169 PARAMETER Experiment Name: At_100uM_ABA_P Parameter: Timepoint (hr) Value: 6
  misc_feature: MA Experiment 20000169 PARAMETER Experiment Name: At_100uM_ABA_P Parameter: Tissue Value: Aerial
  misc_feature: MA Experiment 20000169 PARAMETER Experiment Name: At_100uM_ABA_P Parameter: Treatment Value: 100uM ABA vs. No Treatment
  misc_feature: MA Experiment ID: 20000179 Result: Down-regulated in Transcription
  misc_feature: MA Experiment 20000179 PARAMETER Experiment Name: At_Germinating_Seeds_P Parameter: Age (hr) Value: 6 vs. 0
  misc_feature: MA Experiment 20000179 PARAMETER Experiment Name: At_Germinating_Seeds_P Parameter: Tissue Value: Germinating Seeds
  misc_feature: MA Experiment ID: 20000180 Result: Down-regulated in Transcription
  misc_feature: MA Experiment 20000180 PARAMETER Experiment Name: At_Germinating_Seeds_P Parameter: Age (hr) Value: 24 vs. 0
  misc_feature: MA Experiment 20000180 PARAMETER Experiment Name: At_Germinating_Seeds_P Parameter: Tissue Value: Germinating Seeds
  misc_feature: MA Experiment ID: 20000182 Result: Up-regulated in Transcription
  misc_feature: MA Experiment 20000182 PARAMETER Experiment Name: At_2mM_SA_P Parameter: Age (day) Value: 14
  misc_feature: MA Experiment 20000182 PARAMETER Experiment Name: At_2mM_SA_P Parameter: Organism Value: A. thaliana
  misc_feature: MA Experiment 20000182 PARAMETER Experiment Name: At_2mM_SA_P Parameter: Plant Line Value: WS
  misc_feature: MA Experiment 20000182 PARAMETER Experiment Name: At_2mM_SA_P Parameter: Timepoint (hr) Value: 6
  misc_feature: MA Experiment 20000182 PARAMETER Experiment Name: At_2mM_SA_P Parameter: Tissue Value: Aerial
  misc_feature: MA Experiment 20000182 PARAMETER Experiment Name: At_2mM_SA_P Parameter: Treatment Value: 2mM SA vs. No Treatment
  misc_feature: MA Experiment ID: 20000184 Result: Down-regulated in Transcription
  misc_feature: MA Experiment 20000184 PARAMETER Experiment Name: At_Shoots__P Parameter: Age (day) Value: 7
  misc_feature: MA Experiment 20000184 PARAMETER Experiment Name: At_Shoots__P Parameter: Tissue Value: Shoots vs. Whole Plant
  misc_feature: MA Experiment ID: 20000185 Result: Down-regulated in Transcription
  misc_feature: MA Experiment 20000185 PARAMETER Experiment Name: At_Roots__P Parameter: Age (day) Value: 7 vs. 21
  misc_feature: MA Experiment 20000185 PARAMETER Experiment Name: At_Roots__P Parameter: Organism Value: A. thaliana
  misc_feature: MA Experiment 20000185 PARAMETER Experiment Name: At_Roots__P Parameter: Tissue Value: Roots vs. Whole Plant
  misc_feature: MA Experiment ID: 20000234 Result: Down-regulated in Transcription
  misc_feature: MA Experiment 20000234 PARAMETER Experiment Name: At_Siliques_P Parameter: Age (day) Value: 21
  misc_feature: MA Experiment 20000234 PARAMETER Experiment Name: At_Siliques_P Parameter: Organism Value: A. thaliana
  misc_feature: MA Experiment 20000234 PARAMETER Experiment Name: At_Siliques_P Parameter: Plant Line Value: WS
  misc_feature: MA Experiment 20000234 PARAMETER Experiment Name: At_Siliques_P Parameter: Tissue Value: Less Than 5mm Siliques vs. Whole Plant
  misc_feature: MA Experiment ID: 20000235 Result: Down-regulated in Transcription
  misc_feature: MA Experiment 20000235 PARAMETER Experiment Name: At_Siliques_P Parameter: Age (day) Value: 21
  misc_feature: MA Experiment 20000235 PARAMETER Experiment Name: At_Siliques_P Parameter: Organism Value: A. thaliana
  misc_feature: MA Experiment 20000235 PARAMETER Experiment Name: At_Siliques_P Parameter: Plant Line Value: WS
  misc_feature: MA Experiment 20000235 PARAMETER Experiment Name: At_Siliques_P Parameter: Tissue Value: 5-10mm Siliques vs. Whole Plant
  misc_feature: MA Experiment ID: 20000264 Result: Down-regulated in Transcription
  misc_feature: MA Experiment 20000264 PARAMETER Experiment Name: At_Open_Flower_P Parameter: Age (day) Value: 21
  misc_feature: MA Experiment 20000264 PARAMETER Experiment Name: At_Open_Flower_P Parameter: Plant Line Value: WS
  misc_feature: MA Experiment 20000264 PARAMETER Experiment Name: At_Open_Flower_P Parameter: Tissue Value: Open Flower vs. Whole Plant
  misc_feature: MA Experiment ID: 20000286 Result: Down-regulated in Transcription
  misc_feature: MA Experiment 20000286 PARAMETER Experiment Name: At_Open_Flower_P Parameter: Age (day) Value: 21
  misc_feature: MA Experiment 20000286 PARAMETER Experiment Name: At_Open_Flower_P Parameter: Plant Line Value: WS
  misc_feature: MA Experiment 20000286 PARAMETER Experiment Name: At_Open_Flower_P Parameter: Tissue Value: Half Open vs. Whole Plant
  misc_feature: MA Experiment ID: 20000437 Result: Up-regulated in Transcription
  misc_feature: MA Experiment 20000437 PARAMETER Experiment Name: At_Drought_P Parameter: Age (day) Value: 8
  misc_feature: MA Experiment 20000437 PARAMETER Experiment Name: At_Drought_P Parameter: Organism Value: A. thaliana
  misc_feature: MA Experiment 20000437 PARAMETER Experiment Name: At_Drought_P Parameter: Plant Line Value: WS
  misc_feature: MA Experiment 20000437 PARAMETER Experiment Name: At_Drought_P Parameter: Timepoint (hr) Value: 24
  misc_feature: MA Experiment 20000437 PARAMETER Experiment Name: At_Drought_P Parameter: Tissue Value: Whole Plant
  misc_feature: MA Experiment 20000437 PARAMETER Experiment Name: At_Drought_P Parameter: Treatment Value: Drought vs. No Drought
  misc_feature: MA Experiment ID: 20000438 Result: Down-regulated in Transcription
  misc_feature: MA Experiment 20000438 PARAMETER Experiment Name: At_Shoots__P Parameter: Age (day) Value: 14
  misc_feature: MA Experiment 20000438 PARAMETER Experiment Name: At_Shoots__P Parameter: Tissue Value: Shoots vs. Whole Plant
  misc_feature: MA Experiment ID: 20000439 Result: Down-regulated in Transcription
  misc_feature: MA Experiment 20000439 PARAMETER Experiment Name: At_Roots__P Parameter: Age (day) Value: 14 vs. 21
  misc_feature: MA Experiment 20000439 PARAMETER Experiment Name: At_Roots__P Parameter: Organism Value: A. thaliana
  misc_feature: MA Experiment 20000439 PARAMETER Experiment Name: At_Roots__P Parameter: Tissue Value: Roots vs. Whole Plant
  misc_feature: MA Experiment ID: 20000451 Result: Down-regulated in Transcription
  misc_feature: MA Experiment 20000451 PARAMETER Experiment Name: At_CS6879_Shoots-Roots_P Parameter: Age (day) Value: 14
  misc_feature: MA Experiment 20000451 PARAMETER Experiment Name: At_CS6879_Shoots-Roots_P Parameter: Organism Value: A. thaliana
  misc_feature: MA Experiment 20000451 PARAMETER Experiment Name: At_CS6879_Shoots-Roots_P Parameter: Plant Line Value: CS6879 vs. WS
  misc_feature: MA Experiment 20000451 PARAMETER Experiment Name: At_CS6879_Shoots-Roots_P Parameter: Tissue Value: Roots
  misc_feature: MA Experiment ID: 20000453 Result: Up-regulated in Transcription
  misc_feature: MA Experiment 20000453 PARAMETER Experiment Name: At_100uM_ABA_P Parameter: Age (day) Value: 15
  misc_feature: MA Experiment 20000453 PARAMETER Experiment Name: At_100uM_ABA_P Parameter: Organism Value: A. thaliana
  misc_feature: MA Experiment 20000453 PARAMETER Experiment Name: At_100uM_ABA_P Parameter: Plant Line Value: WS
  misc_feature: MA Experiment 20000453 PARAMETER Experiment Name: At_100uM_ABA_P Parameter: Timepoint (hr) Value: 24
  misc_feature: MA Experiment 20000453 PARAMETER Experiment Name: At_100uM_ABA_P Parameter: Tissue Value: Aerial
  misc_feature: MA Experiment 20000453 PARAMETER Experiment Name: At_100uM_ABA_P Parameter: Treatment Value: 100uM ABA vs. No Treatment
  misc_feature: MA Experiment ID: 20000794 Result: Down-regulated in Transcription
  misc_feature: MA Experiment 20000794 PARAMETER Experiment Name: At_Petals_P Parameter: Age (day) Value: 23-25 days
  misc_feature: MA Experiment 20000794 PARAMETER Experiment Name: At_Petals_P Parameter: Plant Line Value: WS
  misc_feature: MA Experiment 20000794 PARAMETER Experiment Name: At_Petals_P Parameter: Tissue Value: Petals vs. Whole plant
aaatttagaccgactaaaaaattcattaacgtaaaaaagttcttgtttctttctttcttttcttcttcttcacgctcctctctttgtcattttctttttctttctttttggtttaagttttttctctttgttcttcgtcatgtctcatgaaatcaaagatcttaacaactatcactacacttcatcgtataatcattacaatatcaacaaccaaaatatgattaatctcccttacgtttctggtccatctgcttataatgcaaacatgatctcatcatcacaagtaggttttgatctaccctcgaagaacttgagtcctcaaggagccttcgagttgggtttcgagctttctccatcttcttctgacttttttaatccttccctcgatcaagagaacggtttgtataatgcttataattataatagtagtcaaaagagtcatgaagttgtcggtgatggttgtgcaaccattaagagtgaagttagggtttcagcatctccttcttcaagtgaggccgatcatcatccaggagaagattccggcaagatccggaagaaaagagaagttcgcgatggaggagaagatgatcaacgctctcagaaagtagttaaaacaaagaagaaagaggagaagaaaaaagagccacgagtctcgttcatgactaagaccgaagttgatcatctcgaagacggctatcgttggagaaagtatggccaaaaagcagtcaaaaacagtccttatccgaggagttactatagatgcacgactcagaagtgcaacgtgaagaagagagtggagagatcttaccaagacccaacggtcgtcatcacaacctacgagagtcaacacaaccatccgatcccgaccaatcgtcggacagcaatgttctctggaaccaccgcatctgattataacccatcatcgtctccaatattctccgatctcatcatcaatactccaagaagcttctcaaatgatgatctcttccgtgtgccatacgctagtgtgaacgtgaaccctagttatcatcaacagcaacatggatttcatcaacaggagagtgagttcgagctcttgaaggagatgtttccttcggttttcttcaaacaagagccttgatgatataatataatatagaaacaattttttttctgctaagaaatatagaacaaaacttggatgcataataagtgatgatagtgttatttattttttgcatgtatatattatacatgttttgttaactagctataggatatactgtagtaattaagcataaatatggagtcccttcgacttatt

SEQ ID NO: 80495 - protein, 326 aa, Arabidopsis thaliana
  peptide (1)..(326): Ceres Seq. ID no. 12656168
  misc_feature (182)..(241): Pfam Name: WRKY DNA -binding domain Pfam Description: WRKY DNA -binding domain
  misc_feature (1)..(326): Homolog of NCBI NO: 15237428 NR Description: WRKY family transcription factor; protein id: supported by cDNA: gi_15384212, supported by cDNA: gi_20465324
  misc_feature (1)..(326): Homolog of NCBI NO: 15236785 NR Description: WRKY family transcription factor; protein id: supported by cDNA: gi_17064157, supported by cDNA: gi_17979527 thaliana] >gi|17064158|gb|AAL35286.1|AF442393_1 WRKY
  misc_feature (1)..(326): Homolog of NCBI NO: 7484934 NR Description: DNA-binding protein homolog T9A21.10 -
  misc_feature (73)..(325): Homolog of NCBI NO: 15220582 NR Description: WRKY family transcription factor; protein id: supported by cDNA: gi_15991739 [Arabidopsis thaliana]
  misc_feature (118)..(325): Homolog of NCBI NO: 25518132 NR Description: F1N18.10 protein - Arabidopsis thaliana
  misc_feature (95)..(246): Homolog of NCBI NO: 34912866 NR Description: putative DNA-binding protein homolog [Oryza
  misc_feature (97)..(246): Homolog of NCBI NO: 34910900 NR Description: P0003E08.17 [Oryza sativa (japonica
  misc_feature (119)..(262): Homolog of NCBI NO: 15226550 NR Description: WRKY family transcription factor; protein id: supported by cDNA: 114256., supported by cDNA: gi_15990583
  misc_feature (119)..(262): Homolog of NCBI NO: 21536889 NR Description: putative WRKY-type DNA binding protein
  misc_feature (68)..(246): Homolog of NCBI NO: 15239913 NR Description: WRKY family transcription factor; protein id: supported by cDNA: gi_17064165, supported by cDNA: gi_17380791, by cDNA: gi_20259612 [Arabidopsis thaliana]
MSHEIKDLNNYHYTSSYNHYNINNQNMINLPYVSGPSAYNANMISSSQVGFDLPSKNLSPQGAFELGFELSPSSSDFFNPSLDQENGLYNAYNYNSSQKSHEVVGDGCATIKSEVRVSASPSSSEADHHPGEDSGKIRKKREVRDGGEDDQRSQKVVKTKKKEEKKKEPRVSFMTKTEVDHLEDGYRWRKYGQKAVKNSPYPRSYYRCTTQKCNVKKRVERSYQDPTVVITTYESQHNHPIPTNRRTAMFSGTTASDYNPSSSPIFSDLIINTPRSFSNDDLFRVPYASVNVNPSYHQQQHGFHQQESEFELLKEMFPSVFFKQEP

SEQ ID NO: 80496 - protein, 300 aa, Arabidopsis thaliana
  peptide (1)..(300): Ceres Seq. ID no. 12656169
  misc_feature (156)..(215): Pfam Name: WRKY DNA -binding domain Pfam Description: WRKY DNA -binding domain
  misc_feature (1)..(300): Homolog of NCBI NO: 15237428 NR Description: WRKY family transcription factor; protein id: supported by cDNA: gi_15384212, supported by cDNA: gi_20465324
  misc_feature (1)..(300): Homolog of NCBI NO: 15236785 NR Description: WRKY family transcription factor; protein id: supported by cDNA: gi_17064157, supported by cDNA: gi_17979527 thaliana] >gi|17064158|gb|AAL35286.1|AF442393_1 WRKY
  misc_feature (1)..(300): Homolog of NCBI NO: 7484934 NR Description: DNA-binding protein homolog T9A21.10 -
  misc_feature (47)..(299): Homolog of NCBI NO: 15220582 NR Description: WRKY family transcription factor; protein id: supported by cDNA: gi_15991739 [Arabidopsis thaliana]
  misc_feature (92)..(299): Homolog of NCBI NO: 25518132 NR Description: F1N18.10 protein - Arabidopsis thaliana
  misc_feature (69)..(220): Homolog of NCBI NO: 34912866 NR Description: putative DNA-binding protein homolog [Oryza
  misc_feature (71)..(220): Homolog of NCBI NO: 34910900 NR Description: P0003E08.17 [Oryza sativa (japonica
  misc_feature (93)..(236): Homolog of NCBI NO: 15226550 NR Description: WRKY family transcription factor; protein id: supported by cDNA: 114256., supported by cDNA: gi_15990583
  misc_feature (93)..(236): Homolog of NCBI NO: 21536889 NR Description: putative WRKY-type DNA binding protein
  misc_feature (42)..(220): Homolog of NCBI NO: 15239913 NR Description: WRKY family transcription factor; protein id: supported by cDNA: gi_17064165, supported by cDNA: gi_17380791, by cDNA: gi_20259612 [Arabidopsis thaliana]
MINLPYVSGPSAYNANMISSSQVGFDLPSKNLSPQGAFELGFELSPSSSDFFNPSLDQENGLYNAYNYNSSQKSHEVVGDGCATIKSEVRVSASPSSSEADHHPGEDSGKIRKKREVRDGGEDDQRSQKVVKTKKKEEKKKEPRVSFMTKTEVDHLEDGYRWRKYGQKAVKNSPYPRSYYRCTTQKCNVKKRVERSYQDPTVVITTYESQHNHPIPTNRRTAMFSGTTASDYNPSSSPIFSDLIINTPRSFSNDDLFRVPYASVNVNPSYHQQQHGFHQQESEFELLKEMFPSVFFKQEP

SEQ ID NO: 80497 - protein, 284 aa, Arabidopsis thaliana
  peptide (1)..(284): Ceres Seq. ID no. 12656170
  misc_feature (140)..(199): Pfam Name: WRKY DNA -binding domain Pfam Description: WRKY DNA -binding domain
  misc_feature (1)..(284): Homolog of NCBI NO: 15237428 NR Description: WRKY family transcription factor; protein id: supported by cDNA: gi_15384212, supported by cDNA: gi_20465324
  misc_feature (1)..(284): Homolog of NCBI NO: 15236785 NR Description: WRKY family transcription factor; protein id: supported by cDNA: gi_17064157, supported by cDNA: gi_17979527 thaliana] >gi|17064158|gb|AAL35286.1|AF442393_1 WRKY
  misc_feature (1)..(284): Homolog of NCBI NO: 7484934 NR Description: DNA-binding protein homolog T9A21.10 -
  misc_feature (31)..(283): Homolog of NCBI NO: 15220582 NR Description: WRKY family transcription factor; protein id: supported by cDNA: gi_15991739 [Arabidopsis thaliana]
  misc_feature (76)..(283): Homolog of NCBI NO: 25518132 NR Description: F1N18.10 protein - Arabidopsis thaliana
  misc_feature (53)..(204): Homolog of NCBI NO: 34912866 NR Description: putative DNA-binding protein homolog [Oryza
  misc_feature (55)..(204): Homolog of NCBI NO: 34910900 NR Description: P0003E08.17 [Oryza sativa (japonica
  misc_feature (77)..(220): Homolog of NCBI NO: 15226550 NR Description: WRKY family transcription factor; protein id: supported by cDNA: 114256., supported by cDNA: gi_15990583
  misc_feature (77)..(220): Homolog of NCBI NO: 21536889 NR Description: putative WRKY-type DNA binding protein
  misc_feature (26)..(204): Homolog of NCBI NO: 15239913 NR Description: WRKY family transcription factor; protein id: supported by cDNA: gi_17064165, supported by cDNA: gi_17380791, by cDNA: gi_20259612 [Arabidopsis thaliana]
MISSSQVGFDLPSKNLSPQGAFELGFELSPSSSDFFNPSLDQENGLYNAYNYNSSQKSHEVVGDGCATIKSEVRVSASPSSSEADHHPGEDSGKIRKKREVRDGGEDDQRSQKVVKTKKKEEKKKEPRVSFMTKTEVDHLEDGYRWRKYGQKAVKNSPYPRSYYRCTTQKCNVKKRVERSYQDPTVVITTYESQHNHPIPTNRRTAMFSGTTASDYNPSSSPIFSDLIINTPRSFSNDDLFRVPYASVNVNPSYHQQQHGFHQQESEFELLKEMFPSVFFKQEP

SEQ ID NO: 80498 - DNA, 2094 bp, Arabidopsis thaliana
  misc_feature (1)..(2094): Ceres Seq. ID no. 12656183
  misc_feature: MA Experiment ID: 20000355 Result: Down-regulated in Transcription
  misc_feature: MA Experiment 20000355 PARAMETER Experiment Name: At_Siliques_Sub_P Parameter: Age (day) Value: 21
  misc_feature: MA Experiment 20000355 PARAMETER Experiment Name: At_Siliques_Sub_P Parameter: Organism Value: A. thaliana
  misc_feature: MA Experiment 20000355 PARAMETER Experiment Name: At_Siliques_Sub_P Parameter: Plant Line Value: WS
  misc_feature: MA Experiment 20000355 PARAMETER Experiment Name: At_Siliques_Sub_P Parameter: Tissue Value: Less Than 5mm Siliques vs. Whole Plant
atgtggagtcgtgccatttttcaacgattcaggtttcgagctttctctatatctcacgttatccatgggaaatgttacagaagtttctcagttactgtggagtttcagaatcgcgaggttttgatatgtaatcacttgttgagtcgacgaatcgatgaggctcgagaggttttcaatcaggttccatctcctcatgtgagtctttacacaaagatgattacgggatacacgaggagtaatagattggttgatgcgttgaatctgttcgacgaaatgcctgtgagagatgttgtatcatggaattcgatgatcagtggttgtgtggagtgtggtgatatgaatactgcagtgaagctgttcgatgaaatgcctgagagaagcgtggtttcatggacagcgatggtaaatgggtgttttaggtctggtaaggttgatcaagcggagagattgttttatcaaatgcctgtgaaagatactgcagcgtggaattcgatggttcatgggtatttacagtttggtaaagtagacgatgccttgaagttgtttaagcaaatgcctgggaagaatgtgatttcgtggacgacaatgatctgtgggttagaccagaatgagaggagtggagaggctctcgatttgttcaagaacatgttgcgttgttgcataaaatcgacttcaagaccattcacttgcgtaatcaccgcttgcgcgaatgctccagcgtttcatatggggatacaagttcatggcttgatcatcaagttggggtttttatatgaagaatatgtatctgcttcgctcataactttttatgcaaactgcaaaagaataggggattctcggaaggtgtttgacgagaaggttcatgaacaagttgctgtgtggactgctctattgtcaggttatagtctgaacaaaaagcacgaagatgcgttgagtatattctccgggatgttaagaaacagtatcttaccaaatcaatcaacatttgctagcggattaaactcttgctctgctttgggaacattggattggggtaaggagatgcatggagttgctgtgaagcttggtttagaaactgatgcctttgtgggtaattctcttgttgtgatgtacagcgattctggaaacgttaatgatgccgtttcagtgttcataaaaatcttcaagaagagcattgtgtcatggaattccattattgttggctgcgcgcagcatgggcgtggaaagtgggcgtttgtcatatttggtcaaatgatacgcctaaacaaagagccagatgagatcactttcactggcttactctctgcttgtagccattgcgggttcctagagaaaggaagaaagctgttctattacatgtcaagtggaataaatcatatcgatagaaagattcaacactacacttgtatggttgatatcttgggaagatgcggaaaattgaaagaagcagaagaacttatcgagagaatggttgtgaaacctaatgaaatggtttggttggctttacttagtgcttgtaggatgcattctgatgtagacagaggcgagaaagctgctgcagccatttttaatctggactcaaaatcaagcgctgcttatgtcttattgtcaaatatatatgcttctgctggtagatggtcgaatgtatcaaaattgagagttaagatgaagaagaatgggattatgaagaaacccgggagcagttgggttgttattagagggaaaaagcacgaatttttctccggtgatcaaccacattgctcgaggatatatgagaagttggagtttctgagagagaagttgaaggaactgggctatgctcctgattatagatccgctttacatgacgttgaagatgaacagaaagaagagatgttgtggtaccacagtgagaggcttgctattgcttttgggttgattaatacagttgaaggaagtgcagtcacagtgatgaagaatctacgggtttgtgaagattgtcacacagtgattaagttaatctccggagttgtgggacgtgagattgttttaagggatccgattcggtttcatcatttcaagaatgggacgtgttcttgtggggattattggtag

SEQ ID NO: 80499 - protein, 697 aa, Arabidopsis thaliana
  peptide (1)..(697): Ceres Seq. ID no. 12656184
  misc_feature (393)..(427): Pfam Name: PPR repeat Pfam Description: PPR repeat
  misc_feature (101)..(697): Homolog of NCBI NO: 34896896 NR Description: hypothetical protein [Oryza sativa (japonica group)] >gi|24899461|gb|AAN65031.1| hypothetical protein [Oryza
  misc_feature (82)..(154): Homolog of NCBI NO: 34896896 NR Description: hypothetical protein [Oryza sativa (japonica group)] >gi|24899461|gb|AAN65031.1| hypothetical protein [Oryza
  misc_feature (53)..(697): Homolog of NCBI NO: 15217508 NR Description: hypothetical protein; protein id: At1g09410.1
  misc_feature (128)..(697): Homolog of NCBI NO: 15235472 NR Description: putative protein; protein id: At4g37170.1
  misc_feature (53)..(697): Homolog of NCBI NO: 15223594 NR Description: hypothetical protein; protein id: At1g56690.1
  misc_feature (54)..(697): Homolog of NCBI NO: 15223099 NR Description: unknown protein; protein id: At1g08070.1 thaliana] >gi|8778839|gb|AAF79838.1|AC026875_18 T6D22.15
  misc_feature (51)..(697): Homolog of NCBI NO: 15221566 NR Description: hypothetical protein; protein id: At1g68930.1
  misc_feature (48)..(697): Homolog of NCBI NO: 34915012 NR Description: P0458A05.10 [Oryza sativa (japonica
  misc_feature (265)..(697): Homolog of NCBI NO: 34393605 NR Description: pentatricopeptide (PPR) repeat-containing
  misc_feature (41)..(317): Homolog of NCBI NO: 34393605 NR Description: pentatricopeptide (PPR) repeat-containing
MWSRAIFQRFRFRAFSISHVIHGKCYRSFSVTVEFQNREVLICNHLLSRRIDEAREVFNQVPSPHVSLYTKMITGYTRSNRLVDALNLFDEMPVRDVVSWNSMISGCVECGDMNTAVKLFDEMPERSVVSWTAMVNGCFRSGKVDQAERLFYQMPVKDTAAWNSMVHGYLQFGKVDDALKLFKQMPGKNVISWTTMICGLDQNERSGEALDLFKNMLRCCIKSTSRPFTCVITACANAPAFHMGIQVHGLIIKLGFLYEEYVSASLITFYANCKRIGDSRKVFDEKVHEQVAVWTALLSGYSLNKKHEDALSIFSGMLRNSILPNQSTFASGLNSCSALGTLDWGKEMHGVAVKLGLETDAFVGNSLVVMYSDSGNVNDAVSVFIKIFKKSIVSWNSIIVGCAQHGRGKWAFVIFGQMIRLNKEPDEITFTGLLSACSHCGFLEKGRKLFYYMSSGINHIDRKIQHYTCMVDILGRCGKLKEAEELIERMVVKPNEMVWLALLSACRMHSDVDRGEKAAAAIFNLDSKSSAAYVLLSNIYASAGRWSNVSKLRVKMKKNGIMKKPGSSWVVIRGKKHEFFSGDQPHCSRIYEKLEFLREKLKELGYAPDYRSALHDVEDEQKEEMLWYHSERLAIAFGLINTVEGSAVTVMKNLRVCEDCHTVIKLISGVVGREIVLRDPIRFHHFKNGTCSCGDYW

SEQ ID NO: 80500 - protein, 626 aa, Arabidopsis thaliana
  peptide (1)..(626): Ceres Seq. ID no. 12656185
  misc_feature (322)..(356): Pfam Name: PPR repeat Pfam Description: PPR repeat
  misc_feature (30)..(626): Homolog of NCBI NO: 34896896 NR Description: hypothetical protein [Oryza sativa (japonica group)] >gi|24899461|gb|AAN65031.1| hypothetical protein [Oryza
  misc_feature (11)..(83): Homolog of NCBI NO: 34896896 NR Description: hypothetical protein [Oryza sativa (japonica group)] >gi|24899461|gb|AAN65031.1| hypothetical protein [Oryza
  misc_feature (1)..(626): Homolog of NCBI NO: 15217508 NR Description: hypothetical protein; protein id: At1g09410.1
  misc_feature (57)..(626): Homolog of NCBI NO: 15235472 NR Description: putative protein; protein id: At4g37170.1
  misc_feature (1)..(626): Homolog of NCBI NO: 15223594 NR Description: hypothetical protein; protein id: At1g56690.1
  misc_feature (1)..(626): Homolog of NCBI NO: 15223099 NR Description: unknown protein; protein id: At1g08070.1 thaliana] >gi|8778839|gb|AAF79838.1|AC026875_18 T6D22.15
  misc_feature (1)..(626): Homolog of NCBI NO: 15221566 NR Description: hypothetical protein; protein id: At1g68930.1
  misc_feature (1)..(626): Homolog of NCBI NO: 34915012 NR Description: P0458A05.10 [Oryza sativa (japonica
  misc_feature (194)..(626): Homolog of NCBI NO: 34393605 NR Description: pentatricopeptide (PPR) repeat-containing
  misc_feature (1)..(246): Homolog of NCBI NO: 34393605 NR Description: pentatricopeptide (PPR) repeat-containing
MITGYTRSNRLVDALNLFDEMPVRDVVSWNSMISGCVECGDMNTAVKLFDEMPERSVVSWTAMVNGCFRSGKVDQAERLFYQMPVKDTAAWNSMVHGYLQFGKVDDALKLFKQMPGKNVISWTTMICGLDQNERSGEALDLFKNMLRCCIKSTSRPFTCVITACANAPAFHMGIQVHGLIIKLGFLYEEYVSASLITFYANCKRIGDSRKVFDEKVHEQVAVWTALLSGYSLNKKHEDALSIFSGMLRNSILPNQSTFASGLNSCSALGTLDWGKEMHGVAVKLGLETDAFVGNSLVVMYSDSGNVNDAVSVFIKIFKKSIVSWNSIIVGCAQHGRGKWAFVIFGQMIRLNKEPDEITFTGLLSACSHCGFLEKGRKLFYYMSSGINHIDRKIQHYTCMVDILGRCGKLKEAEELIERMVVKPNEMVWLALLSACRMHSDVDRGEKAAAAIFNLDSKSSAAYVLLSNIYASAGRWSNVSKLRVKMKKNGIMKKPGSSWVVIRGKKHEFFSGDQPHCSRIYEKLEFLREKLKELGYAPDYRSALHDVEDEQKEEMLWYHSERLAIAFGLINTVEGSAVTVMKNLRVCEDCHTVIKLISGVVGREIVLRDPIRFHHFKNGTCSCGDYW

SEQ ID NO: 80501 - protein, 606 aa, Arabidopsis thaliana
  peptide (1)..(606): Ceres Seq. ID no. 12656186
  misc_feature (302)..(336): Pfam Name: PPR repeat Pfam Description: PPR repeat
  misc_feature (10)..(606): Homolog of NCBI NO: 34896896 NR Description: hypothetical protein [Oryza sativa (japonica group)] >gi|24899461|gb|AAN65031.1| hypothetical protein [Oryza
  misc_feature (1)..(63): Homolog of NCBI NO: 34896896 NR Description: hypothetical protein [Oryza sativa (japonica group)] >gi|24899461|gb|AAN65031.1| hypothetical protein [Oryza
  misc_feature (1)..(606): Homolog of NCBI NO: 15217508 NR Description: hypothetical protein; protein id: At1g09410.1
  misc_feature (37)..(606): Homolog of NCBI NO: 15235472 NR Description: putative protein; protein id: At4g37170.1
  misc_feature (1)..(606): Homolog of NCBI NO: 15223594 NR Description: hypothetical protein; protein id: At1g56690.1
  misc_feature (1)..(606): Homolog of NCBI NO: 15223099 NR Description: unknown protein; protein id: At1g08070.1 thaliana] >gi|8778839|gb|AAF79838.1|AC026875_18 T6D22.15
  misc_feature (1)..(606): Homolog of NCBI NO: 15221566 NR Description: hypothetical protein; protein id: At1g68930.1
  misc_feature (1)..(606): Homolog of NCBI NO: 34915012 NR Description: P0458A05.10 [Oryza sativa (japonica
  misc_feature (174)..(606): Homolog of NCBI NO: 34393605 NR Description: pentatricopeptide (PPR) repeat-containing
  misc_feature (1)..(226): Homolog of NCBI NO: 34393605 NR Description: pentatricopeptide (PPR) repeat-containing
MPVRDVVSWNSMISGCVECGDMNTAVKLFDEMPERSVVSWTAMVNGCFRSGKVDQAERLFYQMPVKDTAAWNSMVHGYLQFGKVDDALKLFKQMPGKNVISWTTMICGLDQNERSGEALDLFKNMLRCCIKSTSRPFTCVITACANAPAFHMGIQVHGLIIKLGFLYEEYVSASLITFYANCKRIGDSRKVFDEKVHEQVAVWTALLSGYSLNKKHEDALSIFSGMLRNSILPNQSTFASGLNSCSALGTLDWGKEMHGVAVKLGLETDAFVGNSLVVMYSDSGNVNDAVSVFIKIFKKSIVSWNSIIVGCAQHGRGKWAFVIFGQMIRLNKEPDEITFTGLLSACSHCGFLEKGRKLFYYMSSGINHIDRKIQHYTCMVDILGRCGKLKEAEELIERMVVKPNEMVWLALLSACRMHSDVDRGEKAAAAIFNLDSKSSAAYVLLSNIYASAGRWSNVSKLRVKMKKNGIMKKPGSSWVVIRGKKHEFFSGDQPHCSRIYEKLEFLREKLKELGYAPDYRSALHDVEDEQKEEMLWYHSERLAIAFGLINTVEGSAVTVMKNLRVCEDCHTVIKLISGVVGREIVLRDPIRFHHFKNGTCSCGDYW

SEQ ID NO: 80502 - DNA, 3747 bp, Arabidopsis thaliana
  misc_feature (1)..(3747): Ceres Seq. ID no. 12656195
  misc_feature: MA Experiment ID: 20000355 Result: Up-regulated in Transcription
  misc_feature: MA Experiment 20000355 PARAMETER Experiment Name: At_Siliques_Sub_P Parameter: Age (day) Value: 21
  misc_feature: MA Experiment 20000355 PARAMETER Experiment Name: At_Siliques_Sub_P Parameter: Organism Value: A. thaliana
  misc_feature: MA Experiment 20000355 PARAMETER Experiment Name: At_Siliques_Sub_P Parameter: Plant Line Value: WS
  misc_feature: MA Experiment 20000355 PARAMETER Experiment Name: At_Siliques_Sub_P Parameter: Tissue Value: Less Than 5mm Siliques vs. Whole Plant
atggcggagaaagcgaagaagaagaaaaatggaggaggaggaaatcagagaatagcgttttacaagcttttcacgtttgcagatcggtacgacatcgttttaatggtcatcgggaccctctccgccatggccaacggcttaactcagccgtttatgtcaatactcatggggcagctcattaacgtttttggtttctctgatcatgatcacgtgtttaaagaagtctccaaggttgctgtgaagtttctttatcttgcagcctacgccggtgttgtgtccttcctgcaggtctcatgctggatggtaactggggagcgtcaatccactagaatccgccgtctatacctaaaaacaattttaagacaagacattggatttttcgatactgagacaaataccggtgaagtcatcggaagaatgtcaggagacaccattcttattcaagattccatgggagaaaaggttgggaaattcacacagctcgtttcgtcattcgttggtggattcacggttgcttttatagttggaatgaaactcacattggctcttcttccgtgcgttcctctgatcgtgggcacaggtggagcaatgacctatatcatgtcaaaaaaggctcaacgtgttcaactggcttacacagaagctggaaacgtagtacaacaagccgttgggtcaattagaacagttgtggctttcactggggagaaacaatcaatgggaaaatatgagaagaagcttgagatagcctacaaatctatggttaaacaagggctatactccggtctaggcattgggataatgatggttgtggtatattgtacttatggttttgcgatttggtacggtgctaggcagataatagagaaaggatatactggaggtcaagtcatgaacgtgattacgtcaatcttgactggaggaatggcgttggggcagacattgccttctcttaactcttttgcggccggaacagctgcagcttacaaaatgtttgagactatcaaaagaaaaccaaagatcgatgcttatgacatgagtggtgaggttttagaagaaattaaaggtgacattgagctaagagacgtgtactttcgatatccggctagacctgacgtgcagatatttgttggattttcgttgactgtaccgaatggcatgaccgtggctttggtgggacagagcggtagcggaaaatcaactgtgatcagtttaattgagaggttctacgatccggaatcaggagaagttttaatagatggaattgacttaaagaaatttcaagtgaaatggatcagaagtaagattggtctcgtaagccaagaacctatactatttgctaccacaattagggagaacattgtttacggcaaaaaagatgcgtccgaccaagaaattagaaccgcacttaagctcgccaacgctagtaacttcatcgacaaacttccgcagggtttggaaacgatggtaggagagcatgggacgcaattatccggtgggcaaaagcagaggattgcgattgcgagggcgattttgaaaaacccaaaaatattgcttcttgatgaagctacaagcgctttggacgcagaatctgaacgcattgttcaagatgctcttgtaaagctaatgttgagcaggaccactgtagtggtggctcaccgacttaccaccattagaaccgctgatatgatcgctgttgtgcagcagggaaaagtcattgagaaaggaactcatgatgagatgattaaagatcccgaaggaacatattcacagctagttcgtctacaagaaggatctaagaaagaagaagcaatagacaaggaaccagaaaagtgtgaaatgagtttggaaatcgaaagttcggatagccaaaatggaatccattccggcactctcacatcaccatctggtttaccgggagtgattagcttggaccagacggaagagttccacgagaatatatcttccaccaaaactcaaacggttaagaaaggcaaggaagtatcattaagaaggcttgctcaccttaacaaaccggagatttcggttttgttgctcggttcattggctgcagtgattcacggtattgtgttccctgttcaaggtttgcttttgtctcgcacaatcaggatattctttgagccttcaaataaactaaagaatgattctcttttctgggctctcatttttgtcgcccttggcttaaccgacctgattgtgattccgttacaaaactacttattcgctatcgctggagcaaaactaatcaaacgtatcagatcgttgtcgtttgatagagtcttgcaccaagatataagttggttcgacgatactaaaaattctagcggtgtgattggagcgaggttgtccacggatgcttctacagtgaagagtatagtaggagatgtgttagggttgatcatgcaaaatatggcgactataattggagcatttattatagcgtttacggctaattggttattagctttaatggcccttttggtggcaccagtaatgttttttcaaggatactaccagatcaagtttataacgggttttggagcaaaagcaagaggaaaatatgaagaggctagccaggttgcgagtgacgcggtgagcagcataagaacagttgcatcgttctgcgcagaggataaagtgatggatttataccaagagaaatgtgacgaaccaaagcaacaaggcttcaaattaggactggtgagtggtttgtgctatggtggctcatacttggctctctatgtcatcgagtccgtatgctttctcggcggttcctggttgattcagaacaggagggcaacgttcggagaattctttcaggttttcttcgcgttaactttgacagccgtaggagtgactcaaactagtactatggcacctgacataaacaaagcaaaagactctgctgcttcgatattcgatatcctcgatagtaaaccgaaaatcgattcgagttccgagaaagggacaatattaccaatcgtccacggcgatatcgagttgcaacatgttagtttccggtatcctatgcgaccggatatacagatttttagtgacttgtgcttaactatctcatctggacagaccgttgcattggttggagaaagcgggagcggtaaatcgacggtgataagcttactagagagattctacgatccggattcaggcaagattcttttagatcaagttgaaattcaatcgttaaaattgagttggttaagggaacaaatgggtttggttagtcaagaaccggttctgttcaatgagacaataggatcaaacatagcatatggtaaaatcggaggagccacagaggaagagattataaccgcggcaaaagcggctaatgtgcataacttcatcagctcattgcctcaaggctacgaaacgtccgttggtgaacgtggagtacaattatccggtggtcaaaaacagaggatcgcgatcgctcgggctattctcaaggatcctaaaattttgttgcttgatgaagcgacaagcgcgttggatgcagagtctgagcgggtggtgcaagatgcgcttgatcaggtgatggtgaacaggaccacggttgtggtggctcacctgctcactaccattaaggacgctgatatgatcgcggttgtgaagaacggtgtgatcgcggagagtgggagacatgaaacgttaatggagatttcaggtggtgcttatgcatcgcttgtagcttttaatatgagtgcaaactga

SEQ ID NO: 80503 - protein, 1248 aa, Arabidopsis thaliana
  peptide (1)..(1248): Ceres Seq. ID no. 12656196
  misc_feature (35)..(313): Pfam Name: ABC transporter transmembrane region Pfam Description: ABC transporter transmembrane region
  misc_feature (3)..(934): Homolog of NCBI NO: 18496818 NR Description: ABC transporter AbcB3 [Dictyostelium discoideum]
  misc_feature (935)..(1240): Homolog of NCBI NO: 18496818 NR Description: ABC transporter AbcB3 [Dictyostelium discoideum]
  misc_feature (22)..(1241): Homolog of NCBI NO: 28071306 NR Description: P0705A05.10 [Oryza sativa (japonica
  misc_feature (489)..(1241): Homolog of NCBI NO: 27368845 NR Description: MDR-like ABC transporter [Oryza sativa (japonica
  misc_feature (20)..(568): Homolog of NCBI NO: 27368845 NR Description: MDR-like ABC transporter [Oryza sativa (japonica
  misc_feature (162)..(936): Homolog of NCBI NO: 18496816 NR Description: ABC transporter AbcB2 [Dictyostelium discoideum]
  misc_feature (911)..(1245): Homolog of NCBI NO: 18496816 NR Description: ABC transporter AbcB2 [Dictyostelium discoideum]
  misc_feature (630)..(1241): Homolog of NCBI NO: 24960750 NR Description: Hypothetical protein [Oryza sativa (japonica
  misc_feature (23)..(307): Homolog of NCBI NO: 24960750 NR Description: Hypothetical protein [Oryza sativa (japonica
  misc_feature (413)..(598): Homolog of NCBI NO: 24960750 NR Description: Hypothetical protein [Oryza sativa (japonica
MAEKAKKKKNGGGGNQRIAFYKLFTFADRYDIVLMVIGTLSAMANGLTQPFMSILMGQLINVFGFSDHDHVFKEVSKVAVKFLYLAAYAGVVSFLQVSCWMVTGERQSTRIRRLYLKTILRQDIGFFDTETNTGEVIGRMSGDTILIQDSMGEKVGKFTQLVSSFVGGFTVAFIVGMKLTLALLPCVPLIVGTGGAMTYIMSKKAQRVQLAYTEAGNVVQQAVGSIRTVVAFTGEKQSMGKYEKKLEIAYKSMVKQGLYSGLGIGIMMVVVYCTYGFAIWYGARQIIEKGYTGGQVMNVITSILTGGMALGQTLPSLNSFAAGTAAAYKMFETIKRKPKIDAYDMSGEVLEEIKGDIELRDVYFRYPARPDVQIFVGFSLTVPNGMTVALVGQSGSGKSTVISLIERFYDPESGEVLIDGIDLKKFQVKWIRSKIGLVSQEPILFATTIRENIVYGKKDASDQEIRTALKLANASNFIDKLPQGLETMVGEHGTQLSGGQKQRIAIARAILKNPKILLLDEATSALDAESERIVQDALVKLMLSRTTVVVAHRLTTIRTADMIAVVQQGKVIEKGTHDEMIKDPEGTYSQLVRLQEGSKKEEAIDKEPEKCEMSLEIESSDSQNGIHSGTLTSPSGLPGVISLDQTEEFHENISSTKTQTVKKGKEVSLRRLAHLNKPEISVLLLGSLAAVIHGIVFPVQGLLLSRTIRIFFEPSNKLKNDSLFWALIFVALGLTDLIVIPLQNYLFAIAGAKLIKRIRSLSFDRVLHQDISWFDDTKNSSGVIGARLSTDASTVKSIVGDVLGLIMQNMATIIGAFIIAFTANWLLALMALLVAPVMFFQGYYQIKFITGFGAKARGKYEEASQVASDAVSSIRTVASFCAEDKVMDLYQEKCDEPKQQGFKLGLVSGLCYGGSYLALYVIESVCFLGGSWLIQNRRATFGEFFQVFFALTLTAVGVTQTSTMAPDINKAKDSAASIFDILDSKPKIDSSSEKGTILPIVHGDIELQHVSFRYPMRPDIQIFSDLCLTISSGQTVALVGESGSGKSTVISLLERFYDPDSGKILLDQVEIQSLKLSWLREQMGLVSQEPVLFNETIGSNIAYGKIGGATEEEIITAAKAANVHNFISSLPQGYETSVGERGVQLSGGQKQRIAIARAILKDPKILLLDEATSALDAESERVVQDALDQVMVNRTTVVVAHLLTTIKDADMIAVVKNGVIAESGRHETLMEISGGAYASLVAFNMSAN

SEQ ID NO: 80504 - protein, 1214 aa, Arabidopsis thaliana
  peptide (1)..(1214): Ceres Seq. ID no. 12656197
  misc_feature (1)..(279): Pfam Name: ABC transporter transmembrane region Pfam Description: ABC transporter transmembrane region
  misc_feature (1)..(900): Homolog of NCBI NO: 18496818 NR Description: ABC transporter AbcB3 [Dictyostelium discoideum]
  misc_feature (901)..(1206): Homolog of NCBI NO: 18496818 NR Description: ABC transporter AbcB3 [Dictyostelium discoideum]
  misc_feature (1)..(1207): Homolog of NCBI NO: 28071306 NR Description: P0705A05.10 [Oryza sativa (japonica
  misc_feature (455)..(1207): Homolog of NCBI NO: 27368845 NR Description: MDR-like ABC transporter [Oryza sativa (japonica
  misc_feature (1)..(534): Homolog of NCBI NO: 27368845 NR Description: MDR-like ABC transporter [Oryza sativa (japonica
  misc_feature (128)..(902): Homolog of NCBI NO: 18496816 NR Description: ABC transporter AbcB2 [Dictyostelium discoideum]
  misc_feature (877)..(1211): Homolog of NCBI NO: 18496816 NR Description: ABC transporter AbcB2 [Dictyostelium discoideum]
  misc_feature (596)..(1207): Homolog of NCBI NO: 24960750 NR Description: Hypothetical protein [Oryza sativa (japonica
  misc_feature (1)..(273): Homolog of NCBI NO: 24960750 NR Description: Hypothetical protein [Oryza sativa (japonica
  misc_feature (379)..(564): Homolog of NCBI NO: 24960750 NR Description: Hypothetical protein [Oryza sativa (japonica
MVIGTLSAMANGLTQPFMSILMGQLINVFGFSDHDHVFKEVSKVAVKFLYLAAYAGVVSFLQVSCWMVTGERQSTRIRRLYLKTILRQDIGFFDTETNTGEVIGRMSGDTILIQDSMGEKVGKFTQLVSSFVGGFTVAFIVGMKLTLALLPCVPLIVGTGGAMTYIMSKKAQRVQLAYTEAGNVVQQAVGSIRTVVAFTGEKQSMGKYEKKLEIAYKSMVKQGLYSGLGIGIMMVVVYCTYGFAIWYGARQIIEKGYTGGQVMNVITSILTGGMALGQTLPSLNSFAAGTAAAYKMFETIKRKPKIDAYDMSGEVLEEIKGDIELRDVYFRYPARPDVQIFVGFSLTVPNGMTVALVGQSGSGKSTVISLIERFYDPESGEVLIDGIDLKKFQVKWIRSKIGLVSQEPILFATTIRENIVYGKKDASDQEIRTALKLANASNFIDKLPQGLETMVGEHGTQLSGGQKQRIAIARAILKNPKILLLDEATSALDAESERIVQDALVKLMLSRTTVVVAHRLTTIRTADMIAVVQQGKVIEKGTHDEMIKDPEGTYSQLVRLQEGSKKEEAIDKEPEKCEMSLEIESSDSQNGIHSGTLTSPSGLPGVISLDQTEEFHENISSTKTQTVKKGKEVSLRRLAHLNKPEISVLLLGSLAAVIHGIVFPVQGLLLSRTIRIFFEPSNKLKNDSLFWALIFVALGLTDLIVIPLQNYLFAIAGAKLIKRIRSLSFDRVLHQDISWFDDTKNSSGVIGARLSTDASTVKSIVGDVLGLIMQNMATIIGAFIIAFTANWLLALMALLVAPVMFFQGYYQIKFITGFGAKARGKYEEASQVASDAVSSIRTVASFCAEDKVMDLYQEKCDEPKQQGFKLGLVSGLCYGGSYLALYVIESVCFLGGSWLIQNRRATFGEFFQVFFALTLTAVGVTQTSTMAPDINKAKDSAASIFDILDSKPKIDSSSEKGTILPIVHGDIELQHVSFRYPMRPDIQIFSDLCLTISSGQTVALVGESGSGKSTVISLLERFYDPDSGKILLDQVEIQSLKLSWLREQMGLVSQEPVLFNETIGSNIAYGKIGGATEEEIITAAKAANVHNFISSLPQGYETSVGERGVQLSGGQKQRIAIARAILKDPKILLLDEATSALDAESERVVQDALDQVMVNRTTVVVAHLLTTIKDADMIAVVKNGVIAESGRHETLMEISGGAYASLVAFNMSAN

SEQ ID NO: 80505 - protein, 1206 aa, Arabidopsis thaliana
  peptide (1)..(1206): Ceres Seq. ID no. 12656198
  misc_feature (1)..(271): Pfam Name: ABC transporter transmembrane region Pfam Description: ABC transporter transmembrane region
  misc_feature (1)..(892): Homolog of NCBI NO: 18496818 NR Description: ABC transporter AbcB3 [Dictyostelium discoideum]
  misc_feature (893)..(1198): Homolog of NCBI NO: 18496818 NR Description: ABC transporter AbcB3 [Dictyostelium discoideum]
  misc_feature (1)..(1199): Homolog of NCBI NO: 28071306 NR Description: P0705A05.10 [Oryza sativa (japonica
  misc_feature (447)..(1199): Homolog of NCBI NO: 27368845 NR Description: MDR-like ABC transporter [Oryza sativa (japonica
  misc_feature (1)..(526): Homolog of NCBI NO: 27368845 NR Description: MDR-like ABC transporter [Oryza sativa (japonica
  misc_feature (120)..(894): Homolog of NCBI NO: 18496816 NR Description: ABC transporter AbcB2 [Dictyostelium discoideum]
  misc_feature (869)..(1203): Homolog of NCBI NO: 18496816 NR Description: ABC transporter AbcB2 [Dictyostelium discoideum]
  misc_feature (588)..(1199): Homolog of NCBI NO: 24960750 NR Description: Hypothetical protein [Oryza sativa (japonica
  misc_feature (1)..(265): Homolog of NCBI NO: 24960750 NR Description: Hypothetical protein [Oryza sativa (japonica
  misc_feature (371)..(556): Homolog of NCBI NO: 24960750 NR Description: Hypothetical protein [Oryza sativa (japonica
MANGLTQPFMSILMGQLINVFGFSDHDHVFKEVSKVAVKFLYLAAYAGVVSFLQVSCWMVTGERQSTRIRRLYLKTILRQDIGFFDTETNTGEVIGRMSGDTILIQDSMGEKVGKFTQLVSSFVGGFTVAFIVGMKLTLALLPCVPLIVGTGGAMTYIMSKKAQRVQLAYTEAGNVVQQAVGSIRTVVAFTGEKQSMGKYEKKLEIAYKSMVKQGLYSGLGIGIMMVVVYCTYGFAIWYGARQIIEKGYTGGQVMNVITSILTGGMALGQTLPSLNSFAAGTAAAYKMFETIKRKPKIDAYDMSGEVLEEIKGDIELRDVYFRYPARPDVQIFVGFSLTVPNGMTVALVGQSGSGKSTVISLIERFYDPESGEVLIDGIDLKKFQVKWIRSKIGLVSQEPILFATTIRENIVYGKKDASDQEIRTALKLANASNFIDKLPQGLETMVGEHGTQLSGGQKQRIAIARAILKNPKILLLDEATSALDAESERIVQDALVKLMLSRTTVVVAHRLTTIRTADMIAVVQQGKVIEKGTHDEMIKDPEGTYSQLVRLQEGSKKEEAIDKEPEKCEMSLEIESSDSQNGIHSGTLTSPSGLPGVISLDQTEEFHENISSTKTQTVKKGKEVSLRRLAHLNKPEISVLLLGSLAAVIHGIVFPVQGLLLSRTIRIFFEPSNKLKNDSLFWALIFVALGLTDLIVIPLQNYLFAIAGAKLIKRIRSLSFDRVLHQDISWFDDTKNSSGVIGARLSTDASTVKSIVGDVLGLIMQNMATIIGAFIIAFTANWLLALMALLVAPVMFFQGYYQIKFITGFGAKARGKYEEASQVASDAVSSIRTVASFCAEDKVMDLYQEKCDEPKQQGFKLGLVSGLCYGGSYLALYVIESVCFLGGSWLIQNRRATFGEFFQVFFALTLTAVGVTQTSTMAPDINKAKDSAASIFDILDSKPKIDSSSEKGTILPIVHGDIELQHVSFRYPMRPDIQIFSDLCLTISSGQTVALVGESGSGKSTVISLLERFYDPDSGKILLDQVEIQSLKLSWLREQMGLVSQEPVLFNETIGSNIAYGKIGGATEEEIITAAKAANVHNFISSLPQGYETSVGERGVQLSGGQKQRIAIARAILKDPKILLLDEATSALDAESERVVQDALDQVMVNRTTVVVAHLLTTIKDADMIAVVKNGVIAESGRHETLMEISGGAYASLVAFNMSAN

SEQ ID NO: 80506 - DNA, 1521 bp, Arabidopsis thaliana
  misc_feature (1)..(1521): Ceres Seq. ID no. 12656199
  misc_feature: MA Experiment ID: 20000180 Result: Down-regulated in Transcription
  misc_feature: MA Experiment 20000180 PARAMETER Experiment Name: At_Germinating_Seeds_P Parameter: Age (hr) Value: 24 vs. 0
  misc_feature: MA Experiment 20000180 PARAMETER Experiment Name: At_Germinating_Seeds_P Parameter: Tissue Value: Germinating Seeds
  misc_feature: MA Experiment ID: 20000184 Result: Down-regulated in Transcription
  misc_feature: MA Experiment 20000184 PARAMETER Experiment Name: At_Shoots__P Parameter: Age (day) Value: 7
  misc_feature: MA Experiment 20000184 PARAMETER Experiment Name: At_Shoots__P Parameter: Tissue Value: Shoots vs. Whole Plant
  misc_feature: MA Experiment ID: 20000227 Result: Down-regulated in Transcription
  misc_feature: MA Experiment 20000227 PARAMETER Experiment Name: At_Root-Tips-vs-Tops_P Parameter: Tissue Value: Root Tips vs. Root Tops
atgtttgcttacaggtttttatttgttcttgtaagaatggttgcgatacccaatattaagataaagtttggtcctcaaggttctgtcagaacattccaaacgttgtctgatagttcgaagaaaattgagcatgtagtgactgaagatttatctcaatcctcggagaaatcaaagaagcgtggtgggcctaaagagctagatgaagttcaacctaagaagaagcagaggctggattgtgattggtctagtcaatgtttggcattgttacgttttttgatggagcaccgtggtggatggctctttaaggagcctgttgatcctgttaaaatggagattcctgattacttcaatgtcatacaaaagccaatggatttaggcactgtcaaatcgaaacttttgaagaatgtctacagtaatgctgatgagtttgcagcggatgttcggttaacttttgccaatgcgatgcattataatcctctgtggaatgaggttcacacgattgcaaaggagattaatgagatttttgaggttagatgggaatcactcatgaagaaaaaggttttgaggttatcctggaatgaagttagagaaggttataagagacagccagttgaacgtgattgttctagacggagcagcactggaacatcagcttcctctggggtgggattgacgaaaccagctaaagagaactccgaaaagggttctctttcgtccaagccagtgaaagtgcagagcaaaaagaatactcctgctgtgacgcctaaagcattagcaacctgtaaatgtggtaggataatttgcatatgcctcaagtcctgtagctcatttggaagtgacgtttgttcgttaacggattgtcaattaaagaacatttcaggtgcacaagcgagcgagttagatcctcaatctaatgggtctgacacttcaaagaaggagagaaatggtagtctcaagtctcagcttgataaaccttcaaacagtgatctgttgggtaatgagttgaaaacggcttttcctgctctgccgccggtacctcctgagaaagctcttcgtgctgcaatactcaaagctcaatatgcaggaaccatcataaaagctaaacacagaatagtccttggccagaataacaaagctgatctgattagaatacagatagaaaaggaacagatggaaagagcacaacgtgaagagaaagctagaattgaagccgagatgagagctgctaaggttgctgaacgaatgagggcacaagacgagttgaaacagaaacgtgagagtcaacggcttgaaatagcaaagatgaaaaaaggcttcgattttgaacggaacaaccactcgaaattgaagaaaaaattcgttaaagtctgtggctgctttagtctgacaaaagctcggttgttacttgaagagttgggtctggttttgaaaaatgattattgtccggaactggaagtgatcgggtcagaaaaatttgatgcaatgagaatggacgatcttgaggaaggagagatcctttag

SEQ ID NO: 80507 - protein, 506 aa, Arabidopsis thaliana
  peptide (1)..(506): Ceres Seq. ID no. 12656200
  misc_feature (81)..(170): Pfam Name: Bromodomain Pfam Description: Bromodomain
  misc_feature (1)..(506): Homolog of NCBI NO: 8885596 NR Description: contains similarity to kinase~gene_id:F10E10.2
  misc_feature (13)..(506): Homolog of NCBI NO: 30694987 NR Description: DNA-binding protein family [Arabidopsis thaliana]
  misc_feature (270)..(448): Homolog of NCBI NO: 11358472 NR Description: kinase-like protein - Arabidopsis thaliana
  misc_feature (84)..(185): Homolog of NCBI NO: 11358472 NR Description: kinase-like protein - Arabidopsis thaliana
  misc_feature (309)..(444): Homolog of NCBI NO: 6016737 NR Description: hypothetical protein [Arabidopsis thaliana]
  misc_feature (84)..(185): Homolog of NCBI NO: 6016737 NR Description: hypothetical protein [Arabidopsis thaliana]
  misc_feature (332)..(444): Homolog of NCBI NO: 18395937 NR Description: expressed protein; protein id: At3g01770.1, by cDNA: gi_16323116, supported by cDNA: gi_20466525 [Arabidopsis >gi|16323117|gb|AAL15293.1| AT3g01770/F28J7_10 [Arabidopsis
  misc_feature (84)..(185): Homolog of NCBI NO: 18395937 NR Description: expressed protein; protein id: At3g01770.1, by cDNA: gi_16323116, supported by cDNA: gi_20466525 [Arabidopsis >gi|16323117|gb|AAL15293.1| AT3g01770/F28J7_10 [Arabidopsis
  misc_feature (294)..(434): Homolog of NCBI NO: 18417335 NR Description: kinase - like protein; protein id: At5g14270.1, by cDNA: gi_16604680 [Arabidopsis thaliana]
  misc_feature (84)..(185): Homolog of NCBI NO: 18417335 NR Description: kinase - like protein; protein id: At5g14270.1, by cDNA: gi_16604680 [Arabidopsis thaliana]
MFAYRFLFVLVRMVAIPNIKIKFGPQGSVRTFQTLSDSSKKIEHVVTEDLSQSSEKSKKRGGPKELDEVQPKKKQRLDCDWSSQCLALLRFLMEHRGGWLFKEPVDPVKMEIPDYFNVIQKPMDLGTVKSKLLKNVYSNADEFAADVRLTFANAMHYNPLWNEVHTIAKEINEIFEVRWESLMKKKVLRLSWNEVREGYKRQPVERDCSRRSSTGTSASSGVGLTKPAKENSEKGSLSSKPVKVQSKKNTPAVTPKALATCKCGRIICICLKSCSSFGSDVCSLTDCQLKNISGAQASELDPQSNGSDTSKKERNGSLKSQLDKPSNSDLLGNELKTAFPALPPVPPEKALRAAILKAQYAGTIIKAKHRIVLGQNNKADLIRIQIEKEQMERAQREEKARIEAEMRAAKVAERMRAQDELKQKRESQRLEIAKMKKGFDFERNNHSKLKKKFVKVCGCFSLTKARLLLEELGLVLKNDYCPELEVIGSEKFDAMRMDDLEEGEIL

SEQ ID NO: 80508 - protein, 494 aa, Arabidopsis thaliana; identical to SEQ ID NO: 79182
  peptide (1)..(494): Ceres Seq. ID no. 12656201
  misc_feature (69)..(158): Pfam Name: Bromodomain Pfam Description: Bromodomain
  misc_feature (1)..(494): Homolog of NCBI NO: 8885596 NR Description: contains similarity to kinase~gene_id:F10E10.2
  misc_feature (1)..(494): Homolog of NCBI NO: 30694987 NR Description: DNA-binding protein family [Arabidopsis thaliana]
  misc_feature (258)..(436): Homolog of NCBI NO: 11358472 NR Description: kinase-like protein - Arabidopsis thaliana
  misc_feature (72)..(173): Homolog of NCBI NO: 11358472 NR Description: kinase-like protein - Arabidopsis thaliana
  misc_feature (297)..(432): Homolog of NCBI NO: 6016737 NR Description: hypothetical protein [Arabidopsis thaliana]
  misc_feature (72)..(173): Homolog of NCBI NO: 6016737 NR Description: hypothetical protein [Arabidopsis thaliana]
  misc_feature (320)..(432): Homolog of NCBI NO: 18395937 NR Description: expressed protein; protein id: At3g01770.1, by cDNA: gi_16323116, supported by cDNA: gi_20466525 [Arabidopsis >gi|16323117|gb|AAL15293.1| AT3g01770/F28J7_10 [Arabidopsis
  misc_feature (72)..(173): Homolog of NCBI NO: 18395937 NR Description: expressed protein; protein id: At3g01770.1, by cDNA: gi_16323116, supported by cDNA: gi_20466525 [Arabidopsis >gi|16323117|gb|AAL15293.1| AT3g01770/F28J7_10 [Arabidopsis
  misc_feature (282)..(422): Homolog of NCBI NO: 18417335 NR Description: kinase - like protein; protein id: At5g14270.1, by cDNA: gi_16604680 [Arabidopsis thaliana]
  misc_feature (72)..(173): Homolog of NCBI NO: 18417335 NR Description: kinase - like protein; protein id: At5g14270.1, by cDNA: gi_16604680 [Arabidopsis thaliana]

SEQ ID NO: 80509 - protein, 414 aa, Arabidopsis thaliana; identical to SEQ ID NO: 79183
  peptide (1)..(414): Ceres Seq. ID no. 12656202
  misc_feature (1)..(78): Pfam Name: Bromodomain Pfam Description: Bromodomain
  misc_feature (1)..(414): Homolog of NCBI NO: 8885596 NR Description: contains similarity to kinase~gene_id:F10E10.2
  misc_feature (1)..(414): Homolog of NCBI NO: 30694987 NR Description: DNA-binding protein family [Arabidopsis thaliana]
  misc_feature (178)..(356): Homolog of NCBI NO: 11358472 NR Description: kinase-like protein - Arabidopsis thaliana
  misc_feature (1)..(93): Homolog of NCBI NO: 11358472 NR Description: kinase-like protein - Arabidopsis thaliana
  misc_feature (217)..(352): Homolog of NCBI NO: 6016737 NR Description: hypothetical protein [Arabidopsis thaliana]
  misc_feature (1)..(93): Homolog of NCBI NO: 6016737 NR Description: hypothetical protein [Arabidopsis thaliana]
  misc_feature (240)..(352): Homolog of NCBI NO: 18395937 NR Description: expressed protein; protein id: At3g01770.1, by cDNA: gi_16323116, supported by cDNA: gi_20466525 [Arabidopsis >gi|16323117|gb|AAL15293.1| AT3g01770/F28J7_10 [Arabidopsis
  misc_feature (1)..(93): Homolog of NCBI NO: 18395937 NR Description: expressed protein; protein id: At3g01770.1, by cDNA: gi_16323116, supported by cDNA: gi_20466525 [Arabidopsis >gi|16323117|gb|AAL15293.1| AT3g01770/F28J7_10 [Arabidopsis
  misc_feature (202)..(342): Homolog of NCBI NO: 18417335 NR Description: kinase - like protein; protein id: At5g14270.1, by cDNA: gi_16604680 [Arabidopsis thaliana]
  misc_feature (1)..(93): Homolog of NCBI NO: 18417335 NR Description: kinase - like protein; protein id: At5g14270.1, by cDNA: gi_16604680 [Arabidopsis thaliana]

SEQ ID NO: 80510 - DNA, 879 bp, Arabidopsis thaliana
  misc_feature (1)..(879): Ceres Seq. ID no. 12656206
  misc_feature: MA Experiment ID: 20000315 Result: Down-regulated in Transcription
  misc_feature: MA Experiment 20000315 PARAMETER Experiment Name: At_14day_Shoots-Roots_Sub_P Parameter: Age (day) Value: 14
  misc_feature: MA Experiment 20000315 PARAMETER Experiment Name: At_14day_Shoots-Roots_Sub_P Parameter: Organism Value: A. thaliana
  misc_feature: MA Experiment 20000315 PARAMETER Experiment Name: At_14day_Shoots-Roots_Sub_P Parameter: Plant Line Value: WS
  misc_feature: MA Experiment 20000315 PARAMETER Experiment Name: At_14day_Shoots-Roots_Sub_P Parameter: Tissue Value: Shoots vs. Whole Plant
  misc_feature: MA Experiment ID: 20000355 Result: Down-regulated in Transcription
  misc_feature: MA Experiment 20000355 PARAMETER Experiment Name: At_Siliques_Sub_P Parameter: Age (day) Value: 21
  misc_feature: MA Experiment 20000355 PARAMETER Experiment Name: At_Siliques_Sub_P Parameter: Organism Value: A. thaliana
  misc_feature: MA Experiment 20000355 PARAMETER Experiment Name: At_Siliques_Sub_P Parameter: Plant Line Value: WS
  misc_feature: MA Experiment 20000355 PARAMETER Experiment Name: At_Siliques_Sub_P Parameter: Tissue Value: Less Than 5mm Siliques vs. Whole Plant
atgggaagttcatgtttacctccagggttccggtttcatcctacggatgaagaactcatcgaatattacttgaaaagaaaagtcgaaggtctcgagattgagcttgaagtcattcccgtcatcgatctttatagtttcgatccttgggagttaccagacaagtcgtttctcccaaaccgggacatggaatggtacttcttctgctcaagggacaaaaaatatcctaatggttttcgtacaaatcgaggaacaaaggctggttattggaaagcaaccggaaaagatcgaaaaattacttctcgttcatcttctataattggttatagaaaaactctagttttctacaaaggccgtgccccgttaggcgatagaagcaattggatcatgcatgaatatcgactatgcgatgatgatacatcacaaggatcacaaaatttaaagggagcttttgtgttatgtcgtgttgctatgaagaatgagatcaaaactaatacgaaaatccgaaaaattccaagcgagcaaacaatcggatcaggagaaagctcgggtttatcaagccgagtaacgtctcctagtcgcgatgaaacaatgccgtttcactcatttgccaatcctgtatctactgaaactgattcttccaacatttggatttcacctgaattcatcctcgattcttcaaaggactatcctcaaatccaagatgtcgcatctcagtgcttccaacaagactttgattttccgatcatcggtaaccaaaacatggagtttccagcgagtacaagcttagatcagaacatggatgagtttatgcaaaacggttattggacaaattatggatacgatcaaaccggtttattcggttactcagatttctcctag

SEQ ID NO: 80511 - protein, 292 aa, Arabidopsis thaliana
  peptide (1)..(292): Ceres Seq. ID no. 12656207
  misc_feature (6)..(135): Pfam Name: No apical meristem (NAM) protein Pfam Description: No apical meristem (NAM) protein
  misc_feature (1)..(292): Homolog of NCBI NO: 15237469 NR Description: NAM-like; protein id: At5g46590.1 [Arabidopsis
  misc_feature (1)..(262): Homolog of NCBI NO: 15236721 NR Description: NAM (no apical meristem) - like protein; protein At4g17980.1 [Arabidopsis thaliana] >gi|7487769|pir||T05084
  misc_feature (1)..(219): Homolog of NCBI NO: 21105751 NR Description: nam-like protein 11 [Petunia x hybrida]
  misc_feature (1)..(278): Homolog of NCBI NO: 25352294 NR Description: hypothetical protein F5D14.30 [imported] - thaliana >gi|8920628|gb|AAF81350.1|AC007767_30 Contains to a hypothetical protein T6K21.160 gi|7487769 from Arabidopsis
  misc_feature (16)..(278): Homolog of NCBI NO: 15223225 NR Description: unknown protein; protein id: At1g32510.1
  misc_feature (6)..(222): Homolog of NCBI NO: 37537036 NR Description: putative NAM (no apical meristem) protein [Oryza
  misc_feature (6)..(228): Homolog of NCBI NO: 15229511 NR Description: hypothetical protein; protein id: At3g17730.1 thaliana] >gi|9294586|dbj|BAB02867.1| contains similarity to NAM
  misc_feature (1)..(247): Homolog of NCBI NO: 15218843 NR Description: jasmonic acid, putative; protein id: At1g65910.1
  misc_feature (1)..(212): Homolog of NCBI NO: 34902214 NR Description: Hypothetical protein [Oryza sativa (japonica group)] >gi|27452910|gb|AAO15294.1| Hypothetical protein [Oryza
  misc_feature (6)..(159): Homolog of NCBI NO: 15221787 NR Description: NAM protein, putative; protein id: At1g54330.1
MGSSCLPPGFRFHPTDEELIEYYLKRKVEGLEIELEVIPVIDLYSFDPWELPDKSFLPNRDMEWYFFCSRDKKYPNGFRTNRGTKAGYWKATGKDRKITSRSSSIIGYRKTLVFYKGRAPLGDRSNWIMHEYRLCDDDTSQGSQNLKGAFVLCRVAMKNEIKTNTKIRKIPSEQTIGSGESSGLSSRVTSPSRDETMPFHSFANPVSTETDSSNIWISPEFILDSSKDYPQIQDVASQCFQQDFDFPIIGNQNMEFPASTSLDQNMDEFMQNGYWTNYGYDQTGLFGYSDFS

SEQ ID NO: 80512 - protein, 231 aa, Arabidopsis thaliana
  peptide (1)..(231): Ceres Seq. ID no. 12656208
  misc_feature (1)..(74): Pfam Name: No apical meristem (NAM) protein Pfam Description: No apical meristem (NAM) protein
  misc_feature (1)..(231): Homolog of NCBI NO: 15237469 NR Description: NAM-like; protein id: At5g46590.1 [Arabidopsis
  misc_feature (1)..(201): Homolog of NCBI NO: 15236721 NR Description: NAM (no apical meristem) - like protein; protein At4g17980.1 [Arabidopsis thaliana] >gi|7487769|pir||T05084
  misc_feature (1)..(158): Homolog of NCBI NO: 21105751 NR Description: nam-like protein 11 [Petunia x hybrida]
  misc_feature (1)..(217): Homolog of NCBI NO: 25352294 NR Description: hypothetical protein F5D14.30 [imported] - thaliana >gi|8920628|gb|AAF81350.1|AC007767_30 Contains to a hypothetical protein T6K21.160 gi|7487769 from Arabidopsis
  misc_feature (1)..(217): Homolog of NCBI NO: 15223225 NR Description: unknown protein; protein id: At1g32510.1
  misc_feature (1)..(161): Homolog of NCBI NO: 37537036 NR Description: putative NAM (no apical meristem) protein [Oryza
  misc_feature (1)..(167): Homolog of NCBI NO: 15229511 NR Description: hypothetical protein; protein id: At3g17730.1 thaliana] >gi|9294586|dbj|BAB02867.1| contains similarity to NAM
  misc_feature (1)..(186): Homolog of NCBI NO: 15218843 NR Description: jasmonic acid, putative; protein id: At1g65910.1
  misc_feature (1)..(151): Homolog of NCBI NO: 34902214 NR Description: Hypothetical protein [Oryza sativa (japonica group)] >gi|27452910|gb|AAO15294.1| Hypothetical protein [Oryza
  misc_feature (1)..(98): Homolog of NCBI NO: 15221787 NR Description: NAM protein, putative; protein id: At1g54330.1
MEWYFFCSRDKKYPNGFRTNRGTKAGYWKATGKDRKITSRSSSIIGYRKTLVFYKGRAPLGDRSNWIMHEYRLCDDDTSQGSQNLKGAFVLCRVAMKNEIKTNTKIRKIPSEQTIGSGESSGLSSRVTSPSRDETMPFHSFANPVSTETDSSNIWISPEFILDSSKDYPQIQDVASQCFQQDFDFPIIGNQNMEFPASTSLDQNMDEFMQNGYWTNYGYDQTGLFGYSDFS

SEQ ID NO: 80513 - protein, 164 aa, Arabidopsis thaliana
  peptide (1)..(164): Ceres Seq. ID no. 12656209
  misc_feature (1)..(164): Homolog of NCBI NO: 15237469 NR Description: NAM-like; protein id: At5g46590.1 [Arabidopsis
  misc_feature (1)..(134): Homolog of NCBI NO: 15236721 NR Description: NAM (no apical meristem) - like protein; protein At4g17980.1 [Arabidopsis thaliana] >gi|7487769|pir||T05084
  misc_feature (1)..(91): Homolog of NCBI NO: 21105751 NR Description: nam-like protein 11 [Petunia x hybrida]
  misc_feature (1)..(150): Homolog of NCBI NO: 25352294 NR Description: hypothetical protein F5D14.30 [imported] - thaliana >gi|8920628|gb|AAF81350.1|AC007767_30 Contains to a hypothetical protein T6K21.160 gi|7487769 from Arabidopsis
  misc_feature (1)..(150): Homolog of NCBI NO: 15223225 NR Description: unknown protein; protein id: At1g32510.1
  misc_feature (1)..(94): Homolog of NCBI NO: 37537036 NR Description: putative NAM (no apical meristem) protein [Oryza
  misc_feature (1)..(100): Homolog of NCBI NO: 15229511 NR Description: hypothetical protein; protein id: At3g17730.1 thaliana] >gi|9294586|dbj|BAB02867.1| contains similarity to NAM
  misc_feature (1)..(119): Homolog of NCBI NO: 15218843 NR Description: jasmonic acid, putative; protein id: At1g65910.1
  misc_feature (1)..(84): Homolog of NCBI NO: 34902214 NR Description: Hypothetical protein [Oryza sativa (japonica group)] >gi|27452910|gb|AAO15294.1| Hypothetical protein [Oryza
  misc_feature (1)..(31): Homolog of NCBI NO: 15221787 NR Description: NAM protein, putative; protein id: At1g54330.1
MHEYRLCDDDTSQGSQNLKGAFVLCRVAMKNEIKTNTKIRKIPSEQTIGSGESSGLSSRVTSPSRDETMPFHSFANPVSTETDSSNIWISPEFILDSSKDYPQIQDVASQCFQQDFDFPIIGNQNMEFPASTSLDQNMDEFMQNGYWTNYGYDQTGLFGYSDFS

SEQ ID NO: 80514 - DNA, 812 bp, Arabidopsis thaliana
  misc_feature (1)..(812): Ceres Seq. ID no. 12656224
  misc_feature: MA Experiment ID: 20000166 Result: Down-regulated in Transcription
  misc_feature: MA Experiment 20000166 PARAMETER Experiment Name: At_100uM_ABA_P Parameter: Age (day) Value: 14
  misc_feature: MA Experiment 20000166 PARAMETER Experiment Name: At_100uM_ABA_P Parameter: Organism Value: A. thaliana
  misc_feature: MA Experiment 20000166 PARAMETER Experiment Name: At_100uM_ABA_P Parameter: Plant Line Value: WS
  misc_feature: MA Experiment 20000166 PARAMETER Experiment Name: At_100uM_ABA_P Parameter: Timepoint (hr) Value: 1
  misc_feature: MA Experiment 20000166 PARAMETER Experiment Name: At_100uM_ABA_P Parameter: Tissue Value: Aerial
  misc_feature: MA Experiment 20000166 PARAMETER Experiment Name: At_100uM_ABA_P Parameter: Treatment Value: 100uM ABA vs. No Treatment
  misc_feature: MA Experiment ID: 20000171 Result: Down-regulated in Transcription
  misc_feature: MA Experiment 20000171 PARAMETER Experiment Name: At_42deg_Heat_P Parameter: Age (day) Value: 14
  misc_feature: MA Experiment 20000171 PARAMETER Experiment Name: At_42deg_Heat_P Parameter: Organism Value: A. thaliana
  misc_feature: MA Experiment 20000171 PARAMETER Experiment Name: At_42deg_Heat_P Parameter: Plant Line Value: WS
  misc_feature: MA Experiment 20000171 PARAMETER Experiment Name: At_42deg_Heat_P Parameter: Temperature (deg C) Value: 42 vs. 22
  misc_feature: MA Experiment 20000171 PARAMETER Experiment Name: At_42deg_Heat_P Parameter: Timepoint (hr) Value: 1
  misc_feature: MA Experiment 20000171 PARAMETER Experiment Name: At_42deg_Heat_P Parameter: Tissue Value: Aerial
  misc_feature: MA Experiment ID: 20000179 Result: Up-regulated in Transcription
  misc_feature: MA Experiment 20000179 PARAMETER Experiment Name: At_Germinating_Seeds_P Parameter: Age (hr) Value: 6 vs. 0
  misc_feature: MA Experiment 20000179 PARAMETER Experiment Name: At_Germinating_Seeds_P Parameter: Tissue Value: Germinating Seeds
  misc_feature: MA Experiment ID: 20000180 Result: Up-regulated in Transcription
  misc_feature: MA Experiment 20000180 PARAMETER Experiment Name: At_Germinating_Seeds_P Parameter: Age (hr) Value: 24 vs. 0
  misc_feature: MA Experiment 20000180 PARAMETER Experiment Name: At_Germinating_Seeds_P Parameter: Tissue Value: Germinating Seeds
  misc_feature: MA Experiment ID: 20000185 Result: Up-regulated in Transcription
  misc_feature: MA Experiment 20000185 PARAMETER Experiment Name: At_Roots__P Parameter: Age (day) Value: 7 vs. 21
  misc_feature: MA Experiment 20000185 PARAMETER Experiment Name: At_Roots__P Parameter: Organism Value: A. thaliana
  misc_feature: MA Experiment 20000185 PARAMETER Experiment Name: At_Roots__P Parameter: Tissue Value: Roots vs. Whole Plant
  misc_feature: MA Experiment ID: 20000286 Result: Down-regulated in Transcription
  misc_feature: MA Experiment 20000286 PARAMETER Experiment Name: At_Open_Flower_P Parameter: Age (day) Value: 21
  misc_feature: MA Experiment 20000286 PARAMETER Experiment Name: At_Open_Flower_P Parameter: Plant Line Value: WS
  misc_feature: MA Experiment 20000286 PARAMETER Experiment Name: At_Open_Flower_P Parameter: Tissue Value: Half Open vs. Whole Plant
  misc_feature: MA Experiment ID: 20000437 Result: Down-regulated in Transcription
  misc_feature: MA Experiment 20000437 PARAMETER Experiment Name: At_Drought_P Parameter: Age (day) Value: 8
  misc_feature: MA Experiment 20000437 PARAMETER Experiment Name: At_Drought_P Parameter: Organism Value: A. thaliana
  misc_feature: MA Experiment 20000437 PARAMETER Experiment Name: At_Drought_P Parameter: Plant Line Value: WS
  misc_feature: MA Experiment 20000437 PARAMETER Experiment Name: At_Drought_P Parameter: Timepoint (hr) Value: 24
  misc_feature: MA Experiment 20000437 PARAMETER Experiment Name: At_Drought_P Parameter: Tissue Value: Whole Plant
  misc_feature: MA Experiment 20000437 PARAMETER Experiment Name: At_Drought_P Parameter: Treatment Value: Drought vs. No Drought
  misc_feature: MA Experiment ID: 20000495 Result: Down-regulated in Transcription
  misc_feature: MA Experiment 20000495 PARAMETER Experiment Name: At_Guard_Cells_P Parameter: Harvest Date Value: 8/2/2002
  misc_feature: MA Experiment 20000495 PARAMETER Experiment Name: At_Guard_Cells_P Parameter: Organism Value: A. thaliana
  misc_feature: MA Experiment 20000495 PARAMETER Experiment Name: At_Guard_Cells_P Parameter: Tissue Value: Guard Cells vs. Leaves
  misc_feature: MA Experiment ID: 20001248 Result: Down-regulated in Transcription
  misc_feature: MA Experiment 20001248 PARAMETER Experiment Name: At_Far-red-induction_P Parameter: Age (day) Value: 7
  misc_feature: MA Experiment 20001248 PARAMETER Experiment Name: At_Far-red-induction_P Parameter: Light Value: Far-red vs. White
  misc_feature: MA Experiment 20001248 PARAMETER Experiment Name: At_Far-red-induction_P Parameter: Organism Value: A. thaliana
  misc_feature: MA Experiment 20001248 PARAMETER Experiment Name: At_Far-red-induction_P Parameter: Plant Line Value: Columbia
  misc_feature: MA Experiment 20001248 PARAMETER Experiment Name: At_Far-red-induction_P Parameter: Timepoint (hr) Value: 4
  misc_feature: MA Experiment 20001248 PARAMETER Experiment Name: At_Far-red-induction_P Parameter: Tissue Value: Whole Plant
  misc_feature: MA Experiment ID: 20001556 Result: Down-regulated in Transcription
  misc_feature: MA Experiment 20001556 PARAMETER Experiment Name: At_Drought_Soil_Dry_P Parameter: Age (day) Value: 26
  misc_feature: MA Experiment 20001556 PARAMETER Experiment Name: At_Drought_Soil_Dry_P Parameter: Organism Value: A. thaliana
  misc_feature: MA Experiment 20001556 PARAMETER Experiment Name: At_Drought_Soil_Dry_P Parameter: Plant Line Value: WS
  misc_feature: MA Experiment 20001556 PARAMETER Experiment Name: At_Drought_Soil_Dry_P Parameter: Post Timepoint (hr) Value: None
  misc_feature: MA Experiment 20001556 PARAMETER Experiment Name: At_Drought_Soil_Dry_P Parameter: Post-Treatment Value: None
  misc_feature: MA Experiment 20001556 PARAMETER Experiment Name: At_Drought_Soil_Dry_P Parameter: Timepoint (day) Value: 12
  misc_feature: MA Experiment 20001556 PARAMETER Experiment Name: At_Drought_Soil_Dry_P Parameter: Treatment Value: Drought vs. No Drought
aaacaatatcaatggcgaattcagagtcctcctcctcaccagtaaacgaagaagagaacagccagagaatctcaacactccatcaccaaaccatgccttccgatttaactcaagacgaattcacccaactctcccaatcaatcgccgagttccacacgtaccaactcggtaacggccgttgctcatctctcctagctcagcgaatccacgcgccgccggaaacagtatggtccgtggtgagacgtttcgataggccacagatttacaaacacttcatcaaaagctgtaacgtgagtgaagatttcgagatgcgagtgggatgcacgcgcgacgtgaacgtgataagtggattaccggcgaatacgtctcgagagagattagatctgttggacgatgatcggagagtgactgggtttagtataaccggtggtgaacataggctgaggaattataaatcggttacgacggttcatagatttgagaaagaagaagaagaagaaaggatctggaccgttgttttggaatcttatgttgttgatgtaccggaaggtaattcggaggaagatacgagattgtttgctgatacggttattagattgaatcttcagaaacttgcttcgatcactgaagctatgaaccggaacaacaacaacaacaactcttctcaggttaggtaatgatgaaatttgggggaaagaaaaatgtttctaaattgggggagttttaatttttattttgatttgtaaaacgttttttttcttctcttgaattgtaatttccttgtttgattttatggttatgttttatttttt

SEQ ID NO: 80515 - protein, 224 aa, Arabidopsis thaliana
  peptide (1)..(224): Ceres Seq. ID no. 12656225
  misc_feature (60)..(204): Pfam Name: Pathogenesis-related protein Bet v I family Pfam Description: Pathogenesis-related protein Bet v I family
  misc_feature (4)..(224): Homolog of NCBI NO: 22327625 NR Description: putative protein; protein id: At5g46790.1, by cDNA: gi_17380841 [Arabidopsis thaliana] unknown protein [Arabidopsis thaliana]
  misc_feature (31)..(224): Homolog of NCBI NO: 9758515 NR Description: gene_id:MZA15.21~pir||T05073~similar to unknown
  misc_feature (31)..(223): Homolog of NCBI NO: 15236689 NR Description: putative protein; protein id: At4g17870.1, by cDNA: gi_14596204, supported by cDNA: gi_20148394 [Arabidopsis
  misc_feature (35)..(214): Homolog of NCBI NO: 37537066 NR Description: unknown protein [Oryza sativa (japonica
  misc_feature (35)..(204): Homolog of NCBI NO: 15225245 NR Description: hypothetical protein; protein id: At2g26040.1
  misc_feature (12)..(210): Homolog of NCBI NO: 15219339 NR Description: hypothetical protein; protein id: At1g73000.1
  misc_feature (47)..(211): Homolog of NCBI NO: 34907924 NR Description: B1088C09.9 [Oryza sativa (japonica
  misc_feature (11)..(209): Homolog of NCBI NO: 18405351 NR Description: expressed protein; protein id: At2g40330.1, by cDNA: 6787. [Arabidopsis thaliana] >gi|20198019|gb|AAD25668.2| protein [Arabidopsis thaliana] >gi|21594278|gb|AAM65989.1|
  misc_feature (12)..(208): Homolog of NCBI NO: 15239114 NR Description: putative protein; protein id: At5g05440.1, by cDNA: 117347., supported by cDNA: gi_15529253, supported by gi_16974394 [Arabidopsis thaliana] >gi|10176756|dbj|BAB09987.1|
  misc_feature (37)..(209): Homolog of NCBI NO: 18404709 NR Description: expressed protein; protein id: At2g38310.1, by cDNA: 32244., supported by cDNA: gi_14517501, supported by gi_15809747 [Arabidopsis thaliana] >gi|7487162|pir||T02514
TISMANSESSSSPVNEEENSQRISTLHHQTMPSDLTQDEFTQLSQSIAEFHTYQLGNGRCSSLLAQRIHAPPETVWSVVRRFDRPQIYKHFIKSCNVSEDFEMRVGCTRDVNVISGLPANTSRERLDLLDDDRRVTGFSITGGEHRLRNYKSVTTVHRFEKEEEEERIWTVVLESYVVDVPEGNSEEDTRLFADTVIRLNLQKLASITEAMNRNNNNNNSSQVR

SEQ ID NO: 80516 - protein, 221 aa, Arabidopsis thaliana
  peptide (1)..(221): Ceres Seq. ID no. 12656226
  misc_feature (57)..(201): Pfam Name: Pathogenesis-related protein Bet v I family Pfam Description: Pathogenesis-related protein Bet v I family
  misc_feature (1)..(221): Homolog of NCBI NO: 22327625 NR Description: putative protein; protein id: At5g46790.1, by cDNA: gi_17380841 [Arabidopsis thaliana] unknown protein [Arabidopsis thaliana]
  misc_feature (28)..(221): Homolog of NCBI NO: 9758515 NR Description: gene_id:MZA15.21~pir||T05073~similar to unknown
  misc_feature (28)..(220): Homolog of NCBI NO: 15236689 NR Description: putative protein; protein id: At4g17870.1, by cDNA: gi_14596204, supported by cDNA: gi_20148394 [Arabidopsis
  misc_feature (32)..(211): Homolog of NCBI NO: 37537066 NR Description: unknown protein [Oryza sativa (japonica
  misc_feature (32)..(201): Homolog of NCBI NO: 15225245 NR Description: hypothetical protein; protein id: At2g26040.1
  misc_feature (9)..(207): Homolog of NCBI NO: 15219339 NR Description: hypothetical protein; protein id: At1g73000.1
  misc_feature (44)..(208): Homolog of NCBI NO: 34907924 NR Description: B1088C09.9 [Oryza sativa (japonica
  misc_feature (8)..(206): Homolog of NCBI NO: 18405351 NR Description: expressed protein; protein id: At2g40330.1, by cDNA: 6787. [Arabidopsis thaliana] >gi|20198019|gb|AAD25668.2| protein [Arabidopsis thaliana] >gi|21594278|gb|AAM65989.1|
  misc_feature (9)..(205): Homolog of NCBI NO: 15239114 NR Description: putative protein; protein id: At5g05440.1, by cDNA: 117347., supported by cDNA: gi_15529253, supported by gi_16974394 [Arabidopsis thaliana] >gi|10176756|dbj|BAB09987.1|
  misc_feature (34)..(206): Homolog of NCBI NO: 18404709 NR Description: expressed protein; protein id: At2g38310.1, by cDNA: 32244., supported by cDNA: gi_14517501, supported by gi_15809747 [Arabidopsis thaliana] >gi|7487162|pir||T02514
MANSESSSSPVNEEENSQRISTLHHQTMPSDLTQDEFTQLSQSIAEFHTYQLGNGRCSSLLAQRIHAPPETVWSVVRRFDRPQIYKHFIKSCNVSEDFEMRVGCTRDVNVISGLPANTSRERLDLLDDDRRVTGFSITGGEHRLRNYKSVTTVHRFEKEEEEERIWTVVLESYVVDVPEGNSEEDTRLFADTVIRLNLQKLASITEAMNRNNNNNNSSQVR

SEQ ID NO: 80517 - protein, 194 aa, Arabidopsis thaliana
  peptide (1)..(194): Ceres Seq. ID no. 12656227
  misc_feature (30)..(174): Pfam Name: Pathogenesis-related protein Bet v I family Pfam Description: Pathogenesis-related protein Bet v I family
  misc_feature (1)..(194): Homolog of NCBI NO: 22327625 NR Description: putative protein; protein id: At5g46790.1, by cDNA: gi_17380841 [Arabidopsis thaliana] unknown protein [Arabidopsis thaliana]
  misc_feature (1)..(194): Homolog of NCBI NO: 9758515 NR Description: gene_id:MZA15.21~pir||T05073~similar to unknown
  misc_feature (1)..(193): Homolog of NCBI NO: 15236689 NR Description: putative protein; protein id: At4g17870.1, by cDNA: gi_14596204, supported by cDNA: gi_20148394 [Arabidopsis
  misc_feature (5)..(184): Homolog of NCBI NO: 37537066 NR Description: unknown protein [Oryza sativa (japonica
  misc_feature (5)..(174): Homolog of NCBI NO: 15225245 NR Description: hypothetical protein; protein id: At2g26040.1
  misc_feature (1)..(180): Homolog of NCBI NO: 15219339 NR Description: hypothetical protein; protein id: At1g73000.1
  misc_feature (17)..(181): Homolog of NCBI NO: 34907924 NR Description: B1088C09.9 [Oryza sativa (japonica
  misc_feature (1)..(179): Homolog of NCBI NO: 18405351 NR Description: expressed protein; protein id: At2g40330.1, by cDNA: 6787. [Arabidopsis thaliana] >gi|20198019|gb|AAD25668.2| protein [Arabidopsis thaliana] >gi|21594278|gb|AAM65989.1|
  misc_feature (1)..(178): Homolog of NCBI NO: 15239114 NR Description: putative protein; protein id: At5g05440.1, by cDNA: 117347., supported by cDNA: gi_15529253, supported by gi_16974394 [Arabidopsis thaliana] >gi|10176756|dbj|BAB09987.1|
  misc_feature (7)..(179): Homolog of NCBI NO: 18404709 NR Description: expressed protein; protein id: At2g38310.1, by cDNA: 32244., supported by cDNA: gi_14517501, supported by gi_15809747 [Arabidopsis thaliana] >gi|7487162|pir||T02514
MPSDLTQDEFTQLSQSIAEFHTYQLGNGRCSSLLAQRIHAPPETVWSVVRRFDRPQIYKHFIKSCNVSEDFEMRVGCTRDVNVISGLPANTSRERLDLLDDDRRVTGFSITGGEHRLRNYKSVTTVHRFEKEEEEERIWTVVLESYVVDVPEGNSEEDTRLFADTVIRLNLQKLASITEAMNRNNNNNNSSQVR

SEQ ID NO: 80518 - DNA, 882 bp, Arabidopsis thaliana
  misc_feature (1)..(882): Ceres Seq. ID no. 12656236
  misc_feature: MA Experiment ID: 20000185 Result: Up-regulated in Transcription
  misc_feature: MA Experiment 20000185 PARAMETER Experiment Name: At_Roots__P Parameter: Age (day) Value: 7 vs. 21
  misc_feature: MA Experiment 20000185 PARAMETER Experiment Name: At_Roots__P Parameter: Organism Value: A. thaliana
  misc_feature: MA Experiment 20000185 PARAMETER Experiment Name: At_Roots__P Parameter: Tissue Value: Roots vs. Whole Plant
  misc_feature: MA Experiment ID: 20000439 Result: Up-regulated in Transcription
  misc_feature: MA Experiment 20000439 PARAMETER Experiment Name: At_Roots__P Parameter: Age (day) Value: 14 vs. 21
  misc_feature: MA Experiment 20000439 PARAMETER Experiment Name: At_Roots__P Parameter: Organism Value: A. thaliana
  misc_feature: MA Experiment 20000439 PARAMETER Experiment Name: At_Roots__P Parameter: Tissue Value: Roots vs. Whole Plant
atggtaactgtcaaagttagcaacgtttctcttgaagcaacagaaagagatctcaaggagttcttctctttttccggcgatattgcttacctcgagactcaaagcgagaatgatggttctaaattagcatatgtcacattcaaggatttacaaggagctgaaaccgcagttctcctcaccggatcgacgattgttgattcatcggtcacagttacaatgtcaccagattaccaactacctcctgatgctttagcttccattgaatcattgaaagagagcaataaatcatcatctcctacgcgagaagatgtatcggtatttagaaaagctgaagatgttgtaagtggtatgatttcaaaagggtttgttttaggtaaagacgctatagctaaagcgaagagtcttgatgagaagcatcagttgacatcaacagcttcagctagagttacatctttcgacaaaagaatcggattcacggagaaaatcaacaccgggactacagttgtgagcgaaaaagttaaagaagttgatcagaagtttcaagtcacagagaaaacaaaatcagcaatagctgctgctgagcagacagtgagcaatgctggttctgctataatgaaaaaccggtatgttttaaccggtgccacgtgggttacgggtgcgtttaacagagtgagtaaagctgctgaagaagttggacaaaaggcgaaagagaaagttggtttggctgaggaagaagaagaagagaagaagaaagtggttgatgaagttgctatagttcatctgactgaatcaccaaaggctttagaccaatcagaacaagattcaaaactccctgaatcaaaatcacagccacacaaggagcttaacgcaagtgttgtttga

SEQ ID NO: 80519 - protein, 293 aa, Arabidopsis thaliana; identical to SEQ ID NO: 36717
  peptide (1)..(293): Ceres Seq. ID no. 12656237
  misc_feature (4)..(71): Pfam Name: RNA recognition motif. (a.k.a. RRM, RBD, or RNP domain) Pfam Description: RNA recognition motif. (a.k.a. RRM, RBD, or RNP
  misc_feature (1)..(293): Homolog of NCBI NO: 8809670 NR Description: gene_id:MSD23.5~pir||C71447~similar to unknown
  misc_feature (1)..(293): Homolog of NCBI NO: 30695063 NR Description: RNA recognition motif (RRM)-containing protein
  misc_feature (1)..(280): Homolog of NCBI NO: 18414951 NR Description: RRM-containing protein; protein id: At4g17720.1, by cDNA: 39922. [Arabidopsis thaliana]
  misc_feature (1)..(280): Homolog of NCBI NO: 7485085 NR Description: hypothetical protein - Arabidopsis thaliana hypothetical protein [Arabidopsis thaliana]
  misc_feature (3)..(248): Homolog of NCBI NO: 38347069 NR Description: OSJNBa0006A01.10 [Oryza sativa (japonica
  misc_feature (3)..(286): Homolog of NCBI NO: 38344181 NR Description: OSJNBa0053K19.20 [Oryza sativa (japonica
  misc_feature (3)..(247): Homolog of NCBI NO: 34897896 NR Description: ESTs D15336(C0474),C98053(C0474) correspond to a of the predicted gene.~Similar to Arabidopsis thaliana DNA
  misc_feature (3)..(263): Homolog of NCBI NO: 18071362 NR Description: putative splicing regulatory protein [Oryza
  misc_feature (3)..(266): Homolog of NCBI NO: 21592997 NR Description: unknown [Arabidopsis thaliana]
  misc_feature (3)..(266): Homolog of NCBI NO: 15237419 NR Description: RRM-containing protein; protein id: At5g16840.1, by cDNA: 34944., supported by cDNA: gi_16648739 [Arabidopsis

SEQ ID NO: 80520 - protein, 221 aa, Arabidopsis thaliana; identical to SEQ ID NO: 36718
  peptide (1)..(221): Ceres Seq. ID no. 12656238
  misc_feature (1)..(221): Homolog of NCBI NO: 8809670 NR Description: gene_id:MSD23.5~pir||C71447~similar to unknown
  misc_feature (1)..(221): Homolog of NCBI NO: 30695063 NR Description: RNA recognition motif (RRM)-containing protein
  misc_feature (1)..(208): Homolog of NCBI NO: 18414951 NR Description: RRM-containing protein; protein id: At4g17720.1, by cDNA: 39922. [Arabidopsis thaliana]
  misc_feature (1)..(208): Homolog of NCBI NO: 7485085 NR Description: hypothetical protein - Arabidopsis thaliana hypothetical protein [Arabidopsis thaliana]
  misc_feature (1)..(176): Homolog of NCBI NO: 38347069 NR Description: OSJNBa0006A01.10 [Oryza sativa (japonica
  misc_feature (1)..(214): Homolog of NCBI NO: 38344181 NR Description: OSJNBa0053K19.20 [Oryza sativa (japonica
  misc_feature (1)..(175): Homolog of NCBI NO: 34897896 NR Description: ESTs D15336(C0474),C98053(C0474) correspond to a of the predicted gene.~Similar to Arabidopsis thaliana DNA
  misc_feature (1)..(191): Homolog of NCBI NO: 18071362 NR Description: putative splicing regulatory protein [Oryza
  misc_feature (1)..(194): Homolog of NCBI NO: 21592997 NR Description: unknown [Arabidopsis thaliana]
  misc_feature (1)..(194): Homolog of NCBI NO: 15237419 NR Description: RRM-containing protein; protein id: At5g16840.1, by cDNA: 34944., supported by cDNA: gi_16648739 [Arabidopsis

SEQ ID NO: 80521 - protein, 177 aa, Arabidopsis thaliana
  peptide (1)..(177): Ceres Seq. ID no. 12656239
  misc_feature (1)..(177): Homolog of NCBI NO: 8809670 NR Description: gene_id:MSD23.5~pir||C71447~similar to unknown
  misc_feature (1)..(177): Homolog of NCBI NO: 30695063 NR Description: RNA recognition motif (RRM)-containing protein
  misc_feature (1)..(164): Homolog of NCBI NO: 18414951 NR Description: RRM-containing protein; protein id: At4g17720.1, by cDNA: 39922. [Arabidopsis thaliana]
  misc_feature (1)..(164): Homolog of NCBI NO: 7485085 NR Description: hypothetical protein - Arabidopsis thaliana hypothetical protein [Arabidopsis thaliana]
  misc_feature (1)..(132): Homolog of NCBI NO: 38347069 NR Description: OSJNBa0006A01.10 [Oryza sativa (japonica
  misc_feature (1)..(170): Homolog of NCBI NO: 38344181 NR Description: OSJNBa0053K19.20 [Oryza sativa (japonica
  misc_feature (1)..(131): Homolog of NCBI NO: 34897896 NR Description: ESTs D15336(C0474),C98053(C0474) correspond to a of the predicted gene.~Similar to Arabidopsis thaliana DNA
  misc_feature (1)..(147): Homolog of NCBI NO: 18071362 NR Description: putative splicing regulatory protein [Oryza
  misc_feature (1)..(150): Homolog of NCBI NO: 21592997 NR Description: unknown [Arabidopsis thaliana]
  misc_feature (1)..(150): Homolog of NCBI NO: 15237419 NR Description: RRM-containing protein; protein id: At5g16840.1, by cDNA: 34944., supported by cDNA: gi_16648739 [Arabidopsis
MISKGFVLGKDAIAKAKSLDEKHQLTSTASARVTSFDKRIGFTEKINTGTTVVSEKVKEVDQKFQVTEKTKSAIAAAEQTVSNAGSAIMKNRYVLTGATWVTGAFNRVSKAAEEVGQKAKEKVGLAEEEEEEKKKVVDEVAIVHLTESPKALDQSEQDSKLPESKSQPHKELNASVV

SEQ ID NO: 80522 - DNA, 1731 bp, Arabidopsis thaliana
  misc_feature (1)..(1731): Ceres Seq. ID no. 12656315
  misc_feature: MA Experiment ID: 20000328 Result: Down-regulated in Transcription
  misc_feature: MA Experiment 20000328 PARAMETER Experiment Name: At_42deg_Heat_Sub_P Parameter: Age (day) Value: 14
  misc_feature: MA Experiment 20000328 PARAMETER Experiment Name: At_42deg_Heat_Sub_P Parameter: Organism Value: A. thaliana
  misc_feature: MA Experiment 20000328 PARAMETER Experiment Name: At_42deg_Heat_Sub_P Parameter: Plant Line Value: WS
  misc_feature: MA Experiment 20000328 PARAMETER Experiment Name: At_42deg_Heat_Sub_P Parameter: Temperature (deg C) Value: 42 vs. 22
  misc_feature: MA Experiment 20000328 PARAMETER Experiment Name: At_42deg_Heat_Sub_P Parameter: Timepoint (hr) Value: 6
  misc_feature: MA Experiment 20000328 PARAMETER Experiment Name: At_42deg_Heat_Sub_P Parameter: Tissue Value: Aerial
atgctaagaactgtgtcaaatgcttttaccacaaggagccatgttggttccactgcgtcttcgaactcatggagcaccatcgttcctgctctggctcgtttcggttccatcggcgtattacgcgctgccgttgaattgatcaatgacggcgaaaagccagatgcttctccacttgttcacttgctccgtgtctctggcaattatggctacgtttctttgtgtcgacagcttcacggttacgtcacaaaacatgggtttgtctcaaatacgcgtctttctaattcgctgatgaggttttacaagacaagtgactcattagaagatgctcacaaagtgtttgatgaaatgcctgacccagatgtcatatcgtggaactcattggtttctggttatgttcaatcgggaaggttccaggaaggaatttgtttgtttcttgagcttcatagatctgatgtcttccctaacgaattctctttcacagccgctttagctgcttgtgcacgattgcatctctcgcctctcggagcttgcatccactccaagcttgtgaaactaggcttagagaaaggcaatgttgttgtgggtaattgtctaattgacatgtacgggaaatgtggttttatggatgatgctgttttggtattccaacacatggaagaaaaggacacagtttcttggaatgcaattgttgcttcctgctcaaggaacggtaagctcgagctgggactttggtttttccaccaaatgccaaatccagacactgtaacatacaacgagctcatcgatgctttcgtcaagtccggggatttcaataatgcctttcaggttctatcggatatgccgaatcctaattcatcttcatggaacacaatattgaccggttatgtcaacagtgagaaatcaggggaagctactgagtttttcaccaaaatgcattcgtcaggtgtcagattcgatgagtacagtctgtcaatagttctggccgccgttgctgctctcgctgtggttccatgggggagtctcatccatgcttgtgctcataagcttggcctagactctcgagttgttgtcgcgagtgctctgatagatatgtattccaaatgcggaatgttgaagcacgctgagctgatgttttggacaatgcctagaaagaatctgattgtgtggaacgagatgatctctggatatgcccgtaatggcgattcaatcgaggcgatcaagctctttaaccaactgaaacaagaaaggttcctgaaacctgatcgattcacgttcttgaatctcttagctgtgtgttctcattgtgaagttccaatggaagtcatgcttggatactttgagatgatgatcaacgagtatagaatcaaaccaagcgtagagcattgctgttctcttatcagagctatggggcagagaggagaggtttggcaggcaaaacaggttattcaagaattcggttttgggtatgatggtgtggcttggagggcgttacttggtgcttgcagtgctcgcaaggatctgaaagctgcgaaaaccgttgccgctaagatgattgaattaggggatgctgataaagatgagtatttatacatagtgatgtcgaatctctatgcttaccatgagagatggagagaagttggtcaaattaggaagataatgagagaaagtggggtactgaaagaagtcgggtctagctggattgattcaagaacaaaatgtagtagctattaa

SEQ ID NO: 80523 - protein, 576 aa, Arabidopsis thaliana
  peptide (1)..(576): Ceres Seq. ID no. 12656316
  misc_feature (193)..(227): Pfam Name: PPR repeat Pfam Description: PPR repeat
  misc_feature (1)..(576): Homolog of NCBI NO: 15238101 NR Description: selenium-binding protein-like; protein id:
  misc_feature (253)..(567): Homolog of NCBI NO: 15242550 NR Description: selenium-binding protein-like; protein id:
  misc_feature (59)..(261): Homolog of NCBI NO: 15242550 NR Description: selenium-binding protein-like; protein id:
  misc_feature (258)..(575): Homolog of NCBI NO: 15228265 NR Description: putative protein; protein id: At3g47840.1
  misc_feature (2)..(263): Homolog of NCBI NO: 15228265 NR Description: putative protein; protein id: At3g47840.1
  misc_feature (287)..(568): Homolog of NCBI NO: 15232885 NR Description: hypothetical protein; protein id: At3g02330.1
  misc_feature (94)..(249): Homolog of NCBI NO: 15232885 NR Description: hypothetical protein; protein id: At3g02330.1
  misc_feature (253)..(567): Homolog of NCBI NO: 33146689 NR Description: putative pentatricopeptide (PPR)
  misc_feature (95)..(280): Homolog of NCBI NO: 33146689 NR Description: putative pentatricopeptide (PPR)
  misc_feature (20)..(313): Homolog of NCBI NO: 15232885 NR Description: hypothetical protein; protein id: At3g02330.1
MLRTVSNAFTTRSHVGSTASSNSWSTIVPALARFGSIGVLRAAVELINDGEKPDASPLVHLLRVSGNYGYVSLCRQLHGYVTKHGFVSNTRLSNSLMRFYKTSDSLEDAHKVFDEMPDPDVISWNSLVSGYVQSGRFQEGICLFLELHRSDVFPNEFSFTAALAACARLHLSPLGACIHSKLVKLGLEKGNVVVGNCLIDMYGKCGFMDDAVLVFQHMEEKDTVSWNAIVASCSRNGKLELGLWFFHQMPNPDTVTYNELIDAFVKSGDFNNAFQVLSDMPNPNSSSWNTILTGYVNSEKSGEATEFFTKMHSSGVRFDEYSLSIVLAAVAALAVVPWGSLIHACAHKLGLDSRVVVASALIDMYSKCGMLKHAELMFWTMPRKNLIVWNEMISGYARNGDSIEAIKLFNQLKQERFLKPDRFTFLNLLAVCSHCEVPMEVMLGYFEMMINEYRIKPSVEHCCSLIRAMGQRGEVWQAKQVIQEFGFGYDGVAWRALLGACSARKDLKAAKTVAAKMIELGDADKDEYLYIVMSNLYAYHERWREVGQIRKIMRESGVLKEVGSSWIDSRTKCSSY

SEQ ID NO: 80524 - protein, 480 aa, Arabidopsis thaliana
  peptide (1)..(480): Ceres Seq. ID no. 12656317
  misc_feature (97)..(131): Pfam Name: PPR repeat Pfam Description: PPR repeat
  misc_feature (1)..(480): Homolog of NCBI NO: 15238101 NR Description: selenium-binding protein-like; protein id:
  misc_feature (157)..(471): Homolog of NCBI NO: 15242550 NR Description: selenium-binding protein-like; protein id:
  misc_feature (1)..(165): Homolog of NCBI NO: 15242550 NR Description: selenium-binding protein-like; protein id:
  misc_feature (162)..(479): Homolog of NCBI NO: 15228265 NR Description: putative protein; protein id: At3g47840.1
  misc_feature (1)..(167): Homolog of NCBI NO: 15228265 NR Description: putative protein; protein id: At3g47840.1
  misc_feature (191)..(472): Homolog of NCBI NO: 15232885 NR Description: hypothetical protein; protein id: At3g02330.1
  misc_feature (1)..(153): Homolog of NCBI NO: 15232885 NR Description: hypothetical protein; protein id: At3g02330.1
  misc_feature (157)..(471): Homolog of NCBI NO: 33146689 NR Description: putative pentatricopeptide (PPR)
  misc_feature (1)..(184): Homolog of NCBI NO: 33146689 NR Description: putative pentatricopeptide (PPR)
  misc_feature (1)..(217): Homolog of NCBI NO: 15232885 NR Description: hypothetical protein; protein id: At3g02330.1
MRFYKTSDSLEDAHKVFDEMPDPDVISWNSLVSGYVQSGRFQEGICLFLELHRSDVFPNEFSFTAALAACARLHLSPLGACIHSKLVKLGLEKGNVVVGNCLIDMYGKCGFMDDAVLVFQHMEEKDTVSWNAIVASCSRNGKLELGLWFFHQMPNPDTVTYNELIDAFVKSGDFNNAFQVLSDMPNPNSSSWNTILTGYVNSEKSGEATEFFTKMHSSGVRFDEYSLSIVLAAVAALAVVPWGSLIHACAHKLGLDSRVVVASALIDMYSKCGMLKHAELMFWTMPRKNLIVWNEMISGYARNGDSIEAIKLFNQLKQERFLKPDRFTFLNLLAVCSHCEVPMEVMLGYFEMMINEYRIKPSVEHCCSLIRAMGQRGEVWQAKQVIQEFGFGYDGVAWRALLGACSARKDLKAAKTVAAKMIELGDADKDEYLYIVMSNLYAYHERWREVGQIRKIMRESGVLKEVGSSWIDSRTKCSSY

SEQ ID NO: 80525 - protein, 461 aa, Arabidopsis thaliana
  peptide (1)..(461): Ceres Seq. ID no. 12656318
  misc_feature (78)..(112): Pfam Name: PPR repeat Pfam Description: PPR repeat
  misc_feature (1)..(461): Homolog of NCBI NO: 15238101 NR Description: selenium-binding protein-like; protein id:
  misc_feature (138)..(452): Homolog of NCBI NO: 15242550 NR Description: selenium-binding protein-like; protein id:
  misc_feature (1)..(146): Homolog of NCBI NO: 15242550 NR Description: selenium-binding protein-like; protein id:
  misc_feature (143)..(460): Homolog of NCBI NO: 15228265 NR Description: putative protein; protein id: At3g47840.1
  misc_feature (1)..(148): Homolog of NCBI NO: 15228265 NR Description: putative protein; protein id: At3g47840.1
  misc_feature (172)..(453): Homolog of NCBI NO: 15232885 NR Description: hypothetical protein; protein id: At3g02330.1
  misc_feature (1)..(134): Homolog of NCBI NO: 15232885 NR Description: hypothetical protein; protein id: At3g02330.1
  misc_feature (138)..(452): Homolog of NCBI NO: 33146689 NR Description: putative pentatricopeptide (PPR)
  misc_feature (1)..(165): Homolog of NCBI NO: 33146689 NR Description: putative pentatricopeptide (PPR)
  misc_feature (1)..(198): Homolog of NCBI NO: 15232885 NR Description: hypothetical protein; protein id: At3g02330.1
MPDPDVISWNSLVSGYVQSGRFQEGICLFLELHRSDVFPNEFSFTAALAACARLHLSPLGACIHSKLVKLGLEKGNVVVGNCLIDMYGKCGFMDDAVLVFQHMEEKDTVSWNAIVASCSRNGKLELGLWFFHQMPNPDTVTYNELIDAFVKSGDFNNAFQVLSDMPNPNSSSWNTILTGYVNSEKSGEATEFFTKMHSSGVRFDEYSLSIVLAAVAALAVVPWGSLIHACAHKLGLDSRVVVASALIDMYSKCGMLKHAELMFWTMPRKNLIVWNEMISGYARNGDSIEAIKLFNQLKQERFLKPDRFTFLNLLAVCSHCEVPMEVMLGYFEMMINEYRIKPSVEHCCSLIRAMGQRGEVWQAKQVIQEFGFGYDGVAWRALLGACSARKDLKAAKTVAAKMIELGDADKDEYLYIVMSNLYAYHERWREVGQIRKIMRESGVLKEVGSSWIDSRTKCSSY

SEQ ID NO: 80526 - DNA, 1188 bp, Arabidopsis thaliana
  misc_feature (1)..(1188): Ceres Seq. ID no. 12656319
  misc_feature: MA Experiment ID: 20000185 Result: Up-regulated in Transcription
  misc_feature: MA Experiment 20000185 PARAMETER Experiment Name: At_Roots__P Parameter: Age (day) Value: 7 vs. 21
  misc_feature: MA Experiment 20000185 PARAMETER Experiment Name: At_Roots__P Parameter: Organism Value: A. thaliana
  misc_feature: MA Experiment 20000185 PARAMETER Experiment Name: At_Roots__P Parameter: Tissue Value: Roots vs. Whole Plant
  misc_feature: MA Experiment ID: 20000235 Result: Up-regulated in Transcription
  misc_feature: MA Experiment 20000235 PARAMETER Experiment Name: At_Siliques_P Parameter: Age (day) Value: 21
  misc_feature: MA Experiment 20000235 PARAMETER Experiment Name: At_Siliques_P Parameter: Organism Value: A. thaliana
  misc_feature: MA Experiment 20000235 PARAMETER Experiment Name: At_Siliques_P Parameter: Plant Line Value: WS
  misc_feature: MA Experiment 20000235 PARAMETER Experiment Name: At_Siliques_P Parameter: Tissue Value: 5-10mm Siliques vs. Whole Plant
  misc_feature: MA Experiment ID: 20000436 Result: Up-regulated in Transcription
  misc_feature: MA Experiment 20000436 PARAMETER Experiment Name: At_Drought_P Parameter: Age (day) Value: 7
  misc_feature: MA Experiment 20000436 PARAMETER Experiment Name: At_Drought_P Parameter: Organism Value: A. thaliana
  misc_feature: MA Experiment 20000436 PARAMETER Experiment Name: At_Drought_P Parameter: Plant Line Value: WS
  misc_feature: MA Experiment 20000436 PARAMETER Experiment Name: At_Drought_P Parameter: Timepoint (hr) Value: 12
  misc_feature: MA Experiment 20000436 PARAMETER Experiment Name: At_Drought_P Parameter: Tissue Value: Whole Plant
  misc_feature: MA Experiment 20000436 PARAMETER Experiment Name: At_Drought_P Parameter: Treatment Value: Drought vs. No Drought
  misc_feature: MA Experiment ID: 20000439 Result: Up-regulated in Transcription
  misc_feature: MA Experiment 20000439 PARAMETER Experiment Name: At_Roots__P Parameter: Age (day) Value: 14 vs. 21
  misc_feature: MA Experiment 20000439 PARAMETER Experiment Name: At_Roots__P Parameter: Organism Value: A. thaliana
  misc_feature: MA Experiment 20000439 PARAMETER Experiment Name: At_Roots__P Parameter: Tissue Value: Roots vs. Whole Plant
  misc_feature: MA Experiment ID: 20000527 Result: Down-regulated in Transcription
  misc_feature: MA Experiment 20000527 PARAMETER Experiment Name: At_10percent_PEG_P Parameter: Age (day) Value: 20
  misc_feature: MA Experiment 20000527 PARAMETER Experiment Name: At_10percent_PEG_P Parameter: Organism Value: A. thaliana
  misc_feature: MA Experiment 20000527 PARAMETER Experiment Name: At_10percent_PEG_P Parameter: Plant Line Value: WS
  misc_feature: MA Experiment 20000527 PARAMETER Experiment Name: At_10percent_PEG_P Parameter: Timepoint (day) Value: 20
  misc_feature: MA Experiment 20000527 PARAMETER Experiment Name: At_10percent_PEG_P Parameter: Tissue Value: Whole Plant
  misc_feature: MA Experiment 20000527 PARAMETER Experiment Name: At_10percent_PEG_P Parameter: Treatment Value: 10percent PEG vs. No Treatment
  misc_feature: MA Experiment ID: 20001554 Result: Up-regulated in Transcription
  misc_feature: MA Experiment 20001554 PARAMETER Experiment Name: At_Drought_Soil_Dry_P Parameter: Age (day) Value: 21
  misc_feature: MA Experiment 20001554 PARAMETER Experiment Name: At_Drought_Soil_Dry_P Parameter: Organism Value: A. thaliana
  misc_feature: MA Experiment 20001554 PARAMETER Experiment Name: At_Drought_Soil_Dry_P Parameter: Plant Line Value: WS
  misc_feature: MA Experiment 20001554 PARAMETER Experiment Name: At_Drought_Soil_Dry_P Parameter: Post Timepoint (hr) Value: None
  misc_feature: MA Experiment 20001554 PARAMETER Experiment Name: At_Drought_Soil_Dry_P Parameter: Post-Treatment Value: None
  misc_feature: MA Experiment 20001554 PARAMETER Experiment Name: At_Drought_Soil_Dry_P Parameter: Timepoint (day) Value: 7
  misc_feature: MA Experiment 20001554 PARAMETER Experiment Name: At_Drought_Soil_Dry_P Parameter: Treatment Value: Drought vs. No Drought
  misc_feature: MA Experiment ID: 20001910 Result: Up-regulated in Transcription
  misc_feature: MA Experiment 20001910 PARAMETER Experiment Name: At_Drought_Reproduction_P Parameter: Age (day) Value: 37
  misc_feature: MA Experiment 20001910 PARAMETER Experiment Name: At_Drought_Reproduction_P Parameter: Organism Value: A. thaliana
  misc_feature: MA Experiment 20001910 PARAMETER Experiment Name: At_Drought_Reproduction_P Parameter: Plant Line Value: WS
  misc_feature: MA Experiment 20001910 PARAMETER Experiment Name: At_Drought_Reproduction_P Parameter: Timepoint (day) Value: 7
  misc_feature: MA Experiment 20001910 PARAMETER Experiment Name: At_Drought_Reproduction_P Parameter: Tissue Value: Flowers
  misc_feature: MA Experiment 20001910 PARAMETER Experiment Name: At_Drought_Reproduction_P Parameter: Treatment Value: Drought vs. No Drought
atggccatatcctcaaatcttctcctttgtctctctcttttcattttcatcatcaccaaatccgccttggctcagaaatgttccaactacaaattctccaccaaccgtctctttgagtcttgcaacgacctacctgttcttgattccttcctccactacacttacgattcttcttcaggcaatctccaaatcgcgtatcgccacacaaagctcacccccgggaaatgggtggcatgggccgtgaatcccacatctactggcatggtcggagctcaagccattgtggcttatccacaatcagacggcaccgttagggcttatacgtcacccatcagtagctaccaaacgagtctcctagaagctgagctgagtttcaacgtctctcagttgtctgccacttaccaaaacaacgagatggtcatctacgcaattctgaatcttccacttgcgaatggtggaatcattaacactgtgtggcaagatgggtcactgtcagggaacaatcctctgcctcatccaacttctggcaacaatgttcgttctgtttctactcttaaccttgtctctggtgcatctggatccacctctaccggagcaggaggagcttccaagctacgcaaacgcaacatacatggaatattgaacggtgtgagctggggtataatgatgccaataggagcaatcattgctcgctacttgaaagtctcaaaatcagcagatcctgcttggttctaccttcatgttttctgccagtcttctgcttacatcattggtgttgccggttgggcgaccggtctcaaactgggcaacgaatcagccgggattcagtttacctttcaccgtgctgttgggatcgctctcttctgcctcgcaacaattcaggtgtttgcaatgtttttgagacccaaaccagagcacaagtacagagtctactggaacatttatcaccacactgtaggctattcagtgatcattcttgcggtggtaaacgtttttaaaggactagacatcctgagccctgagaagcagtggagaaacgcttacaccgccataatcgtagtactaggtatagtcgcggttgtgctcgaagggtttacttggtatgtagtcataaagagagggaaagcagaggcatctgcgaaaacaagtcaacgagtaggcaacgatggtcggtctctatacgtgtag

SEQ ID NO: 80527 - protein, 395 aa, Arabidopsis thaliana
  peptide (1)..(395): Ceres Seq. ID no. 12656320
  misc_feature (88)..(218): Pfam Name: Protein of unknown function (DUF568) Pfam Description: Protein of unknown function (DUF568)
  misc_feature (1)..(395): Homolog of NCBI NO: 15238124 NR Description: putative protein; protein id: At5g47530.1 thaliana] >gi|9758781|dbj|BAB09079.1|
  misc_feature (6)..(394): Homolog of NCBI NO: 18086563 NR Description: AT4g17280/dl4675c [Arabidopsis thaliana]
  misc_feature (3)..(390): Homolog of NCBI NO: 13785209 NR Description: putative membrane protein [Solanum tuberosum]
  misc_feature (6)..(390): Homolog of NCBI NO: 13785213 NR Description: putative membrane protein [Solanum tuberosum]
  misc_feature (8)..(390): Homolog of NCBI NO: 13785207 NR Description: putative membrane protein [Solanum tuberosum]
  misc_feature (8)..(390): Homolog of NCBI NO: 13785211 NR Description: putative membrane protein [Solanum tuberosum]
  misc_feature (6)..(248): Homolog of NCBI NO: 22328744 NR Description: hypothetical protein; protein id: At4g17280.1,
  misc_feature (18)..(248): Homolog of NCBI NO: 7485214 NR Description: hypothetical protein - Arabidopsis thaliana hypothetical protein [Arabidopsis thaliana]
  misc_feature (27)..(388): Homolog of NCBI NO: 18421491 NR Description: Expressed protein; protein id: At5g35735.1, by cDNA: 32450., supported by cDNA: gi_13937201 [Arabidopsis >gi|9758647|dbj|BAB09271.1| gene_id:MXH1.11~pir||T10200~similar
  misc_feature (27)..(388): Homolog of NCBI NO: 21592781 NR Description: putative membrane protein [Arabidopsis thaliana]
MAISSNLLLCLSLFIFIITKSALAQKCSNYKFSTNRLFESCNDLPVLDSFLHYTYDSSSGNLQIAYRHTKLTPGKWVAWAVNPTSTGMVGAQAIVAYPQSDGTVRAYTSPISSYQTSLLEAELSFNVSQLSATYQNNEMVIYAILNLPLANGGIINTVWQDGSLSGNNPLPHPTSGNNVRSVSTLNLVSGASGSTSTGAGGASKLRKRNIHGILNGVSWGIMMPIGAIIARYLKVSKSADPAWFYLHVFCQSSAYIIGVAGWATGLKLGNESAGIQFTFHRAVGIALFCLATIQVFAMFLRPKPEHKYRVYWNIYHHTVGYSVIILAVVNVFKGLDILSPEKQWRNAYTAIIVVLGIVAVVLEGFTWYVVIKRGKAEASAKTSQRVGNDGRSLYV

SEQ ID NO: 80528 - protein, 308 aa, Arabidopsis thaliana
  peptide (1)..(308): Ceres Seq. ID no. 12656321
  misc_feature (1)..(131): Pfam Name: Protein of unknown function (DUF568) Pfam Description: Protein of unknown function (DUF568)
  misc_feature (1)..(308): Homolog of NCBI NO: 15238124 NR Description: putative protein; protein id: At5g47530.1 thaliana] >gi|9758781|dbj|BAB09079.1|
  misc_feature (1)..(307): Homolog of NCBI NO: 18086563 NR Description: AT4g17280/dl4675c [Arabidopsis thaliana]
  misc_feature (1)..(303): Homolog of NCBI NO: 13785209 NR Description: putative membrane protein [Solanum tuberosum]
  misc_feature (1)..(303): Homolog of NCBI NO: 13785213 NR Description: putative membrane protein [Solanum tuberosum]
  misc_feature (1)..(303): Homolog of NCBI NO: 13785207 NR Description: putative membrane protein [Solanum tuberosum]
  misc_feature (1)..(303): Homolog of NCBI NO: 13785211 NR Description: putative membrane protein [Solanum tuberosum]
  misc_feature (1)..(161): Homolog of NCBI NO: 22328744 NR Description: hypothetical protein; protein id: At4g17280.1,
  misc_feature (1)..(161): Homolog of NCBI NO: 7485214 NR Description: hypothetical protein - Arabidopsis thaliana hypothetical protein [Arabidopsis thaliana]
  misc_feature (1)..(301): Homolog of NCBI NO: 18421491 NR Description: Expressed protein; protein id: At5g35735.1, by cDNA: 32450., supported by cDNA: gi_13937201 [Arabidopsis >gi|9758647|dbj|BAB09271.1| gene_id:MXH1.11~pir||T10200~similar
  misc_feature (1)..(301): Homolog of NCBI NO: 21592781 NR Description: putative membrane protein [Arabidopsis thaliana]
MVGAQAIVAYPQSDGTVRAYTSPISSYQTSLLEAELSFNVSQLSATYQNNEMVIYAILNLPLANGGIINTVWQDGSLSGNNPLPHPTSGNNVRSVSTLNLVSGASGSTSTGAGGASKLRKRNIHGILNGVSWGIMMPIGAIIARYLKVSKSADPAWFYLHVFCQSSAYIIGVAGWATGLKLGNESAGIQFTFHRAVGIALFCLATIQVFAMFLRPKPEHKYRVYWNIYHHTVGYSVIILAVVNVFKGLDILSPEKQWRNAYTAIIVVLGIVAVVLEGFTWYVVIKRGKAEASAKTSQRVGNDGRSLYV

SEQ ID NO: 80529 - protein, 257 aa, Arabidopsis thaliana
  peptide (1)..(257): Ceres Seq. ID no. 12656322
  misc_feature (1)..(80): Pfam Name: Protein of unknown function (DUF568) Pfam Description: Protein of unknown function (DUF568)
  misc_feature (1)..(257): Homolog of NCBI NO: 15238124 NR Description: putative protein; protein id: At5g47530.1 thaliana] >gi|9758781|dbj|BAB09079.1|
  misc_feature (1)..(256): Homolog of NCBI NO: 18086563 NR Description: AT4g17280/dl4675c [Arabidopsis thaliana]
  misc_feature (1)..(252): Homolog of NCBI NO: 13785209 NR Description: putative membrane protein [Solanum tuberosum]
  misc_feature (1)..(252): Homolog of NCBI NO: 13785213 NR Description: putative membrane protein [Solanum tuberosum]
  misc_feature (1)..(252): Homolog of NCBI NO: 13785207 NR Description: putative membrane protein [Solanum tuberosum]
  misc_feature (1)..(252): Homolog of NCBI NO: 13785211 NR Description: putative membrane protein [Solanum tuberosum]
  misc_feature (1)..(110): Homolog of NCBI NO: 22328744 NR Description: hypothetical protein; protein id: At4g17280.1,
  misc_feature (1)..(110): Homolog of NCBI NO: 7485214 NR Description: hypothetical protein - Arabidopsis thaliana hypothetical protein [Arabidopsis thaliana]
  misc_feature (1)..(250): Homolog of NCBI NO: 18421491 NR Description: Expressed protein; protein id: At5g35735.1, by cDNA: 32450., supported by cDNA: gi_13937201 [Arabidopsis >gi|9758647|dbj|BAB09271.1| gene_id:MXH1.11~pir||T10200~similar
  misc_feature (1)..(250): Homolog of NCBI NO: 21592781 NR Description: putative membrane protein [Arabidopsis thaliana]
MVIYAILNLPLANGGIINTVWQDGSLSGNNPLPHPTSGNNVRSVSTLNLVSGASGSTSTGAGGASKLRKRNIHGILNGVSWGIMMPIGAIIARYLKVSKSADPAWFYLHVFCQSSAYIIGVAGWATGLKLGNESAGIQFTFHRAVGIALFCLATIQVFAMFLRPKPEHKYRVYWNIYHHTVGYSVIILAVVNVFKGLDILSPEKQWRNAYTAIIVVLGIVAVVLEGFTWYVVIKRGKAEASAKTSQRVGNDGRSLYV

SEQ ID NO: 80530 - DNA, 995 bp, Arabidopsis thaliana
  misc_feature (1)..(995): Ceres Seq. ID no. 12656330
  misc_feature: MA Experiment ID: 20000437 Result: Up-regulated in Transcription
  misc_feature: MA Experiment 20000437 PARAMETER Experiment Name: At_Drought_P Parameter: Age (day) Value: 8
  misc_feature: MA Experiment 20000437 PARAMETER Experiment Name: At_Drought_P Parameter: Organism Value: A. thaliana
  misc_feature: MA Experiment 20000437 PARAMETER Experiment Name: At_Drought_P Parameter: Plant Line Value: WS
  misc_feature: MA Experiment 20000437 PARAMETER Experiment Name: At_Drought_P Parameter: Timepoint (hr) Value: 24
  misc_feature: MA Experiment 20000437 PARAMETER Experiment Name: At_Drought_P Parameter: Tissue Value: Whole Plant
  misc_feature: MA Experiment 20000437 PARAMETER Experiment Name: At_Drought_P Parameter: Treatment Value: Drought vs. No Drought
tttcactcatcatacgttgtagaaagggaaccgcaaagtgaaaaaacagttgctccaccacgaggaacagatccatgtctgcttctagttcctccacaaatcccatgtcccgtgaggacgcaacaacactgcttccgtctgttcaagacaagtacggtggcgtgatgaccgagatgactcatcccatggatccttctctcttctccacacttctccgatcctctctatctacctggactcttcagggcaaaaagggagtgtggatcaagttgccaaagcagcttattggtcttgctgaaactgctgttaaggagggattctggtttcaccacgcggagaaagactacttgatgcttgtctattggattcccaaagaagacgatacgcttcctgccaatgcatctcaccgtgttggcataggtgcctttgtcattaaccacaacaaagaggtgctggtggttcaagagaagacagggagatttcaaggtcaaggtatctggaagttccccaccggagttgtgaatgagggtgaagacattcatgatggctcagtcagagaggtgaaagaagagaccggagtggatacagaattcgaccaaatattggccttcagacaaacacacaaagcgttctttggaaagtcagatttgttcttcgtgtgcatgttaaagcccctttctttggagatcaacgcacaggagtcagagattgaggcagctcagtggatgccttgggaggaatacataaatcaaccatttgtacaaaattatgagctattgaggtatatgacagacatttgctctgctaaaaccaacggagactacgaaggcttcactcctctccgcgtctctgcacctgatcaacaaggcaacttgtactacaacacccgcgacttacattcgcgcaattgaccttctttctcaacaaacagagctttcctcacagattctaacgaagctggtttctttgctgcctctctatgtaagcattttgac

SEQ ID NO: 80531 - protein, 278 aa, Arabidopsis thaliana
  peptide (1)..(278): Ceres Seq. ID no. 12656331
  misc_feature (111)..(244): Pfam Name: NUDIX domain Pfam Description: NUDIX domain
  misc_feature (1)..(278): Homolog of NCBI NO: 18422823 NR Description: MutT domain protein-like; protein id: supported by cDNA: gi_14596036, supported by cDNA: gi_17978726
  misc_feature (11)..(278): Homolog of NCBI NO: 9758793 NR Description: MutT domain protein-like [Arabidopsis thaliana]
  misc_feature (19)..(273): Homolog of NCBI NO: 38564312 NR Description: At4g25434 [Arabidopsis thaliana]
  misc_feature (19)..(169): Homolog of NCBI NO: 30686884 NR Description: MutT/nudix family protein [Arabidopsis thaliana]
  misc_feature (169)..(273): Homolog of NCBI NO: 30686884 NR Description: MutT/nudix family protein [Arabidopsis thaliana]
  misc_feature (19)..(273): Homolog of NCBI NO: 7486814 NR Description: hypothetical protein M7J2.190 - Arabidopsis >gi|2980806|emb|CAA18182.1| putative protein [Arabidopsis
  misc_feature (18)..(273): Homolog of NCBI NO: 21593371 NR Description: mutT domain protein-like [Arabidopsis thaliana]
  misc_feature (18)..(273): Homolog of NCBI NO: 21928133 NR Description: AT5g47240/MQL5_10 [Arabidopsis thaliana]
  misc_feature (18)..(273): Homolog of NCBI NO: 8809607 NR Description: mutT domain protein-like [Arabidopsis thaliana]
  misc_feature (18)..(273): Homolog of NCBI NO: 18422772 NR Description: mutT domain protein-like; protein id:
MSASSSSTNPMSREDATTLLPSVQDKYGGVMTEMTHPMDPSLFSTLLRSSLSTWTLQGKKGVWIKLPKQLIGLAETAVKEGFWFHHAEKDYLMLVYWIPKEDDTLPANASHRVGIGAFVINHNKEVLVVQEKTGRFQGQGIWKFPTGVVNEGEDIHDGSVREVKEETGVDTEFDQILAFRQTHKAFFGKSDLFFVCMLKPLSLEINAQESEIEAAQWMPWEEYINQPFVQNYELLRYMTDICSAKTNGDYEGFTPLRVSAPDQQGNLYYNTRDLHSRN

SEQ ID NO: 80532 - protein, 268 aa, Arabidopsis thaliana
  peptide (1)..(268): Ceres Seq. ID no. 12656332
  misc_feature (101)..(234): Pfam Name: NUDIX domain Pfam Description: NUDIX domain
  misc_feature (1)..(268): Homolog of NCBI NO: 18422823 NR Description: MutT domain protein-like; protein id: supported by cDNA: gi_14596036, supported by cDNA: gi_17978726
  misc_feature (1)..(268): Homolog of NCBI NO: 9758793 NR Description: MutT domain protein-like [Arabidopsis thaliana]
  misc_feature (9)..(263): Homolog of NCBI NO: 38564312 NR Description: At4g25434 [Arabidopsis thaliana]
  misc_feature (9)..(159): Homolog of NCBI NO: 30686884 NR Description: MutT/nudix family protein [Arabidopsis thaliana]
  misc_feature (159)..(263): Homolog of NCBI NO: 30686884 NR Description: MutT/nudix family protein [Arabidopsis thaliana]
  misc_feature (9)..(263): Homolog of NCBI NO: 7486814 NR Description: hypothetical protein M7J2.190 - Arabidopsis >gi|2980806|emb|CAA18182.1| putative protein [Arabidopsis
  misc_feature (8)..(263): Homolog of NCBI NO: 21593371 NR Description: mutT domain protein-like [Arabidopsis thaliana]
  misc_feature (8)..(263): Homolog of NCBI NO: 21928133 NR Description: AT5g47240/MQL5_10 [Arabidopsis thaliana]
  misc_feature (8)..(263): Homolog of NCBI NO: 8809607 NR Description: mutT domain protein-like [Arabidopsis thaliana]
  misc_feature (8)..(263): Homolog of NCBI NO: 18422772 NR Description: mutT domain protein-like; protein id:
MSREDATTLLPSVQDKYGGVMTEMTHPMDPSLFSTLLRSSLSTWTLQGKKGVWIKLPKQLIGLAETAVKEGFWFHHAEKDYLMLVYWIPKEDDTLPANASHRVGIGAFVINHNKEVLVVQEKTGRFQGQGIWKFPTGVVNEGEDIHDGSVREVKEETGVDTEFDQILAFRQTHKAFFGKSDLFFVCMLKPLSLEINAQESEIEAAQWMPWEEYINQPFVQNYELLRYMTDICSAKTNGDYEGFTPLRVSAPDQQGNLYYNTRDLHSRN

SEQ ID NO: 80533 - protein, 248 aa, Arabidopsis thaliana
  peptide (1)..(248): Ceres Seq. ID no. 12656333
  misc_feature (81)..(214): Pfam Name: NUDIX domain Pfam Description: NUDIX domain
  misc_feature (1)..(248): Homolog of NCBI NO: 18422823 NR Description: MutT domain protein-like; protein id: supported by cDNA: gi_14596036, supported by cDNA: gi_17978726
  misc_feature (1)..(248): Homolog of NCBI NO: 9758793 NR Description: MutT domain protein-like [Arabidopsis thaliana]
  misc_feature (1)..(243): Homolog of NCBI NO: 38564312 NR Description: At4g25434 [Arabidopsis thaliana]
  misc_feature (1)..(139): Homolog of NCBI NO: 30686884 NR Description: MutT/nudix family protein [Arabidopsis thaliana]
  misc_feature (139)..(243): Homolog of NCBI NO: 30686884 NR Description: MutT/nudix family protein [Arabidopsis thaliana]
  misc_feature (1)..(243): Homolog of NCBI NO: 7486814 NR Description: hypothetical protein M7J2.190 - Arabidopsis >gi|2980806|emb|CAA18182.1| putative protein [Arabidopsis
  misc_feature (1)..(243): Homolog of NCBI NO: 21593371 NR Description: mutT domain protein-like [Arabidopsis thaliana]
  misc_feature (1)..(243): Homolog of NCBI NO: 21928133 NR Description: AT5g47240/MQL5_10 [Arabidopsis thaliana]
  misc_feature (1)..(243): Homolog of NCBI NO: 8809607 NR Description: mutT domain protein-like [Arabidopsis thaliana]
  misc_feature (1)..(243): Homolog of NCBI NO: 18422772 NR Description: mutT domain protein-like; protein id:
MTEMTHPMDPSLFSTLLRSSLSTWTLQGKKGVWIKLPKQLIGLAETAVKEGFWFHHAEKDYLMLVYWIPKEDDTLPANASHRVGIGAFVINHNKEVLVVQEKTGRFQGQGIWKFPTGVVNEGEDIHDGSVREVKEETGVDTEFDQILAFRQTHKAFFGKSDLFFVCMLKPLSLEINAQESEIEAAQWMPWEEYINQPFVQNYELLRYMTDICSAKTNGDYEGFTPLRVSAPDQQGNLYYNTRDLHSRN

SEQ ID NO: 80534 - DNA, 1764 bp, Arabidopsis thaliana
  misc_feature (1)..(1764): Ceres Seq. ID no. 12656346
  misc_feature: MA Experiment ID: 108461 Result: Down-regulated in Transcription
  misc_feature: MA Experiment 108461 PARAMETER Experiment Name: At_Germinating_Seeds_cDNA_P Parameter: Age (day) Value: 1 vs. 0
  misc_feature: MA Experiment 108461 PARAMETER Experiment Name: At_Germinating_Seeds_cDNA_P Parameter: Tissue Value: Germinating Seeds
  misc_feature: MA Experiment ID: 20000111 Result: Up-regulated in Transcription
  misc_feature: MA Experiment 20000111 PARAMETER Experiment Name: At_42deg_Heat_cDNA_P Parameter: Temperature (deg C) Value: 42 vs. 22
  misc_feature: MA Experiment 20000111 PARAMETER Experiment Name: At_42deg_Heat_cDNA_P Parameter: Timepoint (hr) Value: 6
  misc_feature: MA Experiment 20000111 PARAMETER Experiment Name: At_42deg_Heat_cDNA_P Parameter: Tissue Value: Aerial
  misc_feature: MA Experiment ID: 20000112 Result: Up-regulated in Transcription
  misc_feature: MA Experiment 20000112 PARAMETER Experiment Name: At_42deg_Heat_cDNA_P Parameter: Temperature (deg C) Value: 42 vs. 22
  misc_feature: MA Experiment 20000112 PARAMETER Experiment Name: At_42deg_Heat_cDNA_P Parameter: Timepoint (hr) Value: 2
  misc_feature: MA Experiment 20000112 PARAMETER Experiment Name: At_42deg_Heat_cDNA_P Parameter: Tissue Value: Aerial
  misc_feature: MA Experiment ID: 20000173 Result: Up-regulated in Transcription
  misc_feature: MA Experiment 20000173 PARAMETER Experiment Name: At_42deg_Heat_P Parameter: Age (day) Value: 14
  misc_feature: MA Experiment 20000173 PARAMETER Experiment Name: At_42deg_Heat_P Parameter: Organism Value: A. thaliana
  misc_feature: MA Experiment 20000173 PARAMETER Experiment Name: At_42deg_Heat_P Parameter: Plant Line Value: WS
  misc_feature: MA Experiment 20000173 PARAMETER Experiment Name: At_42deg_Heat_P Parameter: Temperature (deg C) Value: 42 vs. 22
  misc_feature: MA Experiment 20000173 PARAMETER Experiment Name: At_42deg_Heat_P Parameter: Timepoint (hr) Value: 6
  misc_feature: MA Experiment 20000173 PARAMETER Experiment Name: At_42deg_Heat_P Parameter: Tissue Value: Aerial
  misc_feature: MA Experiment ID: 20000180 Result: Down-regulated in Transcription
  misc_feature: MA Experiment 20000180 PARAMETER Experiment Name: At_Germinating_Seeds_P Parameter: Age (hr) Value: 24 vs. 0
  misc_feature: MA Experiment 20000180 PARAMETER Experiment Name: At_Germinating_Seeds_P Parameter: Tissue Value: Germinating Seeds
  misc_feature: MA Experiment ID: 20000182 Result: Up-regulated in Transcription
  misc_feature: MA Experiment 20000182 PARAMETER Experiment Name: At_2mM_SA_P Parameter: Age (day) Value: 14
  misc_feature: MA Experiment 20000182 PARAMETER Experiment Name: At_2mM_SA_P Parameter: Organism Value: A. thaliana
  misc_feature: MA Experiment 20000182 PARAMETER Experiment Name: At_2mM_SA_P Parameter: Plant Line Value: WS
  misc_feature: MA Experiment 20000182 PARAMETER Experiment Name: At_2mM_SA_P Parameter: Timepoint (hr) Value: 6
  misc_feature: MA Experiment 20000182 PARAMETER Experiment Name: At_2mM_SA_P Parameter: Tissue Value: Aerial
  misc_feature: MA Experiment 20000182 PARAMETER Experiment Name: At_2mM_SA_P Parameter: Treatment Value: 2mM SA vs. No Treatment
  misc_feature: MA Experiment ID: 20000437 Result: Up-regulated in Transcription
  misc_feature: MA Experiment 20000437 PARAMETER Experiment Name: At_Drought_P Parameter: Age (day) Value: 8
  misc_feature: MA Experiment 20000437 PARAMETER Experiment Name: At_Drought_P Parameter: Organism Value: A. thaliana
  misc_feature: MA Experiment 20000437 PARAMETER Experiment Name: At_Drought_P Parameter: Plant Line Value: WS
  misc_feature: MA Experiment 20000437 PARAMETER Experiment Name: At_Drought_P Parameter: Timepoint (hr) Value: 24
  misc_feature: MA Experiment 20000437 PARAMETER Experiment Name: At_Drought_P Parameter: Tissue Value: Whole Plant
  misc_feature: MA Experiment 20000437 PARAMETER Experiment Name: At_Drought_P Parameter: Treatment Value: Drought vs. No Drought
  misc_feature: MA Experiment ID: 20000794 Result: Up-regulated in Transcription
  misc_feature: MA Experiment 20000794 PARAMETER Experiment Name: At_Petals_P Parameter: Age (day) Value: 23-25 days
  misc_feature: MA Experiment 20000794 PARAMETER Experiment Name: At_Petals_P Parameter: Plant Line Value: WS
  misc_feature: MA Experiment 20000794 PARAMETER Experiment Name: At_Petals_P Parameter: Tissue Value: Petals vs. Whole plant
  misc_feature: MA Experiment ID: 20001557 Result: Up-regulated in Transcription
  misc_feature: MA Experiment 20001557 PARAMETER Experiment Name: At_Drought_Soil_Dry_P Parameter: Age (day) Value: 27
  misc_feature: MA Experiment 20001557 PARAMETER Experiment Name: At_Drought_Soil_Dry_P Parameter: Organism Value: A. thaliana
  misc_feature: MA Experiment 20001557 PARAMETER Experiment Name: At_Drought_Soil_Dry_P Parameter: Plant Line Value: WS
  misc_feature: MA Experiment 20001557 PARAMETER Experiment Name: At_Drought_Soil_Dry_P Parameter: Post Timepoint (hr) Value: 3
  misc_feature: MA Experiment 20001557 PARAMETER Experiment Name: At_Drought_Soil_Dry_P Parameter: Post-Treatment Value: Re-Water vs. No Drought
  misc_feature: MA Experiment 20001557 PARAMETER Experiment Name: At_Drought_Soil_Dry_P Parameter: Timepoint (day) Value: 13
  misc_feature: MA Experiment 20001557 PARAMETER Experiment Name: At_Drought_Soil_Dry_P Parameter: Treatment Value: Drought vs. No Drought
  misc_feature: MA Experiment ID: 20001559 Result: Up-regulated in Transcription
  misc_feature: MA Experiment 20001559 PARAMETER Experiment Name: At_Drought_Soil_Dry_P Parameter: Age (day) Value: 28
  misc_feature: MA Experiment 20001559 PARAMETER Experiment Name: At_Drought_Soil_Dry_P Parameter: Organism Value: A. thaliana
  misc_feature: MA Experiment 20001559 PARAMETER Experiment Name: At_Drought_Soil_Dry_P Parameter: Plant Line Value: WS
  misc_feature: MA Experiment 20001559 PARAMETER Experiment Name: At_Drought_Soil_Dry_P Parameter: Post Timepoint (hr) Value: 29
  misc_feature: MA Experiment 20001559 PARAMETER Experiment Name: At_Drought_Soil_Dry_P Parameter: Post-Treatment Value: Re-Water vs. No Drought
  misc_feature: MA Experiment 20001559 PARAMETER Experiment Name: At_Drought_Soil_Dry_P Parameter: Timepoint (day) Value: 14
  misc_feature: MA Experiment 20001559 PARAMETER Experiment Name: At_Drought_Soil_Dry_P Parameter: Treatment Value: Drought vs. No Drought
  misc_feature: MA Experiment ID: 20001904 Result: Up-regulated in Transcription
  misc_feature: MA Experiment 20001904 PARAMETER Experiment Name: At_Drought_Reproduction_P Parameter: Age (day) Value: 37
  misc_feature: MA Experiment 20001904 PARAMETER Experiment Name: At_Drought_Reproduction_P Parameter: Organism Value: A. thaliana
  misc_feature: MA Experiment 20001904 PARAMETER Experiment Name: At_Drought_Reproduction_P Parameter: Plant Line Value: WS
  misc_feature: MA Experiment 20001904 PARAMETER Experiment Name: At_Drought_Reproduction_P Parameter: Timepoint (day) Value: 7
  misc_feature: MA Experiment 20001904 PARAMETER Experiment Name: At_Drought_Reproduction_P Parameter: Tissue Value: Rosettes
  misc_feature: MA Experiment 20001904 PARAMETER Experiment Name: At_Drought_Reproduction_P Parameter: Treatment Value: Drought vs. No Drought
  misc_feature: MA Experiment ID: 20001905 Result: Up-regulated in Transcription
  misc_feature: MA Experiment 20001905 PARAMETER Experiment Name: At_Drought_Reproduction_P Parameter: Age (day) Value: 40
  misc_feature: MA Experiment 20001905 PARAMETER Experiment Name: At_Drought_Reproduction_P Parameter: Organism Value: A. thaliana
  misc_feature: MA Experiment 20001905 PARAMETER Experiment Name: At_Drought_Reproduction_P Parameter: Plant Line Value: WS
  misc_feature: MA Experiment 20001905 PARAMETER Experiment Name: At_Drought_Reproduction_P Parameter: Timepoint (day) Value: 10
  misc_feature: MA Experiment 20001905 PARAMETER Experiment Name: At_Drought_Reproduction_P Parameter: Tissue Value: Rosettes
  misc_feature: MA Experiment 20001905 PARAMETER Experiment Name: At_Drought_Reproduction_P Parameter: Treatment Value: Drought vs. No Drought
  misc_feature: MA Experiment ID: 20001906 Result: Up-regulated in Transcription
  misc_feature: MA Experiment 20001906 PARAMETER Experiment Name: At_Drought_Reproduction_P Parameter: Age (day) Value: 35
  misc_feature: MA Experiment 20001906 PARAMETER Experiment Name: At_Drought_Reproduction_P Parameter: Organism Value: A. thaliana
  misc_feature: MA Experiment 20001906 PARAMETER Experiment Name: At_Drought_Reproduction_P Parameter: Plant Line Value: WS
  misc_feature: MA Experiment 20001906 PARAMETER Experiment Name: At_Drought_Reproduction_P Parameter: Timepoint (day) Value: 5
  misc_feature: MA Experiment 20001906 PARAMETER Experiment Name: At_Drought_Reproduction_P Parameter: Tissue Value: Siliques
  misc_feature: MA Experiment 20001906 PARAMETER Experiment Name: At_Drought_Reproduction_P Parameter: Treatment Value: Drought vs. No Drought
  misc_feature: MA Experiment ID: 20001908 Result: Up-regulated in Transcription
  misc_feature: MA Experiment 20001908 PARAMETER Experiment Name: At_Drought_Reproduction_P Parameter: Age (day) Value: 40
  misc_feature: MA Experiment 20001908 PARAMETER Experiment Name: At_Drought_Reproduction_P Parameter: Organism Value: A. thaliana
  misc_feature: MA Experiment 20001908 PARAMETER Experiment Name: At_Drought_Reproduction_P Parameter: Plant Line Value: WS
  misc_feature: MA Experiment 20001908 PARAMETER Experiment Name: At_Drought_Reproduction_P Parameter: Timepoint (day) Value: 10
  misc_feature: MA Experiment 20001908 PARAMETER Experiment Name: At_Drought_Reproduction_P Parameter: Tissue Value: Siliques
  misc_feature: MA Experiment 20001908 PARAMETER Experiment Name: At_Drought_Reproduction_P Parameter: Treatment Value: Drought vs. No Drought
  misc_feature: MA Experiment ID: 20001911 Result: Up-regulated in Transcription
  misc_feature: MA Experiment 20001911 PARAMETER Experiment Name: At_Drought_Reproduction_P Parameter: Age (day) Value: 40
  misc_feature: MA Experiment 20001911 PARAMETER Experiment Name: At_Drought_Reproduction_P Parameter: Organism Value: A. thaliana
  misc_feature: MA Experiment 20001911 PARAMETER Experiment Name: At_Drought_Reproduction_P Parameter: Plant Line Value: WS
  misc_feature: MA Experiment 20001911 PARAMETER Experiment Name: At_Drought_Reproduction_P Parameter: Timepoint (day) Value: 10
  misc_feature: MA Experiment 20001911 PARAMETER Experiment Name: At_Drought_Reproduction_P Parameter: Tissue Value: Flowers
  misc_feature: MA Experiment 20001911 PARAMETER Experiment Name: At_Drought_Reproduction_P Parameter: Treatment Value: Drought vs. No Drought
atacagtaaagaatataataagttgtcgaaggcttgagcgttgttccttcttcttcaggtttttgttctattgttaagatgggagacaaaaacgatgacgacaagaacattgagatatggaagattaagaagctgatcaaatcacttgaagctgctaggggtaatggaaccagcatgatctcactcatcatgcctccgcgtgatcaggtctctcgtgttaccaagatgttgggtgatgagtatggaaccgcgtcaaacatcaagagcagagtcaatcgtcaatctgttttgggggccataacttctgctcagcaaaggttgaaactttacaacagggtccctcctaatggtcttgtactctatactggaaccattgttaatgaggatggtaaggagaagaaggttactattgactttgagcctttcagacccatcaatgcttctctctacctttgtgacaacaagtttcacacggaagctttgaatgaattgttggagtctgatgacaagtttggtttcattgtaatggatggaaacgggactctctttggaactcttagtggtaacacccgtgaggtacttcacaagttctctgttgatcttccgaagaaacacggaagaggaggacagtctgctcttcgttttgcccgtctccgtatggagaagcgtcacaattatgttaggaagactgctgagctcgccacacagtactacatcaatcctgctacaagtcagcctaatgtgtctggactgattcttgctggttcagcagatttcaagactgagttgagtcagtctgatatgtttgatccccgactggctgcgaagatactgaatgtggtggatgtatcatatggaggagaaaatggttttaatcaagctattgagctgtcagctgaaatccttgcgaatgtgaagtttatccaagagaagcgtctgattgggaagtactttgaggagataagccaggacacggggaagtatgtgtttggtgtggaagatacgttgaacgctttggagtctggtgctattgagacactgattgtatgggaaaatctcgatatcaacagatatgtgatgaagaacagtgcgactggtgaaactgtgatcaaacacctgaacaaggaacaagaagccaacactgagaacttcaaagtagccgacagtgacttggctttggacgtggaggagaagctgtcgttactggagtggcttgccaatgagtacaggcgttttggttgtgcgttagagtttgtgaccaacaagtcacaggaaggttctcagttttgcagagggtttggaggaatcggaggaatacttcgttaccagcttgacatgactgcctttgattccgaggatggagaagctcttgatgatgattcggaatgacaatcaatcaaatcctcaccatcgctggttggggaagatggcgctccgccatgcctgaaccagcttgcgcgggctgtcggggtcgcgctgaagaatttgaaaataaattgaagaagcatcttttgtgaaggtgatgaatgaaggaacatgtggagagtgaagaagccttggctttggtagcgttgttggtgcctagacatttatggagttttattttgagttggtgtttctttaataatttactttggtcagttttatttcagaattggaatactcttgtctgagagaatttgggtttttattacatggatgtctttaaaaccttaattaaatcctaaattctataagttcaaagaattaatcctaaaattcggc

SEQ ID NO: 80535 - protein, 436 aa, Arabidopsis thaliana
  peptide (1)..(436): Ceres Seq. ID no. 12656347
  misc_feature (281)..(419): Pfam Name: eRF1 domain 3 Pfam Description: eRF1 domain 3
  misc_feature (1)..(436): Homolog of NCBI NO: 15238829 NR Description: eukaryotic release factor 1 homolog protein id: At5g47880.1, supported by cDNA: gi_15215862 thaliana] >gi|18202532|sp|Q39097|ERFA_ARATH Eukaryotic peptide
  misc_feature (1)..(436): Homolog of NCBI NO: 1155261 NR Description: eukaryotic release factor 1 homolog
  misc_feature (1)..(436): Homolog of NCBI NO: 15215863 NR Description: AT5g47880/MCA23_22 [Arabidopsis thaliana]
  misc_feature (1)..(436): Homolog of NCBI NO: 34393599 NR Description: putative eukaryotic peptide chain release factor
  misc_feature (1)..(433): Homolog of NCBI NO: 549010 NR Description: Eukaryotic peptide chain release factor subunit
  misc_feature (8)..(433): Homolog of NCBI NO: 15222115 NR Description: eukaryotic peptide chain release factor subunit putative; protein id: At1g12920.1, supported by cDNA: 26360., by cDNA: gi_14334579 [Arabidopsis thaliana]
  misc_feature (1)..(436): Homolog of NCBI NO: 34907268 NR Description: putative peptide chain release factor subunit 1
  misc_feature (50)..(433): Homolog of NCBI NO: 22331351 NR Description: Eukaryotic peptide chain release factor subunit 1 protein id: At3g26618.1, supported by cDNA: gi_15215647
  misc_feature (1)..(434): Homolog of NCBI NO: 18250310 NR Description: eukaryotic release factor 1 [Chlamydomonas
  misc_feature (2)..(434): Homolog of NCBI NO: 21356433 NR Description: CG5605-PA [Drosophila melanogaster]
MGDKNDDDKNIEIWKIKKLIKSLEAARGNGTSMISLIMPPRDQVSRVTKMLGDEYGTASNIKSRVNRQSVLGAITSAQQRLKLYNRVPPNGLVLYTGTIVNEDGKEKKVTIDFEPFRPINASLYLCDNKFHTEALNELLESDDKFGFIVMDGNGTLFGTLSGNTREVLHKFSVDLPKKHGRGGQSALRFARLRMEKRHNYVRKTAELATQYYINPATSQPNVSGLILAGSADFKTELSQSDMFDPRLAAKILNVVDVSYGGENGFNQAIELSAEILANVKFIQEKRLIGKYFEEISQDTGKYVFGVEDTLNALESGAIETLIVWENLDINRYVMKNSATGETVIKHLNKEQEANTENFKVADSDLALDVEEKLSLLEWLANEYRRFGCALEFVTNKSQEGSQFCRGFGGIGGILRYQLDMTAFDSEDGEALDDDSE

SEQ ID NO: 80536 - protein, 404 aa, Arabidopsis thaliana
  peptide (1)..(404): Ceres Seq. ID no. 12656348
  misc_feature (249)..(387): Pfam Name: eRF1 domain 3 Pfam Description: eRF1 domain 3
  misc_feature (1)..(404): Homolog of NCBI NO: 15238829 NR Description: eukaryotic release factor 1 homolog protein id: At5g47880.1, supported by cDNA: gi_15215862 thaliana] >gi|18202532|sp|Q39097|ERFA_ARATH Eukaryotic peptide
  misc_feature (1)..(404): Homolog of NCBI NO: 1155261 NR Description: eukaryotic release factor 1 homolog
  misc_feature (1)..(404): Homolog of NCBI NO: 15215863 NR Description: AT5g47880/MCA23_22 [Arabidopsis thaliana]
  misc_feature (1)..(404): Homolog of NCBI NO: 34393599 NR Description: putative eukaryotic peptide chain release factor
  misc_feature (1)..(401): Homolog of NCBI NO: 549010 NR Description: Eukaryotic peptide chain release factor subunit
  misc_feature (1)..(401): Homolog of NCBI NO: 15222115 NR Description: eukaryotic peptide chain release factor subunit putative; protein id: At1g12920.1, supported by cDNA: 26360., by cDNA: gi_14334579 [Arabidopsis thaliana]
  misc_feature (1)..(404): Homolog of NCBI NO: 34907268 NR Description: putative peptide chain release factor subunit 1
  misc_feature (18)..(401): Homolog of NCBI NO: 22331351 NR Description: Eukaryotic peptide chain release factor subunit 1 protein id: At3g26618.1, supported by cDNA: gi_15215647
  misc_feature (1)..(402): Homolog of NCBI NO: 18250310 NR Description: eukaryotic release factor 1 [Chlamydomonas
  misc_feature (1)..(402): Homolog of NCBI NO: 21356433 NR Description: CG5605-PA [Drosophila melanogaster]
MISLIMPPRDQVSRVTKMLGDEYGTASNIKSRVNRQSVLGAITSAQQRLKLYNRVPPNGLVLYTGTIVNEDGKEKKVTIDFEPFRPINASLYLCDNKFHTEALNELLESDDKFGFIVMDGNGTLFGTLSGNTREVLHKFSVDLPKKHGRGGQSALRFARLRMEKRHNYVRKTAELATQYYINPATSQPNVSGLILAGSADFKTELSQSDMFDPRLAAKILNVVDVSYGGENGFNQAIELSAEILANVKFIQEKRLIGKYFEEISQDTGKYVFGVEDTLNALESGAIETLIVWENLDINRYVMKNSATGETVIKHLNKEQEANTENFKVADSDLALDVEEKLSLLEWLANEYRRFGCALEFVTNKSQEGSQFCRGFGGIGGILRYQLDMTAFDSEDGEALDDDSE

SEQ ID NO: 80537 - protein, 399 aa, Arabidopsis thaliana
  peptide (1)..(399): Ceres Seq. ID no. 12656349
  misc_feature (244)..(382): Pfam Name: eRF1 domain 3 Pfam Description: eRF1 domain 3
  misc_feature (1)..(399): Homolog of NCBI NO: 15238829 NR Description: eukaryotic release factor 1 homolog protein id: At5g47880.1, supported by cDNA: gi_15215862 thaliana] >gi|18202532|sp|Q39097|ERFA_ARATH Eukaryotic peptide
  misc_feature (1)..(399): Homolog of NCBI NO: 1155261 NR Description: eukaryotic release factor 1 homolog
  misc_feature (1)..(399): Homolog of NCBI NO: 15215863 NR Description: AT5g47880/MCA23_22 [Arabidopsis thaliana]
  misc_feature (1)..(399): Homolog of NCBI NO: 34393599 NR Description: putative eukaryotic peptide chain release factor
  misc_feature (1)..(396): Homolog of NCBI NO: 549010 NR Description: Eukaryotic peptide chain release factor subunit
  misc_feature (1)..(396): Homolog of NCBI NO: 15222115 NR Description: eukaryotic peptide chain release factor subunit putative; protein id: At1g12920.1, supported by cDNA: 26360., by cDNA: gi_14334579 [Arabidopsis thaliana]
  misc_feature (1)..(399): Homolog of NCBI NO: 34907268 NR Description: putative peptide chain release factor subunit 1
  misc_feature (13)..(396): Homolog of NCBI NO: 22331351 NR Description: Eukaryotic peptide chain release factor subunit 1 protein id: At3g26618.1, supported by cDNA: gi_15215647
  misc_feature (1)..(397): Homolog of NCBI NO: 18250310 NR Description: eukaryotic release factor 1 [Chlamydomonas
  misc_feature (1)..(397): Homolog of NCBI NO: 21356433 NR Description: CG5605-PA [Drosophila melanogaster]
MPPRDQVSRVTKMLGDEYGTASNIKSRVNRQSVLGAITSAQQRLKLYNRVPPNGLVLYTGTIVNEDGKEKKVTIDFEPFRPINASLYLCDNKFHTEALNELLESDDKFGFIVMDGNGTLFGTLSGNTREVLHKFSVDLPKKHGRGGQSALRFARLRMEKRHNYVRKTAELATQYYINPATSQPNVSGLILAGSADFKTELSQSDMFDPRLAAKILNVVDVSYGGENGFNQAIELSAEILANVKFIQEKRLIGKYFEEISQDTGKYVFGVEDTLNALESGAIETLIVWENLDINRYVMKNSATGETVIKHLNKEQEANTENFKVADSDLALDVEEKLSLLEWLANEYRRFGCALEFVTNKSQEGSQFCRGFGGIGGILRYQLDMTAFDSEDGEALDDDSE

SEQ ID NO: 80538 - DNA, 3020 bp, Arabidopsis thaliana
  misc_feature (1)..(3020): Ceres Seq. ID no. 12656350
  misc_feature: MA Experiment ID: 20000314 Result: Down-regulated in Transcription
  misc_feature: MA Experiment 20000314 PARAMETER Experiment Name: At_14day_Shoots-Roots_Sub_P Parameter: Age (day) Value: 14
  misc_feature: MA Experiment 20000314 PARAMETER Experiment Name: At_14day_Shoots-Roots_Sub_P Parameter: Organism Value: A. thaliana
  misc_feature: MA Experiment 20000314 PARAMETER Experiment Name: At_14day_Shoots-Roots_Sub_P Parameter: Plant Line Value: WS
  misc_feature: MA Experiment 20000314 PARAMETER Experiment Name: At_14day_Shoots-Roots_Sub_P Parameter: Tissue Value: Roots vs. Whole Plant
  misc_feature: MA Experiment ID: 20000315 Result: Down-regulated in Transcription
  misc_feature: MA Experiment 20000315 PARAMETER Experiment Name: At_14day_Shoots-Roots_Sub_P Parameter: Age (day) Value: 14
  misc_feature: MA Experiment 20000315 PARAMETER Experiment Name: At_14day_Shoots-Roots_Sub_P Parameter: Organism Value: A. thaliana
  misc_feature: MA Experiment 20000315 PARAMETER Experiment Name: At_14day_Shoots-Roots_Sub_P Parameter: Plant Line Value: WS
  misc_feature: MA Experiment 20000315 PARAMETER Experiment Name: At_14day_Shoots-Roots_Sub_P Parameter: Tissue Value: Shoots vs. Whole Plant
  misc_feature: MA Experiment ID: 20000327 Result: Down-regulated in Transcription
  misc_feature: MA Experiment 20000327 PARAMETER Experiment Name: At_42deg_Heat_Sub_P Parameter: Age (day) Value: 14
  misc_feature: MA Experiment 20000327 PARAMETER Experiment Name: At_42deg_Heat_Sub_P Parameter: Organism Value: A. thaliana
  misc_feature: MA Experiment 20000327 PARAMETER Experiment Name: At_42deg_Heat_Sub_P Parameter: Plant Line Value: WS
  misc_feature: MA Experiment 20000327 PARAMETER Experiment Name: At_42deg_Heat_Sub_P Parameter: Temperature (deg C) Value: 42 vs. 22
  misc_feature: MA Experiment 20000327 PARAMETER Experiment Name: At_42deg_Heat_Sub_P Parameter: Timepoint (hr) Value: 1
  misc_feature: MA Experiment 20000327 PARAMETER Experiment Name: At_42deg_Heat_Sub_P Parameter: Tissue Value: Aerial
  misc_feature: MA Experiment ID: 20000328 Result: Down-regulated in Transcription
  misc_feature: MA Experiment 20000328 PARAMETER Experiment Name: At_42deg_Heat_Sub_P Parameter: Age (day) Value: 14
  misc_feature: MA Experiment 20000328 PARAMETER Experiment Name: At_42deg_Heat_Sub_P Parameter: Organism Value: A. thaliana
  misc_feature: MA Experiment 20000328 PARAMETER Experiment Name: At_42deg_Heat_Sub_P Parameter: Plant Line Value: WS
  misc_feature: MA Experiment 20000328 PARAMETER Experiment Name: At_42deg_Heat_Sub_P Parameter: Temperature (deg C) Value: 42 vs. 22
  misc_feature: MA Experiment 20000328 PARAMETER Experiment Name: At_42deg_Heat_Sub_P Parameter: Timepoint (hr) Value: 6
  misc_feature: MA Experiment 20000328 PARAMETER Experiment Name: At_42deg_Heat_Sub_P Parameter: Tissue Value: Aerial
  misc_feature: MA Experiment ID: 20000329 Result: Up-regulated in Transcription
  misc_feature: MA Experiment 20000329 PARAMETER Experiment Name: At_4deg_Cold_Sub_P Parameter: Age (day) Value: 14
  misc_feature: MA Experiment 20000329 PARAMETER Experiment Name: At_4deg_Cold_Sub_P Parameter: Organism Value: A. thaliana
  misc_feature: MA Experiment 20000329 PARAMETER Experiment Name: At_4deg_Cold_Sub_P Parameter: Plant Line Value: WS
  misc_feature: MA Experiment 20000329 PARAMETER Experiment Name: At_4deg_Cold_Sub_P Parameter: Temperature (deg C) Value: 4 vs. 22
  misc_feature: MA Experiment 20000329 PARAMETER Experiment Name: At_4deg_Cold_Sub_P Parameter: Timepoint (hr) Value: 6
  misc_feature: MA Experiment 20000329 PARAMETER Experiment Name: At_4deg_Cold_Sub_P Parameter: Tissue Value: Aerial
  misc_feature: MA Experiment ID: 20000355 Result: Down-regulated in Transcription
  misc_feature: MA Experiment 20000355 PARAMETER Experiment Name: At_Siliques_Sub_P Parameter: Age (day) Value: 21
  misc_feature: MA Experiment 20000355 PARAMETER Experiment Name: At_Siliques_Sub_P Parameter: Organism Value: A. thaliana
  misc_feature: MA Experiment 20000355 PARAMETER Experiment Name: At_Siliques_Sub_P Parameter: Plant Line Value: WS
  misc_feature: MA Experiment 20000355 PARAMETER Experiment Name: At_Siliques_Sub_P Parameter: Tissue Value: Less Than 5mm Siliques vs. Whole Plant
atacacaaaaatcaaacaccttttgagagcggttattttttctctatcaactaatacagtaaccttacgggtgtttatttgtatagatctctgtggttttcttggccaaatctagtgagatctttttggtttctcgaattcgatgaaaatgagacgaggcaattcaagtaacgaccatgaacttgggattctacgaggagctaactcggacaccaactcggacacggagagcatcgctagcgaccgtggtgcctttagcggtccgcttggccggcctaaacgtgcgtccaagaaaaacgcaagattcgccgacgatcttcccaagagaagcaatagtgttgctggcggccgtggtgatgacgatgagtacgtggagatcacgctagacatcagggacgactcggtggccgtccatagtgtccaacaagcagctggaggtggaggccacctggaggacccggagctagcccttcttacgaagaagactctcgagagcagcctcaacaacaccacctccttatctttcttccgaagcacctcctcacgcatcaagaacgcctcccgcgagctccgccgcgtgttctctagacgtccctccccggccgtgcggcggtttgaccgcacgagctccgcggccatccacgcactcaaaggtctcaagttcattgccaccaagacggccgcatggccggccgtcgaccaacgtttcgataaactctccgctgattccaacggcctcttactctctgccaagttttgggaatgcttaggaatgaataaggaatctaaagacttcgctgaccagctctttagagcattagctcgccggaataacgtctccggcgatgcaatcacaaaggaacagcttaggatattctgggaacagatctcagacgaaagctttgatgccaaactccaagtcttttttgacatggtggacaaagatgaagatgggcgagtaacagaagaagaggtggctgagattattagtcttagtgcttctgcaaacaagctctcaaatattcaaaagcaagccaaagaatatgcggcactgataatggaagagttggacccagacaatgctgggtttattatgatcgaaaacttggaaatgttgctattacaagcaccaaaccagtcggtgcggatgggagacagcaggatacttagtcagatgttaagtcagaagcttagaccggcaaaagagagcaaccctttagtgagatggtcggagaaaatcaaatatttcatacttgacaattggcagagactatggataatgatgttatggcttggcatctgtggtggcctctttacttataaattcattcagtacaagaacaaagctgcctatggtgtcatgggttattgcgtttgtgtcgccaaaggaggcgccgagactctcaaattcaacatggctctcatattgttgcctgtttgtcgaaacaccatcacttggcttaggaacaagactaagcttggtactgtcgttccttttgatgatagtcttaacttccacaaggttattgcaagcgggatagtcgtcggtgttttactccatgcgggtgcccatttaacgtgtgattttccacgtttaattgccgcggatgaggacacctatgagccgatggaaaaatactttggggatcaaccgactagctactggtggtttgtgaaaggagtggaaggatggactggcattgtgatggttgtgctaatggctatagcctttacactcgcgacgccttggttccgacgtaacaagcttaacttacctaacttcctcaagaagcttaccggtttcaacgccttttggtacacccaccatttgttcatcattgtttatgctcttctcattgtccatggtatcaagctctacctcacaaagatttggtatcagaaaacgacatggatgtatcttgctgtacccatccttctatatgcatcggagaggctgctccgtgctttcagatcaagcatcaaaccggttaagatgatcaaggtggctgtttaccccgggaacgtgttgtctctacacatgacgaagccacaaggattcaaatacaaaagtggacagttcatgttggtgaactgccgagccgtatctccattcgaatggcatcctttctcaatcacatcagctcccggagacgattacctgagcgtacatatccgcactctcggtgactggacacgtaagctcaggaccgttttctccgaggtttgcaaacctcctaccgccggtaaaagcggtcttctccgagcagacggaggagatggaaacctcccgttcccgaaggtccttatcgacggtccatacggtgctcccgcacaagactacaagaaatacgacgtggtactcctcgtaggtctcggcattggagccacgcctatgatcagtatccttaaggacatcatcaacaacatgaaaggtcctgaccgcgacagcgacattgagaacaataacagtaacaacaatagtaaagggtttaagacaaggaaagcttatttctactgggtgactagggaacaaggatcattcgagtggttcaagggaataatggacgagatttcggagttagacgaggaaggaatcatcgagcttcacaattattgcacgagtgtgtacgaggaaggtgatgcaagagtggctctcattgccatgcttcagtcgttgcaacacgctaagaacggtgtggatgttgtgtcgggtacacgtgtcaagtcccacttcgctaaacctaactggagacaagtctacaagaagatcgctgttcaacatcccggcaaaagaataggagtcttctactgtggaatgccaggaatgataaaggaattaaaaaatctagctttggatttttctcgaaagacaactaccaagtttgacttccacaaagagaacttctagattaattatatacgttgtagaaaaataaaacaagaaacaactatacaaataaatatttattttaaattcttttcatttttatgtaaaattatctgagttatctttttttgtt
